United States Patent Application Publication US 2025/0018062 A1 - sequence listing, part 6

SEQ ID NO: 8547 - DNA, 3195 bp, synthetic construct
  misc_feature 1..3195: note = source = /note="Description of Artificial Sequence: Synthetic coding sequence"
  source 1..3195: mol_type = other DNA
atgaagattcttattctgggcattttcttattcctctgcagcacacccgcatgggccaaggagaagcactactacatcggcataattgaaaccacatgggactatgcttctgaccatggagaaaaaaagctcatctccgtagacaccgaacactccaacatctatctgcaaaatggacctgaccgcataggtaggctgtacaagaaggcactgtatctgcagtatacggatgaaacatttcgcactacaatcgagaagccggtttggctgggatttctagggcccattattaaggcagagaccggcgacaaagtgtacgtgcatctcaagaacctggcaagcagaccttatacattccacagccacggaattacatactacaaggaacacgagggcgccatctatccagacaatacgacagatttccagcgagcagatgataaagtgtacccaggtgaacagtatacctatatgctgctggcaacagaagagcaatcccccggcgagggggatggcaactgcgtcacaagaatctaccacagccacatagatgctcccaaagatatcgcctcaggccttatcggtcctctcattatctgtaagaaggactctttggataaggagaaggaaaaacatatcgatcgggagttcgtggtgatgtttagtgtggtcgacgagaatttctcttggtatctggaggacaacattaaaacttattgttcagaaccagagaaggtggataaggacaacgaagattttcaggagtcaaatcgcatgtactctgtcaatggatacacattcgggagtctgccaggattatctatgtgcgcagaagacagagtgaaatggtatctgttcgggatgggaaatgaggtagatgtacacgctgctttcttccacggtcaggcactaaccaataagaattaccgcatagatacaattaacttgttccccgctacactgttcgacgcttacatggtggcccaaaacccgggggagtggatgctctcttgtcagaacctcaaccacttgaaggcagggctgcaggccttctttcaagtgcaagagtgcaataagtcatccagcaaggataacatccgcggaaagcatgtacgccactactatatcgctgctgaagagatcatctggaattacgccccatcgggaatagacatatttacaaaggagaatttgacagccccaggatctgattcagcggtgttttttgaacagggaaccaccagaatcggaggcagctacaaaaaattggtgtacagagaatatacggatgcatccttcactaacagaaaagagcggggccctgaggaggaacacctgggaattctgggccctgttatttgggccgaggtcggtgatactatcagggtgaccttccataataagggggcctacccgctgagcatcgagcctataggggtgcggtttaacaagaacaatgagggcacatattacagccccaattacaacccgcagtctcggtccgtgccaccctccgcctcccatgtggcaccaaccgagacttttacctacgagtggacagtgccaaaagaagtcgggccgacaaatgcagatccagtctgtctcgctaagatgtattacagcgcagtagaccctactaaagatatttttaccggactaataggtccgatgaagatttgtaaaaagggtagcctgcacgctaatggtcgacagaaggacgtggacaaggagttttacctcttcccgacagtgtttgatgaaaatgagagtttgttgctagaggataacatcagaatgttcacaaccgcccccgaccaggtggataaggaagatgaggactttcaagagagcaataaaatgcactccatgaatgggttcatgtatggcaatcaaccaggcctgacaatgtgcaagggagactccgttgtgtggtatctgttttctgcaggtaacgaggccgatgtgcatggcatttattttagcggaaatacatacctgtggcgcggtgagaggcgcgataccgccaatctgtttccgcagacatccctcaccctccatatgtggccagatacagaaggcacattcaatgtggaatgtctgacaaccgatcattataccggggggatgaagcagaagtacaccgtgaatcagtgcaggagacaaagtgaagacagtacattctatctgggcgaacggacatactatattgccgcggttgaagtagagtgggactattcccctcaacgcgagtgggagaaggaacttcaccacttgcaggagcaaaacgtcagtaatgccttcttagacaaaggtgagttctacatcggctcaaagtacaaaaaggtggtgtatcggcaatacaccgattcgacttttcgggttcctgttgagaggaaggcagaagaagaacacttggggatcctaggaccccagctgcacgctgacgtcggggacaaggtgaaaattatattcaagaacatggccacccggccgtatagcatccatgcccatggcgtgcaaacagaatcctcaacagtgacaccaaccctcccgggagaaactcttacctacgtgtggaaaattcctgagcgctctggcgcaggcacggaggacagcgcctgcatcccatgggcgtactactcgacggtggaccaggttaaagacctttatagcggacttatcgggccactgatcgtttgtaggcggccctacctcaaggtctttaatccccgacgcaaactggagttcgccctgctctttctcgtgttcgatgaaaatgagtcttggtacctggacgacaacatcaagacctattcagaccatccggagaaggttaacaaagacgatgaagaattcatcgaatctaataaaatgcacgccattaacggacgaatgtttgggaatcttcagggattaaccatgcatgtgggggacgaggtcaactggtatctaatgggaatgggaaatgaaattgatctgcacacagtgcatttccacggccattcctttcagtacaaacatagaggtgtgtactcatctgacgtttttgatattttcccaggcacataccagactttagaaatgttcccacgtacacccggcatctggctgctccattgtcacgtcaccgatcatatccacgctggcatggagacaacctataccgtgttgcagaacgaagacactaagagcggc

SEQ ID NO: 8548 - DNA, 3195 bp, synthetic construct
  misc_feature 1..3195: note = source = /note="Description of Artificial Sequence: Synthetic coding sequence"
  source 1..3195: mol_type = other DNA
atgaagatactgatcttgggaatctttctctttctgtgctctaccccggcctgggctaaagagaaacactactacatcggcatcatcgaaacgacttgggactacgctagtgaccacggagagaagaaactcatcagcgtggataccgaacattcaaacatttaccttcagaacggacccgatcgcattggacgcctctacaagaaagcactgtacctgcagtatacggacgaaactttccgcactactatcgagaagcctgtatggttgggttttctcggcccaattatcaaggccgagacgggcgataaggtctatgtgcatttgaaaaacctggctagtcggccgtacactttccattcacacggcattacgtactacaaggaacatgagggagccatctaccccgacaacactactgacttccaaagagccgacgataaggtgtacccgggagaacagtatacttatatgctgctggcgacggaagaacagtcgcctggagagggagacggaaattgcgtgacccgcatctaccattcgcacatcgacgcgccgaaggacattgcctccggattgatcggtccactgatcatttgcaaaaaagattcattggacaaagagaaggagaaacacatcgacagagaattcgtggtgatgttttcggttgtcgacgagaatttctcatggtacctggaggacaatatcaagacttactgttccgagccagagaaagtggataaggacaacgaggacttccaggaatcgaaccgcatgtattcggtgaacggttacaccttcgggtcactgcccggattgtcgatgtgcgcggaagatcgcgtgaagtggtacctgttcggaatggggaatgaagtggacgtgcatgctgcctttttccacggtcaggctctgactaataagaattaccgcatcgatactattaacctgttcccggcaaccttgttcgacgcgtacatggtcgcccaaaaccccggggagtggatgctttcctgccagaatcttaaccacctgaaggcgggattgcaggcattcttccaagtgcaagaatgcaacaaatcctcttcgaaggataacatcagaggaaaacatgtgcgccactactatatcgccgcagaggagatcatttggaattacgccccatcgggaatcgatatcttcactaaggagaatcttaccgctccgggatcggactcggctgtattctttgaacaaggaaccactcggatcggcggttcgtacaagaaactggtgtacagggaatacacggacgcgagctttacgaacagaaaagagcggggcccagaggaagagcatctgggaatcctggggccggtgatctgggcggaagtcggcgacaccatccgcgtgactttccacaacaagggagcttacccattgtccatcgaaccgatcggcgtgcgcttcaacaaaaacaacgaaggaacctactactccccgaactacaatcctcagagcagatctgtgccgccgtcggcctcgcacgtcgcccccactgaaaccttcacttacgaatggactgtgccaaaggaagtgggcccgaccaacgccgacccggtctgcctcgccaagatgtactactcggccgtggatcctaccaaagacatattcaccggtctgatcggaccgatgaagatatgcaagaagggatcactgcatgcaaacggacggcagaaggacgtcgataaggagttctacctgtttccgaccgtgtttgatgagaatgagtccctgttgctggaggacaacatcaggatgtttaccactgccccagaccaggtggacaaggaagatgaagatttccaggagtcaaataagatgcattccatgaacgggttcatgtacgggaatcagccagggctcaccatgtgtaagggtgacagcgtggtgtggtatctcttctccgcgggaaatgaggccgatgtccatggaatctacttctctggcaatacctacctctggcgtggcgaacgacgcgataccgcgaacctgtttccgcaaacctcccttaccttgcacatgtggccggatacggaaggcaccttcaacgtggaatgtctgaccaccgaccactatactggaggaatgaagcaaaagtacactgtgaatcagtgccgacgccaatccgaagatagcacgttttacttgggagaaagaacctactatattgctgccgtcgaagtggagtgggactacagcccccaacgcgaatgggagaaggagctccaccacctgcaggaacagaatgtctcgaatgctttcctggacaaaggcgagttctacatcggcagtaagtacaagaaggtcgtgtacagacagtatactgacagcaccttcagggtccctgtcgaaagaaaggcagaggaggaacacttgggcatcctgggaccacaactgcacgctgatgtgggcgacaaggtgaagatcattttcaagaacatggccacccgcccatactccattcatgcgcacggcgtccaaactgaatcctccactgtgactcccaccctcccgggggaaactcttacctacgtgtggaagatcccagagcgctccggggcaggaaccgaggattctgcgtgcatcccctgggcctattacagcactgtggaccaagtcaaagacctctactcaggactcatcgggccactgatcgtgtgcaggcgaccctacctcaaagtgttcaacccgcgtcggaagttggagtttgcgctcctgttcctcgtattcgatgaaaacgagtcctggtacctggatgacaacatcaagacctactcagatcaccctgaaaaagtcaataaggatgacgaagaattcatcgaaagcaacaaaatgcatgcaatcaacgggcggatgttcggaaatctgcagggccttactatgcacgtgggggacgaagtgaactggtacctcatgggcatgggaaatgaaattgacctgcacaccgtccactttcatggccacagcttccagtacaagcatcggggagtttacagctcggacgtgttcgatatcttcccaggaacctaccagaccctggagatgttcccgagaactccgggaatctggttgctgcattgtcatgtcaccgaccatattcacgcaggaatggagactacttacactgtgctccagaacgaagatactaagtccgga

SEQ ID NO: 8549 - DNA, 3195 bp, synthetic construct
  misc_feature 1..3195: note = source = /note="Description of Artificial Sequence: Synthetic coding sequence"
  source 1..3195: mol_type = other DNA
atgaagatcctgatactgggcatctttctttttctatgcagtaccccggcatgggctaaggagaaacactattatattggcatcatcgaaaccacttgggactatgctagcgaccatggtgagaagaaactgatcagtgtggatacagagcatagcaacatctacctacagaacgggccagacaggataggcagactatataagaaagccctgtacctccagtacaccgacgaaaccttccgaacaacaatagaaaagcctgtgtggctgggttttttgggccccatcattaaagccgagactggagataaagtttatgtacacctgaaaaatctagccagccgcccatatacatttcatagccatggtatcacttactacaaggaacacgagggagctatatacccagataacaccacagactttcagagggctgatgacaaagtgtatcctggagagcagtatacatacatgctgctggcaacagaggagcaatctccaggagagggcgacggcaactgcgtgacccgtatttatcacagtcatattgatgcccccaaggacatcgcttctggtctgattggccctctgattatatgtaaaaaagacagcctggacaaagaaaaggaaaaacacatcgatcgggaatttgtggtcatgtttagcgttgtggatgagaatttctcttggtacctagaggataatataaagacctattgtagtgagccagagaaggtggacaaagacaatgaggactttcaagagtctaacaggatgtatagtgtgaatggatacacattcggctcactccctggcctgtcaatgtgtgccgaggatcgcgttaagtggtacctctttgggatgggaaacgaggttgatgtgcatgccgcctttttccacggccaggctctaacaaataaaaattatcggattgacacaataaatttatttcctgcaaccctatttgatgcatatatggttgcccagaaccccggagagtggatgttatcttgtcagaatctgaatcatctgaaggccggacttcaggccttcttccaagtgcaagaatgtaacaagagtagctccaaagataatatcagaggtaaacacgtacgtcattattacattgccgccgaagagattatatggaactacgcccctagtggtatcgacatctttactaaagaaaatctcacagcaccaggctcagattcagccgttttctttgaacagggcacaactaggatcggcggctcctacaagaagctagtgtatagggagtatactgacgcctccttcaccaaccggaaggagcgcggtccagaggaggagcacctgggcatcctgggccctgtcatttgggctgaggtgggagacaccatccgagtgacatttcacaataaaggagcttatccactgtccatagagcccatcggcgtgagatttaacaaaaataatgagggaacatactactccccaaactataacccccagtcacgaagcgtcccacccagcgcctctcacgtggcacctacagaaacctttacctatgagtggaccgtgccaaaagaagtgggcccaaccaacgctgacccagtttgcctggccaaaatgtactatagtgctgtggatcctaccaaggacatattcaccgggctgattggccccatgaagatttgcaagaagggcagtctgcacgcaaatggtcgccagaaggatgtcgacaaagaattttatctttttcctacagtgttcgatgaaaacgagtccttgcttctggaagataacatcaggatgttcactacagcccccgatcaggtggataaggaagatgaagactttcaagaatctaataagatgcattctatgaatggcttcatgtacggcaatcagccagggctgaccatgtgtaagggcgattcagtggtgtggtatctgtttagtgctgggaacgaggcagacgtccacggtatttacttcagtgggaacacatacttgtggagaggcgaacgacgcgataccgccaacctatttccccagacttcactgacattacacatgtggcctgacactgaagggacatttaacgtggaatgtcttactactgaccactataccgggggaatgaaacaaaagtataccgtcaaccaatgtcggcggcaaagcgaggattccaccttctacctgggtgagagaacctactatattgccgcagtcgaggttgagtgggactatagtccacagagggagtgggaaaaagaactgcatcacctgcaggaacagaacgtgagcaacgccttcctggacaaaggggagttttatattggaagtaaatataagaaggtggtgtacagacagtacactgacagcacctttcgcgtgccagtcgagcggaaagctgaggaggagcacctgggcattctgggcccacagctccacgccgatgtgggcgataaggttaaaattatttttaagaatatggccacccgcccttactccattcacgcccacggggtccagaccgaatccagcactgtgactcccactctgcccggggagactctgacctatgtgtggaaaataccagaaaggagtggagccggaaccgaggacagcgcctgcattccatgggcctactatagtaccgttgaccaggttaaagacctatattctggactgataggccctctaattgtgtgtagaaggccatacctaaaggtctttaacccaaggaggaagctcgagtttgcactgctattcctggtcttcgacgagaatgagagttggtatctggatgacaacatcaaaacttattctgatcaccctgagaaagtcaacaaggacgatgaagagttcatagaaagcaataagatgcacgccatcaacggtagaatgttcggcaatttacaagggctaacaatgcacgttggcgacgaggtcaactggtatctaatgggcatgggcaatgaaattgacctgcacaccgttcattttcatgggcattcttttcaatataaacaccgaggagtgtacagttccgatgtgtttgatatattccctggaacctaccagacccttgaaatgttccctcgcacccccggcatctggctactacattgtcacgtcacagaccatatccacgccggcatggagacaacctataccgttctacagaatgaagacaccaagagcggc

SEQ ID NO: 8550 - DNA, 3195 bp, synthetic construct
  misc_feature 1..3195: note = source = /note="Description of Artificial Sequence: Synthetic coding sequence"
  source 1..3195: mol_type = other DNA
atgaagattttaatcttgggcatttttctgttcctgtgtagtaccccagcttgggccaaggagaaacactactatatcgggattatcgaaaccacctgggattacgcttcagaccacggggagaagaagctgatttccgtggacaccgagcattccaacatttatttgcagaatgggcccgatcgcattggacgactgtacaaaaaggctctgtatctgcaatacaccgacgagaccttcagaactacaatcgagaagcccgtgtggctaggatttttggggccaattattaaggctgaaaccggtgataaggtgtatgtccacctgaaaaatttggcaagccgaccgtacacattccactcacacggtataacatactacaaagagcatgagggggctatctaccctgacaacacaaccgacttccagagagccgacgacaaagtttaccccggagaacagtacacctacatgcttctggccacagaagaacagtcccctggcgaaggcgatgggaactgcgttaccagaatctatcattcacacatcgatgcccctaaggacatcgcctccggattaattggtccgctgatcatctgcaaaaaagacagtttagacaaagagaaggaaaagcatattgacagagaattcgtcgttatgttctctgtggtggacgaaaacttctcctggtacctcgaagacaacatcaagacgtattgttccgaacccgagaaggtggacaaggacaacgaagattttcaagagtcaaatagaatgtattccgtgaacggatatactttcggcagcttacccggtctcagtatgtgtgcggaggatcgtgtgaagtggtatttatttgggatgggtaatgaagtggatgtccacgcagcctttttccatggtcaggccttgactaacaagaactaccggatagataccatcaatctgttccctgccacactgttcgacgcatacatggtcgctcagaatcctggcgaatggatgctgtcttgtcaaaacctgaaccatctcaaagctgggctgcaagcattcttccaggtgcaggaatgcaataagtcttcaagcaaggataatatccgcggaaagcacgttcgtcactattacatcgcagcagaagaaatcatctggaattacgcaccgagcggcatagacatttttaccaaagagaatctgacggcccctggaagcgatagcgcggtcttcttcgaacaggggaccacgagaattggcggctcctacaaaaagttagtgtatcgagaatacactgatgcttcatttacaaatcggaaggagcgcggtccagaagaagaacatttgggcatactgggaccagtgatctgggccgaggttggcgatactatccgcgtaacttttcacaacaagggagcctaccctctgtcaatagaacctatcggcgtgagatttaacaaaaacaacgagggtacgtactatagcccaaactataacccacagagcagatccgtgcctccctccgcatcacatgtagcgccaacggaaacgttcacatacgagtggaccgtgcccaaggaggtgggacccactaacgctgatccggtgtgccttgcaaagatgtactattccgcggttgacccaaccaaagatattttcaccgggttgatcggacccatgaaaatttgcaaaaaaggaagcttgcacgccaacggccggcagaaggacgttgacaaggaattctacttgtttccgaccgtgtttgatgagaacgagtctttgctgctagaagataatatacgaatgttcacgacagctcccgaccaggtcgataaggaagatgaggatttccaggagagcaacaaaatgcatagcatgaatggtttcatgtatggaaatcagccagggctcaccatgtgtaagggggacagcgtggtgtggtaccttttctccgcagggaatgaggcagatgtgcacggcatctacttttctgggaacacttacttgtggcgcggggagaggcgggatactgccaacctattccctcaaactagtctgaccctgcacatgtggcctgacacagagggtaccttcaacgttgagtgcctgacaacggaccactataccggagggatgaaacaaaagtatactgttaaccagtgcaggcgccagtctgaagactccactttctacctgggtgagcgcacatattacattgccgcagtggaggtcgagtgggattatagcccacagcgggaatgggagaaagagttgcatcatttacaggagcagaatgttagcaacgcattcttggacaagggcgagttttatatcggttctaaatacaaaaaggtggtgtaccgtcaatatacagacagcacattccgagtgcctgtggagcggaaggcggaggaagagcacttggggatcctgggtcctcagctgcacgcggatgttggtgacaaggttaagatcattttcaagaacatggctacccggccatattccatacacgcacatggagtgcaaactgaatcctcaaccgtgacgccgacgctgcccggcgaaacgctgacttacgtgtggaaaattccagaaaggagcggggcaggtacagaagactctgcctgtatcccctgggcatattactcaacagtggatcaagtcaaagacctctatagcggcctcatcgggcccctcattgtgtgcaggcgaccctatctgaaggtgtttaatcctcgaagaaagctggagttcgcactcctctttttagtttttgatgagaatgagtcctggtatctggatgataatattaaaacctacagcgatcaccccgaaaaggtgaacaaagacgacgaagagttcatcgaatccaacaaaatgcatgccatcaatggacgaatgttcggcaaccttcagggcctcaccatgcacgtaggcgatgaggtcaactggtacctgatgggcatgggcaatgagattgacctacatacagttcacttccatggtcacagctttcagtacaaacatagaggagtttactccagtgatgtgtttgacatcttccccggcacgtaccagaccctggagatgttccctaggaccccaggaatctggctcctccattgccacgtgacggaccacatccacgctggcatggaaacaacttatacggtgctgcagaacgaggacaccaagagcgga

SEQ ID NO: 8551 - DNA, 3195 bp, synthetic construct
  misc_feature 1..3195: note = source = /note="Description of Artificial Sequence: Synthetic coding sequence"
  source 1..3195: mol_type = other DNA
atgaaaatcctgatccttgggatcttcctgtttttatgctctacccctgcctgggcaaaagagaagcattattacatcggtatcatcgaaactacctgggactatgccagcgaccacggtgaaaaaaagctaatctctgttgatactgaacacagcaacatctacctccagaacggcccagacagaattggtaggttatataaaaaggctctgtatttgcagtacacggatgagacatttcgcaccacgatcgagaagcccgtgtggctaggattcttgggccccatcataaaggcagaaaccggtgataaagtgtacgtccacctgaagaatcttgcatcccggccatacacattccatagccacgggattacctactataaggaacatgagggcgctatttaccctgacaatacaactgacttccaaagagctgacgataaggtctaccccggtgagcagtatacatacatgcttttagcaacagaagaacagtcccccggggagggagacggtaactgcgtgactcgcatctaccactctcacatagacgcaccaaaggatatagccagcgggctgatagggcccctgatcatctgcaaaaaggattccctggacaaagagaaagagaagcacatagacagggagttcgtcgttatgttcagtgtcgtggatgagaacttcagctggtatcttgaggacaatatcaaaacttattgctccgagccggaaaaagtcgacaaagataacgaggattttcaggagtctaatcggatgtacagtgttaatggatacacctttggatctctgcctggcctctcaatgtgcgccgaggatagggtgaagtggtacctgttcgggatggggaacgaggttgacgtccatgccgcatttttccacggccaggccctcactaataaaaattaccgtatcgatacaattaacctctttcctgcgacgctcttcgatgcttatatggtggctcagaacccgggggagtggatgttatcatgtcagaatcttaatcacctgaaggccgggctacaggccttctttcaggtgcaggagtgtaataaatccagtagcaaagataacatccgcggcaagcatgtgcgccactactatatcgctgccgaggagatcatatggaattacgcgccctcagggatcgacatttttaccaaagagaatctgacagcacctgggtcagattccgccgtattttttgaacagggtacaacccggatcggcggatcctacaagaaactggtgtaccgagagtatactgatgcctctttcaccaatagaaaagaacgcggcccagaggaagaacatctgggtattcttggacccgtgatctgggcagaggtaggtgacacaatccgagtcactttccacaacaaaggcgcgtatcctctcagcatagagcccattggggtgcgtttcaacaagaacaacgagggcacttattattccccaaattataatccgcaatcgagaagcgttcctcccagcgcctcccacgtcgcccccaccgaaacattcacatacgagtggaccgtcccaaaagaggttggtcctaccaacgctgaccccgtgtgtttagccaaaatgtactactcagctgtcgatcccacgaaagatatcttcaccggactcatcggccctatgaaaatatgcaaaaagggcagcctacacgcgaacggcagacaaaaagacgttgacaaggaattttaccttttccccacagtgtttgacgagaatgaatctctgctgttagaagataacatacgtatgtttactacagcccccgaccaggtggataaggaagacgaggacttccaggagtccaacaagatgcatagtatgaacggatttatgtatggtaatcagcctgggctgacgatgtgcaagggagactctgtggtgtggtatctgttttccgcggggaacgaggccgatgtgcacgggatctatttctcgggaaatacctacctgtggagaggagagaggcgagacaccgctaatctttttccccagacatcactgaccctgcacatgtggcccgatactgaaggaacatttaatgttgagtgtctcactacagatcactatactggagggatgaaacagaagtatactgtcaatcagtgccgaagacagtctgaggacagcactttctaccttggagagcggacctactatatcgcagccgtggaagtagaatgggactactctccccaacgagagtgggagaaggaactccaccatctccaggaacagaacgtctctaatgctttcttggacaagggagagttttacataggaagtaagtataagaaggttgtctaccgacagtacacggattccaccttcagggtccccgtggaacggaaggccgaggaggaacacttggggattctggggccacagctgcacgcagatgtgggcgataaggtcaagattattttcaagaacatggcaacccgcccatactccattcacgctcacggagtgcagaccgagtcaagcacagtgacacctaccctgcctggggaaacattgacgtacgtatggaagattccggagagaagcggagccgggacagaggatagtgcctgcatcccgtgggcttattacagtactgttgaccaggttaaagacttgtattcaggcctcatcgggccattgatcgtatgccgccgtccatatctcaaggtttttaatcctcggcgcaagcttgaatttgctctgctatttctggtgttcgatgaaaatgaaagctggtatctcgacgacaacattaagacatactctgatcatccggagaaggtgaacaaagatgacgaggagtttatcgagagtaacaagatgcacgccattaacggccggatgtttggaaatctgcaagggctgactatgcatgtaggagacgaagtcaactggtaccttatgggaatggggaatgagatagaccttcacaccgttcattttcacggccactcattccaatacaagcatcgcggcgtctattcttctgatgtgtttgacatcttcccagggacttatcagaccctggaaatgtttccccggacccctggaatctggctgttacattgccacgtgacggaccatatccacgccgggatggagacgacttacacagtgctacaaaatgaggatacaaaatccggg

SEQ ID NO: 8552 - DNA, 3195 bp, synthetic construct
  misc_feature 1..3195: note = source = /note="Description of Artificial Sequence: Synthetic coding sequence"
  source 1..3195: mol_type = other DNA
atgaagatcctgatccttggaatcttcctgtttctctgcagcacaccagcgtgggcaaaggagaagcactactacattggtattatcgaaacaacatgggactacgcctcggatcacggggagaagaaattgatctcggtggacactgagcatagcaacatttacctccagaatgggcccgacaggatcggaaggttgtataagaaagctctgtatcttcagtacacagacgagacattccgaaccactatcgagaaaccagtgtggctggggttccttggaccgatcattaaggccgaaaccggcgacaaagtgtatgttcacctaaagaacctagcttcaagaccttacacttttcactctcatggcatcacatactataaagagcacgaaggcgccatataccctgacaataccaccgactttcagagagccgatgataaggtttatccaggcgaacagtacacttacatgctcctggctactgaggagcaaagcccaggcgaaggggacggaaattgcgtcacacgtatctaccattctcacatagacgctccgaaagacattgcgtccggactgatcggtcccctgatcatctgtaagaaagattccttggacaaggaaaaggagaaacatattgaccgggaattcgtagtcatgttttctgtagtggacgaaaactttagttggtatctcgaggataatatcaagacatactgttctgaacccgagaaagtcgacaaggacaacgaagactttcaagagtcgaataggatgtattccgttaatgggtacacgtttggcagcctcccgggactgagcatgtgcgcggaagatcgagtcaaatggtacctttttggcatgggcaatgaggtggacgttcacgccgcattctttcatggtcaggcccttactaacaaaaattataggattgataccataaatctctttcctgcgaccctcttcgatgcttatatggtcgcgcaaaacccaggagaatggatgctgagctgccagaacctgaaccatctaaaggccggcctgcaggcgttcttccaggtccaagagtgcaataaaagcagtagtaaagataatattcgtgggaagcacgtgaggcactactacatcgccgccgaagaaatcatttggaactacgctcccagcggaattgacatctttacgaaggagaaccttactgccccagggtcagactctgccgtctttttcgagcaaggcactacccggatcggcggtagttacaaaaagctcgtctaccgtgaatatacagacgcctcttttacaaatagaaaggagcgtggcccagaggaggagcatctgggcattctgggaccggtcatctgggccgaggtgggggacaccattcgtgtcaccttccacaataagggcgcttaccccctgagtattgagcctatcggggtgcggtttaacaaaaataatgagggcacctattactccccaaactataacccacagagtcgctccgtccctccctcagcatctcatgtggccccaacagaaactttcacctatgaatggaccgtgccaaaggaagttggacctacaaatgctgaccctgtgtgtctcgctaaaatgtactactcagccgtggaccccaccaaggatatcttcaccggattgatcggtcccatgaagatatgcaagaaggggtcgctccacgccaacggcagacagaaggatgtagacaaggagttctacctatttcctaccgttttcgatgagaatgaatcactattgctcgaggacaacattcgcatgtttacaactgccccagaccaggtcgacaaagaggacgaggactttcaggaatcaaacaagatgcacagtatgaatggctttatgtacggaaaccagcccgggctgaccatgtgcaaaggtgattcagttgtgtggtatctgtttagcgcaggcaatgaggccgatgtgcatggtatctacttcagcggcaatacctatttgtggcgaggtgagcggcgcgacaccgccaacctgttcccacagacttctctgactctacacatgtggcctgataccgagggaacgtttaatgtggaatgcctcacaactgatcattataccggaggcatgaagcagaaatacaccgtaaatcagtgcaggagacagtccgaggattccacattttacctcggggagcggacctattacatcgcagcggttgaggtggagtgggactactcaccacagagggaatgggaaaaagagctccaccacttgcaggagcaaaatgtaagcaacgcctttttggataaaggcgagttttatattggcagcaagtacaagaaagtcgtatatcggcagtacactgactctacattcagagtccctgttgagaggaaagccgaggaagagcacctagggatcctgggaccacaactccacgccgacgtgggcgataaagtcaaaatcatattcaagaatatggcaacacgcccatacagcatccatgcacacggagtacaaacagagtcttcgacagtgacgcccacactccccggagaaactctgacgtatgtgtggaaaattcctgagcgctctggagctggcaccgaggactcagcctgtatcccctgggcttattactccacggtggatcaggtgaaagatctttatagcggccttattggccctctgattgtttgccggcgcccttaccttaaggttttcaacccacgacgcaaactcgaattcgctctgctgttcctagttttcgatgagaatgaatcctggtatctggatgataacataaaaacctatagcgatcacccagagaaagtgaacaaggacgacgaggagttcattgagtccaataagatgcatgccatcaacggcagaatgtttggtaatctgcagggattgacaatgcacgtcggcgatgaagtgaattggtacttgatgggcatgggaaacgagatcgatctgcatactgtccatttccatggccactcattccagtacaaacatagaggagtttacagctccgatgtgtttgacatctttccaggaacctaccaaacactagaaatgtttccgagaacgcctggtatttggctacttcattgccatgtgactgatcatatccatgctggcatggaaacgacttatacagtactgcagaatgaagatactaagtccgga

SEQ ID NO: 8553 - DNA, 3195 bp, synthetic construct
  misc_feature 1..3195: note = source = /note="Description of Artificial Sequence: Synthetic coding sequence"
  source 1..3195: mol_type = other DNA
atgaagatcctcattctcgggatctttctttttctctgtagcacaccggcctgggcgaaggagaaacactattatatagggattatagagaccacctgggattacgctagcgatcacggggagaaaaagctgataagtgtggataccgagcattccaatatatatttgcaaaacggccctgacaggattggcagactgtacaagaaggcattatatcttcagtataccgacgaaacgtttagaacaaccattgagaaaccagtttggctgggttttttgggacccattattaaggcagaaaccggtgataaggtgtacgtccatctgaagaatcttgcttccaggccatacacgtttcacagccacgggatcacttactacaaggagcacgagggcgccatttacccagataatacgactgatttccagcgagccgatgacaaggtgtatccaggcgagcagtacacctacatgctgctggccacggaggaacagtctccgggggaaggagatggcaactgtgttacccggatctaccacagccatattgacgctccaaaagatatagccagtggcctgatcggccctctgatcatttgtaagaaagatagtctcgataaggaaaaggaaaagcatatcgacagagagtttgtggtgatgttttccgtcgtggatgagaacttttcttggtatctcgaagacaacataaaaacctattgctccgaacctgaaaaggtggataaagataacgaagacttccaggaaagcaaccgcatgtacagcgttaatggatacaccttcggaagtctgcctgggctatccatgtgcgccgaggacagggtcaagtggtaccttttcggaatgggtaatgaagtcgatgtgcacgctgcgttcttccacggtcaggcccttactaataaaaattaccggatcgatacaatcaacttgttccccgccaccttattcgacgcttatatggtcgctcaaaacccgggcgagtggatgctcagctgtcaaaatctcaatcaccttaaggcgggccttcaggctttctttcaagtgcaagaatgcaacaagtcttctagcaaagataatatcagaggcaagcatgtcaggcattattatatcgcagccgaggagattatctggaactacgcaccctcaggcattgacatattcaccaaagaaaatctgactgcacctggatccgactctgccgtcttcttcgagcagggcactaccagaattggagggtcgtacaagaagttggtgtaccgcgagtatacggacgcttccttcactaataggaaagagcgcggccccgaagaggagcatcttggaatactagggccagtgatctgggccgaggtgggagatacgatccgggttaccttccataataaaggtgcctaccctctctccattgagcccatcggagttcgtttcaataagaacaatgagggcacctattattccccgaactacaatcctcagagccgctccgttccaccatccgcatctcacgtggcgccaacagagaccttcacttatgagtggaccgtcccaaaggaggttggcccgacgaacgccgatcccgtgtgcctggccaagatgtattactcagccgttgaccctaccaaggacattttcacaggtttaatagggccaatgaaaatctgcaagaagggctctctccacgccaatggtagacagaaagacgtggataaagagttttacctgttccctacagtgttcgacgaaaacgaatctctgctgctggaagataatattcgcatgtttactacagctcctgaccaggtggataaagaggatgaggatttccaggaaagtaacaaaatgcactctatgaacgggtttatgtacggcaatcagcctggtctaacaatgtgtaagggggactcggtggtgtggtaccttttcagtgccgggaatgaagctgacgtccacggtatatatttcagcgggaacacctatttgtggagaggcgagaggcgggataccgccaacctctttccgcagaccagccttactttacacatgtggcctgacaccgagggtacttttaacgtggaatgtctaacaaccgatcactacacggggggaatgaagcaaaagtatacggtgaaccagtgcaggcgccaatctgaggactccacattttatttaggggagcgcacttactacatagccgccgtcgaggtggagtgggactacagcccccagcgggaatgggaaaaagagctccaccatttgcaggaacaaaacgtttccaacgcctttcttgacaagggcgaattctacatcggaagcaagtataagaaggtagtataccgccagtacacagattccacattccgggtgccggtggaaagaaaggccgaggaggagcatctgggcatactggggccccaattacatgcggacgttggggataaagtgaaaatcatctttaagaatatggccacaagaccatactccatccacgcccacggcgtccagaccgaaagctctacagtgactccaaccttgcccggcgagacccttacgtatgtgtggaagatccctgagcggagtggtgcaggcaccgaggatagtgcttgcataccttgggcctattactcaaccgtcgatcaggtgaaagatctctacagtgggctgattgggcccctcatcgtgtgcaggcggccctatcttaaggtgtttaacccgagaaggaagctcgaatttgccttgctgttcctggtgttcgatgagaacgaatcatggtatctggacgataacatcaagacctactctgatcacccagagaaagtcaataaagatgatgaagagttcatcgaaagcaacaaaatgcacgcaataaacgggagaatgttcggaaacttacagggacttacgatgcacgtgggagacgaggttaattggtaccttatggggatgggaaatgaaattgacttgcacacagtgcacttccacggacacagcttccagtacaaacaccgtggggtctactcctctgacgtattcgatatattcccagggacctaccaaacactggagatgttccccagaactccaggcatatggctgttgcattgtcacgtgactgaccacatccacgccggtatggagaccacatacacagtgctgcaaaatgaggacacaaaatctgga

SEQ ID NO: 8554 - DNA, 3195 bp, synthetic construct; identical to SEQ ID NO: 8507
  misc_feature 1..3195: note = source = /note="Description of Artificial Sequence: Synthetic coding sequence"
  source 1..3195: mol_type = other DNA

SEQ ID NO: 8555 - DNA, 3195 bp, synthetic construct
  misc_feature 1..3195: note = source = /note="Description of Artificial Sequence: Synthetic coding sequence"
  source 1..3195: mol_type = other DNA
atgaaaatcctgatactcgggatctttctgtttctttgctccacccccgcgtgggccaaggaaaaacactactatattggcattatcgaaacaacttgggactatgcgtccgaccacggggaaaagaaacttatatctgtggatacggaacacagcaacatctacttgcagaacggccccgaccgcatcggacgcctgtataaaaaggccctgtacctccagtacaccgacgagaccttccggacgacaattgagaagcccgtgtggctggggttcctgggaccgattatcaaggcggagactggagataaggtgtacgtccatctgaagaacctggcctctcgcccatatacttttcactcacacgggattacctattataaggagcatgagggggctatttaccctgacaatactaccgattttcagcgggcagatgataaagtatatcccggcgaacagtatacatacatgcttctcgcaactgaggaacagtcccccggggagggagacggtaactgcgtgaccagaatataccactcacatattgacgcccccaaagatatagcatccggcctcattgggccacttattatttgtaagaaggatagccttgataaggagaaggagaaacatattgacagggagttcgtggtgatgtttagtgtggtcgacgagaacttttcttggtatctggaagacaacataaaaacctactgtagcgaacctgaaaaagttgacaaagacaatgaagatttccaggagtccaaccgaatgtacagtgtgaacgggtacacgtttgggtcccttccaggcctgagcatgtgcgcagaagatcgggttaagtggtatttgtttggtatggggaatgaggtggatgtacacgcggcatttttccacggtcaggccctgacaaataaaaattacagaatcgatacgatcaatcttttcccggctaccctgttcgatgcttacatggtcgcacagaatcccggcgagtggatgttgtcatgccaaaacctgaatcatctcaaggccggactgcaagcttttttccaggttcaagagtgtaacaaatcatcttcaaaagacaacatacggggaaagcacgtccgccactactatatcgcagcagaggaaattatttggaactacgctccctcaggcatcgacatcttcacaaaagaaaaccttacagcccctggcagcgacagcgctgtcttcttcgaacaagggaccactaggatcggagggagctacaaaaaattggtgtacagggagtacacggatgcctccttcactaaccggaaggaacggggtcccgaagaagagcatctgggtattctcgggcccgtcatatgggctgaggtcggagacaccatccgggtgaccttccacaacaaaggcgcctatcccctctccatcgagcccattggagtcagattcaataaaaataatgaagggacttactatagccccaattataacccccagagccggtccgtgccacctagcgcctcccacgtggctccaacagaaacatttacttatgagtggacggtacccaaggaggtgggacccacaaatgcagacccagtgtgtctggccaaaatgtattactcagcggtcgatccaacaaaggatattttcactggtctgatcgggcctatgaaaatatgcaagaagggaagcctgcatgccaatggacgccaaaaggatgtcgacaaggaattttacctgttccccacagtcttcgatgagaacgaatcattgctcctggaggacaacattagaatgtttactactgccccagaccaggtcgacaaggaagacgaggactttcaggagagcaataagatgcactctatgaacggcttcatgtacgggaatcagcccggcctcacaatgtgtaagggtgacagcgtcgtgtggtacctcttcagcgcaggcaatgaggccgatgttcacggcatctatttctccggaaatacgtacctctggaggggggagcggcgagacaccgcaaacctcttcccgcagacatctctcacacttcacatgtggcccgataccgaaggcaccttcaacgtggaatgtttgaccactgatcattacacaggcggaatgaaacagaaatatactgtgaaccagtgcaggaggcagagcgaagatagcacattttacctgggtgaacggacttattacattgcagccgttgaagtggaatgggattattcacctcaaagagagtgggagaaagaattgcatcacctccaagagcagaatgtctccaatgccttcctggacaaaggggaattttatattggttcaaagtataagaaggtggtatacaggcagtataccgacagcactttcagggtgcccgtagagaggaaggccgaggaagagcatcttggtattctcggcccccagctccacgccgatgttggcgacaaagtcaagatcatcttcaagaacatggctactcgaccttatagcattcacgcccatggggtccagacagagagttccaccgtcaccccgactctcccaggggaaaccctgacctatgtttggaagatccccgaaagatccggagctgggactgaagattccgcttgcatcccttgggcgtattattccaccgtggatcaggtgaaggacctgtactctggattgattggcccacttattgtttgccgacggccttacctgaaagtttttaacccccgacgcaaacttgagttcgctcttctcttcctcgtgtttgacgagaacgagtcttggtatctggacgataacataaaaacttattccgaccatcctgagaaggtgaacaaagacgacgaggaattcattgagagtaataagatgcacgccattaatggcagaatgttcgggaaccttcagggactgacgatgcatgtgggtgatgaggtcaactggtacctgatgggaatggggaatgagatcgacctgcataccgtgcacttccatggccactcatttcagtacaaacacaggggggtgtactcaagtgacgtcttcgacatcttccccggcacgtatcaaaccctggagatgttcccgagaactccaggaatatggctgctgcactgccacgttactgatcatattcatgctggcatggagacaacctatacagtactgcagaatgaggacacaaagtctggg

SEQ ID NO: 8556 - DNA, 3195 bp, synthetic construct
  misc_feature 1..3195: note = source = /note="Description of Artificial Sequence: Synthetic coding sequence"
  source 1..3195: mol_type = other DNA
atgaagatcctcatcctgggaatcttccttttcttgtgtagcacacctgcctgggccaaggaaaagcactattatatcggaatcatcgagacaacctgggactacgccagcgatcatggcgagaagaagctgatttctgtggacacagaacattccaatatatatctgcaaaacggccccgatcgtattggaaggctgtacaagaaggccctgtatcttcaatacaccgacgagactttcaggaccactattgagaaacccgtctggctgggtttcttgggtcccatcatcaaggcagagaccggtgacaaagtctacgtccatcttaagaatctggctagtagaccctatacattccattcccacggcattacatattataaggagcacgaaggtgccatataccctgacaacactactgactttcagagagctgacgataaggtgtacccaggcgaacagtacacctacatgctcctggcaaccgaggaacagagtcccggagagggtgatggaaactgtgtgaccagaatttaccacagccatatagatgcacccaaagacatcgctagcggcctcataggacccctcatcatatgtaagaaggacagtttggacaaggaaaaagaaaagcacattgatagggaattcgtggtgatgttctccgtagtcgacgaaaatttctcctggtacctggaggacaacattaagacatattgttccgaacccgagaaggtggacaaggataatgaggattttcaggaaagtaaccgcatgtactcagtgaatggatatactttcggatctttgcctggactttctatgtgtgctgaagacagggtaaaatggtatcttttcggaatgggtaatgaagtggacgtgcacgcagccttcttccatggccaggcactcacaaacaaaaactacaggatcgacactataaatctgtttcctgccacactctttgatgcatacatggttgcacaaaatcccggcgagtggatgctgtcatgtcagaacctgaaccacctgaaagccggactgcaggccttcttccaggtacaggagtgcaataagtcttcatctaaggacaacatcaggggtaagcacgtccgtcactactatatcgccgctgaggagatcatctggaattacgccccaagcggcatcgacatctttacaaaggagaacttgactgctcctggcagcgactctgctgttttctttgaacagggaactacccgtatcggaggatcatacaagaagttggtgtacagagaatataccgatgcttccttcaccaataggaaggaaaggggacccgaggaagagcacctcggaattctcggtcccgtgatttgggcagaagtgggagataccattcgtgtgacatttcacaataaaggagcttaccctttgtccatcgagccaataggtgtgaggtttaacaagaataacgagggtacctactattctccaaactacaacccacagagccgctccgtcccccccagtgctagtcatgtggctcccaccgagactttcacatacgagtggaccgtacccaaagaggtaggtcccacaaacgcagatcctgtctgtctcgccaagatgtattatagcgccgtcgaccccaccaaagatatcttcacaggcctcattggtcctatgaagatctgcaagaagggaagcctgcatgctaatggtcgccagaaggacgtggataaagagttctatttgtttccaactgtgtttgacgagaatgagtctttgctgctggaagataacatccgcatgttcaccactgctcccgaccaggtcgataaggaggatgaagatttccaggagagtaacaaaatgcactctatgaacggttttatgtacggaaatcaacctggattgaccatgtgcaagggtgactcagtcgtgtggtatctttttagcgccggcaatgaggctgatgtgcacggcatctatttttccggaaatacttatttgtggcgtggcgagcgtcgcgataccgccaacctcttcccacagaccagtttgacacttcacatgtggcctgacacagagggtaccttcaacgtagagtgtcttacaacagaccattataccggaggcatgaaacagaaatataccgtgaaccagtgcaggaggcagtctgaggattccacattctatcttggcgagcgtacctattacattgccgctgtcgaagtagagtgggactactctccacagcgtgagtgggaaaaagaactccatcatctgcaagagcaaaacgtatctaatgcatttctcgacaagggcgagttctacatcggcagtaagtataagaaggtcgtctacaggcaatacaccgactccacattcagagtgcctgtggaaaggaaggctgaggaagagcaccttggtattttgggaccccaactgcatgctgacgtgggcgacaaggttaaaatcatcttcaagaacatggcaactaggccctactccatacacgctcatggtgtccaaacagagtctagcactgtgactccaaccctgccaggcgagacactcacctacgtgtggaaaattccagaaaggtctggtgctggcactgaagattccgcttgtatcccatgggcctactactcaaccgtggatcaggtgaaggatctgtattcaggtttgatcggaccactcattgtttgtaggaggccctacctgaaagtgttcaaccctcgcaggaaacttgagtttgcactgttgtttctcgtgttcgatgagaacgagagctggtatctggatgacaacatcaaaacatactctgaccaccctgagaaggtgaataaggacgatgaggagttcattgaaagcaataagatgcatgctattaatggtcgcatgtttggcaatctgcaaggactcaccatgcatgttggtgacgaagttaactggtacctgatgggtatgggcaatgaaattgatctccatactgtgcattttcacggccattcattccagtacaagcacaggggcgtgtactccagtgatgttttcgatatcttccccggaacctaccagacccttgagatgttcccaaggacccccggcatatggctgcttcactgtcacgtgaccgatcacattcacgccggcatggaaaccacatacaccgtgttgcaaaacgaagatactaagtccggc

SEQ ID NO: 8557 - DNA, 3195 bp, synthetic construct
  misc_feature 1..3195: note = source = /note="Description of Artificial Sequence: Synthetic coding sequence"
  source 1..3195: mol_type = other DNA
atgaagattctgattcttggtattttcctattcctatgttctactccagcatgggcaaaggagaagcactattatatcggtataattgaaactacgtgggattacgcatcagaccatggcgagaagaaattaatcagcgtagatacagagcactctaatatctacctccagaatggtccagaccgcatcggtcgactgtataagaaggctttgtatttgcaatatacagacgaaacatttcgcacgaccatcgagaagccggtgtggttgggcttcctggggcctattattaaggcagaaaccggcgataaggtgtacgtccatttaaaaaatctggcttcaaggccatacacgttccacagtcatggcattacatactacaaggaacacgagggtgcgatataccccgataatacaaccgattttcagcgggcagacgataaggtgtaccctggtgagcagtatacttatatgttgctggctactgaagagcagtcccctggtgagggtgatgggaactgcgtgaccagaatctaccactctcacatcgacgccccgaaagatatcgcatctggcctaatcggtcccctgataatctgcaaaaaagatagcctggataaggaaaaggaaaagcacatcgatagggagttcgtggtcatgttctctgtggtggatgagaacttcagctggtatctggaggacaacatcaaaacatactgctccgagcccgagaaagtggataaagataatgaggacttccaggaatccaaccgtatgtattcagtgaacggatatacattcgggagcttaccaggtctctccatgtgtgcagaagatcgcgtcaaatggtatctgttcggtatgggaaacgaagtagatgtgcacgctgcattttttcacgggcaggcattaacgaataagaattaccggattgacacaattaacttattccctgctaccctgttcgatgcatatatggtggctcagaacccgggggaatggatgctgtcctgccagaacctgaaccatctaaaggcaggtctgcaggctttcttccaggtgcaggagtgcaataaaagcagctcaaaggacaacatccggggtaagcatgtccgtcactactatatcgctgcagaggagatcatctggaactacgccccaagtggaatcgatatttttactaaggagaacctcaccgctcccggaagcgactccgccgtgttctttgagcaaggcaccaccaggatcggaggaagctataaaaagctcgtgtaccgggagtacactgatgcttcctttaccaaccgtaaggagcggggacctgaagaggaacacttaggaatcttgggtccggtgatctgggcggaggttggcgataccatccgcgtgacattccataataagggagcttaccccctgtccattgagcccatcggggttagatttaacaaaaataacgaggggacatattattccccgaattataatccgcagtcccgatctgtgccgcctagtgcatcccacgttgcacccaccgagacctttacctacgagtggactgtgcctaaagaagtcggccccaccaatgccgatccagtctgtcttgcaaagatgtattactcagccgtggaccccacaaaggatatctttacggggctcatcgggccaatgaagatttgtaagaaggggagcctgcacgccaatggacgccaaaaggatgtggacaaggagttttatctattccctactgtatttgatgaaaacgagtccttactgctggaggataacattaggatgttcaccacagcgcccgatcaggtggacaaagaggacgaagacttccaggaaagcaataaaatgcactccatgaatggcttcatgtacggaaatcagcccggccttacaatgtgcaagggggatagtgtggtctggtacctgttcagcgccgggaacgaagcggacgtccacgggatctacttttctggcaacacctacctatggcgcggcgaacgacgtgacaccgctaacttattccctcagacatcactgacgctgcatatgtggccagatacagaggggacattcaatgtggagtgccttactactgaccactacaccggcgggatgaaacagaaatacacggtcaatcagtgcaggcgccagtcagaggattcaactttctacctcggagaacggacctactacatcgctgcagtagaggtggagtgggattacagtccacagcgcgagtgggagaaagagctgcaccatctgcaagagcagaacgtgtcaaatgcgttcctagacaaaggagagttctacattggcagcaagtataaaaaggtggtgtacagacagtacacagactctacctttagagtgccagtggaacgaaaagccgaagaggagcaccttggtatcttgggcccccagctacacgccgatgtaggggataaggtcaagataatctttaaaaatatggccactaggccctactctattcatgcccacggagtgcagactgagtcatcaaccgtcacacccaccctgcctggggagaccctgacatacgtgtggaagatccctgagcgctctggagccggtactgaggactccgcctgcatcccctgggcatattatagcacggtcgaccaagttaaggatctgtattccggtttgattggacctctgatagtctgccggcgaccatatctgaaggttttcaaccccagacgtaaacttgaattcgcgctgctgtttctcgtgtttgatgaaaacgaaagctggtatttggacgacaatattaagacttactcagatcatccagaaaaagttaacaaggatgacgaagaattcattgaatctaacaagatgcatgccataaatggtagaatgttcggcaacctgcagggcctgactatgcacgttggagacgaggtgaattggtatcttatgggtatggggaatgagattgacctgcacacagtacactttcacgggcatagctttcagtataagcaccgcggagtgtatagctccgatgtgttcgacatctttcctggcacctaccagaccctggagatgtttcctaggactcccggtatatggctcctgcattgccacgtgaccgaccacattcatgccggcatggagacaacttacaccgtgctgcagaatgaggatacgaagtcaggg

SEQ ID NO: 8558 - DNA, 3195 bp, synthetic construct
  misc_feature 1..3195: note = source = /note="Description of Artificial Sequence: Synthetic coding sequence"
  source 1..3195: mol_type = other DNA
atgaagatcctcattctggggatatttctcttcttatgtagcacccccgcgtgggccaaagaaaagcattactatattgggataattgagacaacctgggactacgccagcgatcacggagaaaagaagctgatcagcgtggatacggaacacagtaatatctatctgcagaatggccccgacagaattggtcggctgtacaaaaaggcgctgtacctgcagtacacagacgagacctttcgaactaccatcgagaagcccgtctggctcggctttttgggtccgataattaaggctgagaccggagataaagtgtacgtgcacttgaagaacctcgcctctaggccctacactttccattcccatgggatcacctactacaaagagcacgagggagctatctacccggataatacaacagattttcagcgtgctgacgataaggtgtacccaggtgaacagtatacttacatgctgctggcgacagaggagcagtcacccggtgagggcgatggcaactgcgtgactcggatctatcactcccacatcgacgcgccgaaggacatcgcaagcgggctgatcggccctttaattatttgcaagaaagatagcctggataaggaaaaagaaaagcatatcgacagggaattcgttgttatgttttctgtcgtagatgaaaacttttcctggtacctggaggataacataaaaacttactgttccgagcccgaaaaagtggacaaggacaacgaggactttcaggagagtaatcgcatgtactcggtgaatgggtacacattcggttctctccctgggctcagcatgtgcgctgaggaccgggtgaaatggtatctgttcgggatggggaatgaggtcgacgtgcacgctgcgttctttcacggtcaggcactgaccaataagaactaccgcatcgatacaattaacctgtttcccgctacacttttcgatgcctacatggttgcacagaatcctggtgaatggatgctatcgtgccagaatctgaaccatttgaaggcaggtctgcaagcgttctttcaagttcaggagtgcaataagtcaagctctaaagacaacatccgagggaagcacgtgagacattattacattgccgccgaagagatcatatggaactatgccccctccggcatcgacatttttactaaagagaatctcactgcccctggaagcgactcggccgtgttcttcgaacaggggacgacacggattggcggttcctacaaaaagttggtgtatcgcgaatacaccgatgcctcattcactaacagaaaggaacgcggcccggaagaggaacatcttggcattctgggtccagtgatctgggctgaggtgggcgatacgattcgagtcaccttccacaacaaaggagcatacccactgagtatagagcctattggagtgagatttaacaagaacaacgagggcacatattatagccccaactataatcctcagagtagatccgtaccccccagcgcaagccatgtggcaccaactgagacattcacctacgagtggacggtcccaaaggaggtcggccccaccaacgcggatcccgtgtgtctggcaaaaatgtactatagcgctgtggacccaaccaaggatattttcacaggcctcatcggccccatgaaaatttgcaagaaagggtctttacacgctaacgggagacagaaggacgtggacaaggagttttacctgtttcctacggttttcgacgaaaatgagtccttgctccttgaagacaacattcgcatgtttacaaccgccccggatcaggtggataaagaagacgaggattttcaagagtctaataaaatgcatagcatgaatggctttatgtatggcaatcaacctggtttgacaatgtgcaaaggagactctgtggtttggtatttgttcagcgcagggaacgaggccgatgttcatggcatctatttcagtgggaacacctatctatggcgaggcgagaggagagacaccgccaacctgttcccacagacctccttaactctacacatgtggcctgacaccgagggcaccttcaatgtagagtgcctgaccactgatcattacaccggaggtatgaagcagaagtacaccgtaaatcaatgccgccgccagtcagaggatagtacattctaccttggggaacggacctattacattgcagctgtcgaagtcgagtgggattacagccctcagagagagtgggaaaaggaactgcaccatttgcaggagcaaaacgtctccaatgccttcctggataaaggcgagttttacataggatctaaatacaaaaaagtcgtctatcggcaatacacagactccacgtttcgggtgcccgtggagcggaaagctgaggaggaacatttgggaatactgggccctcagctacatgctgatgttggggacaaagtcaagatcattttcaagaatatggccaccagaccctacagcattcatgcgcatggggtgcagacagaaagtagcaccgtgaccccgacgctgccaggggagaccctcacatatgtttggaagatcccagagagatctggcgcaggcactgaagattctgcatgtattccctgggcttattattccaccgtggatcaggtcaaagacttatactcaggtctcatcgggccgctaatagtgtgtagaaggccctatctgaaagtgtttaatcccaggcggaaactcgaatttgccctcctgtttctggtcttcgacgaaaatgaatcttggtacctcgacgacaatatcaagacatattcagatcacccagagaaggtcaacaaagatgacgaagagtttatagaaagtaataagatgcacgccattaatgggcgaatgttcggcaacctgcagggactgaccatgcatgttggcgacgaggtgaattggtacctaatgggtatggggaacgagatagaccttcacaccgtccatttccacggccattcttttcaatacaagcatcggggagtctattctagcgacgtgtttgatatttttcccggaacctaccaaactcttgaaatgttcccccgaaccccaggaatatggcttctgcactgccacgtgactgatcacatccatgcaggcatggagacaacttacacagtcctgcagaacgaagacaccaagagcgga

SEQ ID NO: 8559 - DNA, 3195 bp, synthetic construct
  misc_feature 1..3195: note = source = /note="Description of Artificial Sequence: Synthetic coding sequence"
  source 1..3195: mol_type = other DNA
atgaagatcctgatcttgggcatcttcttgttcctgtgttccactccagcttgggctaaggagaaacattactacattgggattattgagactacctgggattacgcctccgaccacggagaaaagaagctgatctcagttgacaccgaacattcgaatatctacttgcagaatggacctgatagaattgggagattgtacaagaaggccttgtacctgcagtacacggatgagacatttcgcacaaccattgagaagccagtgtggctggggttccttgggcctatcattaaagcggagactggggacaaagtgtatgtgcatctcaagaacctcgcttcccgcccgtacactttccattcccacgggatcacctattacaaggaacatgagggcgctatctatcccgacaacactaccgatttccagcgtgcagatgataaggtctatccaggagagcaatatacctatatgctcctggccacagaagaacagagcccaggggaaggagacgggaactgtgtgacacggatctatcactcgcatatagatgctcccaaggacattgcttcgggtctgattggacccctgatcatttgcaaaaaagactccctggacaaggagaaagagaagcatatcgacagagaattcgtggttatgttctctgttgttgacgaaaacttttcttggtaccttgaagacaacattaagacctactgttccgagcccgaaaaggtcgataaggacaatgaagattttcaggaatcgaatcggatgtatagcgtgaacggatatactttcgggtccctgccaggactgagtatgtgcgccgaggatagggtgaaatggtatttgtttggtatggggaacgaagtagatgttcatgccgcatttttccatgggcaggctctaaccaataagaactaccgaatcgacaccataaatctattccccgccaccctgtttgacgcgtatatggtggctcagaaccccggggagtggatgctatcctgtcaaaatctaaaccatctgaaggcggggctgcaagcgttttttcaggtacaggaatgtaacaagtcatcctcgaaagacaatattcgagggaagcacgtgaggcattactatattgcagctgaggagatcatttggaactacgcaccaagcggcatagacatcttcaccaaggaaaatcttactgctcccggttctgacagcgccgtgttttttgagcagggcacgacccgtatcgggggctcgtataagaagctggtataccgtgagtatacggatgcgagctttaccaatcgcaaagaaagagggcctgaggaagagcaccttggaatccttggccctgtcatatgggcagaagtcggcgacaccatccgagtcacgtttcacaacaagggagcctaccccctgagcatcgaaccgattggagtgagatttaacaagaataatgaaggtacttactatagtccaaattataatcctcagtctagatctgtgccaccttccgcttcccacgtagctcccactgaaaccttcacatacgagtggacagtacccaaagaagttggccctaccaacgccgatcccgtctgtctggctaaaatgtattattctgctgtggatcccactaaggatatctttaccgggctgatcggacctatgaaaatatgcaaaaagggaagtctgcacgccaatggccggcaaaaggacgtagacaaagagttttaccttttccctaccgtgttcgacgaaaatgaatccctgctcctggaggataatatccgcatgtttaccacagcccccgaccaagtggacaaagaggatgaagattttcaagaatccaacaaaatgcattcgatgaatggtttcatgtacggcaaccagccaggcctgactatgtgtaagggggattcagtcgtctggtacctgttttcagcaggcaacgaggcggatgttcacggtatctacttttctggtaatacttatctgtggagaggtgagcggcgtgacactgctaacctgttcccccagaccagtttgaccctccacatgtggccggatacagaggggacatttaatgttgaatgcttgacaacggatcactatactggtgggatgaaacagaaatatacagtcaatcagtgcaggagacaatcggaggattctaccttttatctaggcgagaggacttactatatagcagcagttgaagtggagtgggactactcaccgcagcgcgagtgggaaaaagaattacaccatctacaggagcagaatgtgagcaacgccttcctcgacaagggggagttttatatcggtagtaagtataagaaggtcgtgtatcggcaatacacagattctacatttcgagtccccgtagagcgcaaggccgaggaagagcacctaggaatcttaggtcctcagctgcacgctgatgtcggcgacaaagtcaaaattatctttaagaatatggctacgcgaccctattcgattcatgctcatggcgttcagacagagtccagtacagtcaccccgactcttccaggtgagacactgacatatgtgtggaagatacccgagcggtccggagccggtacggaagacagcgcctgcattccctgggcatactattctacagtggaccaagtcaaggacctctattccggtttgattggcccgttaattgtgtgccgccggccatatcttaaagtgtttaacccccgccgcaagctggaatttgcgctcctgttcctggtgttcgacgaaaatgaaagctggtacttggacgataacatcaaaacatattctgaccatccggaaaaggtcaataaggacgatgaggagttcatcgaaagcaataaaatgcacgcaattaacggtcgtatgttcggcaatcttcagggacttactatgcacgttggagacgaagtcaattggtatctgatgggtatgggcaatgagatcgatttgcataccgttcatttccatggccattcctttcagtacaagcatagaggcgtatactcctcagacgtgttcgatattttcccgggaacgtaccaaactctggagatgttcccccgtacccccgggatatggcttctgcactgtcacgtgactgaccacatccacgccggcatggagactacctacaccgtgctgcagaacgaggacacaaaatcaggc

SEQ ID NO: 8560 - DNA, 3195 bp, synthetic construct
  misc_feature 1..3195: note = source = /note="Description of Artificial Sequence: Synthetic coding sequence"
  source 1..3195: mol_type = other DNA
atgaagattcttattttaggaatctttctttttttatgttcaacaccagcatgggctaaagaaaaacattattatataggaattattgaaacaacatgggattatgcatcagatcatggagaaaaaaaattaatatcagtagatactgagcattctaatatatatcttcaaaatggtccagacagaattggaagactttataaaaaagctttatatttacaatatactgacgaaacttttagaactactattgaaaaaccagtttggttaggatttttaggtccaattattaaagcagaaactggagataaagtttatgttcatcttaaaaatttagcaagtagaccatatacatttcattcacatggtataacttattataaagaacatgaaggagctatctatccagataataccacagattttcaacgtgcagatgacaaagtttatccaggtgaacaatatacatacatgttattagctacagaagaacagtctccaggagaaggagatggtaattgtgtaacaagaatttatcattcacatattgatgctccaaaagatattgcttctggtttaattggtcctttaattatttgtaaaaaggacagtttagataaagaaaaagaaaaacatattgatcgagaatttgttgtaatgttctctgttgtagatgaaaatttttcttggtatttagaagataatattaagacatattgttcagaaccagaaaaagtagataaagacaatgaagattttcaagaatctaatagaatgtattctgttaatggttatacgtttggttctcttccaggattaagtatgtgtgctgaagatagagttaagtggtatctttttggaatgggaaatgaagttgatgttcatgctgcattctttcatggacaagctctaacaaataaaaattacagaattgatacaattaatctttttcctgctacattatttgatgcttatatggttgcacaaaatccaggagaatggatgttatcttgtcaaaatttaaatcatttaaaagcaggattacaagcattttttcaagttcaagaatgtaataaatcttcatctaaagataatataagaggaaaacatgttagacattattatattgcagctgaagaaataatatggaattatgctccttcagggattgatatttttacaaaagaaaaccttactgcacctggaagtgattctgctgtatttttcgaacaaggaactacaagaattggaggtagttataaaaaattagtttatagagaatatactgatgcatcatttacaaatagaaaagaaaggggaccagaagaagaacatttaggaattttgggaccagtaatttgggctgaagtaggtgatactattagagttacatttcataataaaggagcttatcctttaagtattgaacctattggtgtaagatttaataagaataacgaaggtacttattattctccaaattataatccacaatcacgatcagttccacctagtgcaagtcatgtagctccaactgaaacattcacttatgaatggactgtaccaaaagaagtagggccaacaaatgctgacccagtttgtttagcaaaaatgtattattctgctgttgacccaactaaagatatatttactggattaattggaccaatgaaaatttgtaaaaaaggatcattacatgcaaatggtagacaaaaagatgtcgataaagaattttatctatttccaacagttttcgacgaaaatgagtcattattattagaagataatattagaatgtttacaacagcaccagatcaagtagataaggaagacgaagatttccaggaatcaaacaaaatgcatagtatgaatggatttatgtacggtaaccaacctggtttaacaatgtgtaaaggtgatagtgttgtttggtacttattcagtgcaggtaatgaagctgatgtacatggaatatattttagtggtaacacttatttatggagaggggaaagacgtgatactgctaatctttttccacaaacatcacttactttacatatgtggccagataccgagggtacttttaatgtagaatgtcttactaccgatcattatacaggtggtatgaaacaaaaatatactgtaaatcaatgtagacgtcaatcagaagattctactttttatcttggtgaaaggacttattatattgctgcagttgaagttgaatgggattatagtccacaaagagaatgggaaaaggagttacatcatcttcaagaacaaaatgtttcaaatgcatttttagataaaggagaattttatataggatcaaaatataaaaaagttgtttacagacaatatactgattcaacatttagagttccagttgaacgtaaagctgaagaagaacatttaggtattcttggaccacaattgcatgcagatgtaggagataaagttaaaattatttttaaaaatatggctactagaccatattcaattcatgctcatggagttcaaacagaatcttcaactgttacaccaactttaccaggagaaactcttacatatgtttggaagattccagaaagaagtggtgctggaactgaagatagtgcttgtataccatgggcatattactcaactgttgaccaagttaaagatttatattcaggtttaattggaccattgattgtttgtagaagaccatatcttaaagttttcaatccaagacgtaaacttgaatttgctcttttattccttgtttttgatgaaaatgaatcatggtatttagatgataatattaaaacatattctgatcatccagaaaaagttaataaggatgatgaggaattcatagaatctaacaaaatgcatgcaattaatggtagaatgttcggtaatttgcaaggattaacaatgcatgtaggagatgaagtaaattggtatttaatgggaatgggaaatgaaatcgatttacatactgtacattttcatggtcattctttccaatacaaacatagaggagtttattcttcagatgtttttgacatttttcctggaacttatcaaactttagaaatgtttccacgtactcctggaatttggcttttacattgtcatgttacagatcatattcacgctggtatggagacaacatatactgttcttcaaaatgaggatacaaaatcagga

SEQ ID NO: 8561 - DNA, 3195 bp, synthetic construct
  misc_feature 1..3195: note = source = /note="Description of Artificial Sequence: Synthetic coding sequence"
  source 1..3195: mol_type = other DNA
atgaagatcctcatcctcgggatctttctctttttgtgctccactccggcctgggccaaggagaagcattactacatcggaatcatcgaaactacgtgggactacgcttccgaccacggagagaaaaagctgatctcagtcgacactgagcatagtaacatctatctccagaacggaccggatcgcatcggaaggttgtacaagaaggctctgtacctccagtataccgacgaaaccttcagaaccaccatcgagaagccggtttggttgggattcttggggcccatcatcaaggccgaaactggcgataaagtttacgtgcatttgaagaatctcgcttcgcgaccatacaccttccacagccacggtatcacctactacaaggaacacgagggagccatctacccagacaacactaccgatttccagcgcgcggatgacaaggtgtacccgggcgagcagtacacttatatgttgcttgccaccgaagaacaaagcccgggagagggcgatgggaattgcgtcacccggatctaccacagccacatcgacgcgccaaaggatatcgcgtcaggactgattggacctctgatcatctgcaagaaggactcgctggataaggaaaaggaaaaacacattgatcgggaatttgtggtcatgttctccgtggtggacgagaatttctcatggtacttggaggataacattaagacgtactgctcggagccagagaaggtcgacaaggataacgaagattttcaagaaagcaaccgcatgtactccgtaaacggttacacctttggttcgctgccggggctgagcatgtgcgccgaggacagagtgaaatggtacctcttcgggatgggcaatgaagtggatgtgcacgcagcttttttccatggccaggctctgaccaacaagaactaccggattgataccatcaacctcttccccgccacgctgtttgatgcatacatggtggcgcagaacccaggagagtggatgctgagctgtcagaatctgaaccacctgaaggccgggttgcaggcattcttccaggtccaggaatgtaacaagtcatcgagcaaggacaatattcggggaaagcacgtcaggcactactacatcgccgcggaggagattatctggaattacgcccctagcggaatcgatatcttcactaaggagaacctcacggcacccggatcggattctgcggtgttcttcgagcaaggaactactagaatcggaggatcctacaagaaactcgtctaccgcgaatacaccgacgcgtcgttcactaatcggaaggaaagaggaccggaagaggaacacctcggtatactcggcccggtgatctgggccgaagtgggagatactatcagagtgacttttcataacaaaggagcctacccgctgtcaatcgaacccatcggagtgagattcaacaagaacaatgaaggaacgtattactcccccaactacaacccacaatcccgcagcgtcccgccatccgcatcacatgtcgcgcctactgaaacttttacttacgagtggactgtgcctaaggaggtgggaccaactaacgcggaccctgtctgcttggctaagatgtactacagcgcggtggacccgaccaaggacatcttcaccggactcatcggtccaatgaaaatctgtaagaaggggtccctgcacgccaacggacgacagaaggacgtcgataaggaattctaccttttcccaaccgtgtttgacgagaacgaatcactcctgctcgaggacaacataagaatgttcaccaccgcgccggatcaagtggacaaggaggatgaagatttccaagagtcaaacaagatgcactcaatgaacggattcatgtacggcaatcagccgggactcaccatgtgtaagggtgactccgtggtgtggtatctgttctcagcaggtaacgaagccgacgttcatgggatctacttcagcggcaatacgtacctttggcgcggcgaacgccgcgacaccgcgaacttgtttccgcagacctcactgaccctgcatatgtggccggacaccgagggcacctttaacgtcgaatgcttgactaccgaccattacactgggggaatgaaacagaagtacaccgtgaaccagtgccgtcggcaatctgaagattccaccttctacctgggtgaacgcacttactacattgctgctgtggaggtggagtgggattactcaccacaaagagaatgggaaaaagagctgcatcacctgcaagagcagaatgtgagcaacgctttcttggataagggagagttctatatcggatccaagtacaaaaaagtcgtgtatcgccaatacaccgactccacctttcgggtgccggtcgaacggaaggcagaggaggagcacctgggcatcctgggcccgcagctgcacgcagacgtgggagataaggtgaagatcatcttcaagaacatggccactcggccatactccatccatgctcatggtgtgcagaccgaatcatctaccgttactcccactctgccgggcgagacgctgacctacgtgtggaagatccccgaacgaagcggggccggaaccgaagattcggcctgcatcccttgggcatactactcaaccgtggaccaggttaaggatctgtactccggactgatcggaccactgatcgtgtgtcggcgaccgtatcttaaagtctttaacccgagacgcaagttggagttcgctctgctcttcctggtctttgacgaaaacgaatcctggtatcttgacgacaacattaagacttactccgatcatccagaaaaggtgaataaggatgatgaggagtttatcgagagcaacaagatgcatgccattaacggccggatgttcggcaacctccaaggactcactatgcacgtgggagacgaggtgaattggtacctgatgggtatgggaaacgaaatcgacctccacaccgtgcacttccatggacactccttccaatacaagcacagaggagtgtattcctcggacgttttcgacatcttcccaggaacttaccaaaccttggagatgttcccgcggaccccaggaatctggctgctccattgtcacgtgaccgaccacatccacgcaggaatggaaactacttacaccgtgcttcaaaacgaggatactaaatccggt

SEQ ID NO: 8562 - DNA, 3195 bp, synthetic construct
  misc_feature 1..3195: note = source = /note="Description of Artificial Sequence: Synthetic coding sequence"
  source 1..3195: mol_type = other DNA
atgaaaatactcatcttgggaatattcctgtttttatgctcaacgccagcgtgggcgaaggaaaagcattactatatcggcatcatcgaaactacatgggattatgcatcggatcatggggaaaagaagcttatttccgtcgacacagaacattctaatatctaccttcagaatggtccagaccgtataggacgtctgtacaagaaagcattatatttacagtatacagatgaaacatttagaacgacgatcgaaaaacctgtatggctgggctttcttggcccgatcataaaagccgagacgggcgataaagtttatgtccacttgaaaaatcttgcgtccagaccttatacatttcatagccatggaattacgtattataaagaacatgaaggcgctatttatccggataacactacagattttcaaagggcagatgacaaggtttatcctggagaacaatatacgtatatgctgttagccaccgaagaacagtctcctggcgagggtgacggcaattgtgtaacacggatttatcatagccatattgacgctccgaaggacatagcaagtgggctgattggcccccttattatttgtaagaaagattcattagataaagagaaagaaaagcatatagatagggagtttgttgtcatgttttcggttgtagatgaaaatttcagctggtacctggaagataatatcaagacatattgctctgaaccggaaaaagtcgataaagacaacgaggactttcaagaaagcaatcggatgtattccgtaaacggttatacattcggctcattaccgggtctttccatgtgcgccgaagatcgagttaaatggtatctttttggaatgggaaacgaagttgatgttcatgccgccttcttccatggtcaggcattaacaaataagaactatcgcattgatacaataaatctttttcctgcgacattatttgacgcgtatatggtggcccaaaatccgggtgagtggatgctctcatgccaaaatcttaaccatttaaaggcggggttgcaagcattttttcaagtacaggaatgtaacaaatcttcatccaaagataacatccggggcaagcatgtccgacattattatatcgcagcagaggaaatcatctggaactatgcaccttcgggcattgatatctttacgaaagaaaacctgactgcgccaggatcagactcggccgtgttttttgaacaaggtacaacgcgaattggcggaagctataaaaaacttgtttacagggagtacacagatgcgagcttcacgaatcgaaaggaacgtggcccagaagaagaacatctgggaatactaggtccggtgatttgggccgaggtgggagatacaattagagtgacgttccacaataagggggcttatcccttgtccattgaacctatcggagtacgatttaataaaaataatgagggcacttactatagcccaaactataacccgcaaagtcgctccgtaccaccttcagcgtctcatgtcgcgccgacagagacattcacatacgaatggacggttcctaaagaagtgggtccgactaacgcggaccctgtctgcctggccaaaatgtattactcggcagtagatccaacaaaagatatcttcacggggctgatcggccccatgaaaatctgtaaaaaaggctccttgcatgcgaatggccgtcagaaagatgtggacaaagaattttacctgtttccgactgttttcgatgagaatgagagcctattattagaagataacatacgcatgttcacgacagctcctgaccaagtggataaggaagatgaggattttcaagaatctaataaaatgcactctatgaacggatttatgtatggtaatcagcccggtctgacgatgtgtaagggtgactcagttgtttggtacctattttccgcaggcaacgaggcggatgtgcacgggatttatttttcaggcaatacatatctctggcgtggcgagcgtcgggatactgctaacctttttccgcagacaagtttaacgcttcatatgtggccagataccgaaggaacattcaatgtcgaatgccttaccacagaccactatactggggggatgaaacaaaaatacacagtgaaccaatgtcgcagacagagcgaggattcaacattttatttaggcgagagaacttactacatcgcagcagtggaagtcgaatgggattactcacctcagagagaatgggaaaaagagttgcatcacctgcaggagcagaacgtctccaatgcattcctcgataaaggagaattctatattgggtctaaatataaaaaagtggtctatagacagtataccgattcaacgtttcgtgtgccggttgaacggaaagcggaagaggagcatttgggtatccttggaccacagcttcatgcagatgttggcgacaaagtgaaaattatttttaagaatatggcaacaaggccgtactctattcatgcacatggcgtccaaacagaatcatcgactgtgacccctacactcccaggcgaaacacttacatatgtttggaaaattccagaacgctccggagcaggcacagaagactcagcatgtatcccgtgggcttattacagcaccgtagatcaagtcaaggatctttattcgggattaattggtcctctaattgtctgtagacgtccgtatctgaaagtctttaaccctcgtagaaaactcgaatttgcgttactgttcctggtatttgatgaaaatgagagttggtatctggatgataatatcaagacatattccgaccaccctgaaaaagttaacaaagatgatgaagaatttattgaaagtaataagatgcatgctattaatggccgcatgtttggcaatctgcagggccttacaatgcacgtgggcgatgaagtcaactggtacctcatgggaatgggaaatgaaattgacttgcacacggttcactttcatgggcacagttttcaatataaacaccgtggagtctattcttctgatgtatttgatattttcccgggaacttatcaaacattagagatgtttccgcgcactcccgggatctggctgcttcactgtcacgtgaccgaccatatccatgcgggtatggaaactacatacacggtcctccagaacgaagacacgaagtcaggt

SEQ ID NO: 8563 - DNA, 3195 bp, synthetic construct
  misc_feature 1..3195: note = source = /note="Description of Artificial Sequence: Synthetic coding sequence"
  source 1..3195: mol_type = other DNA
atgaagatcttaattctgggcatatttctatttctgtgttccacgcccgcttgggccaaggaaaaacactattacatcggcattattgagacgacatgggactatgcttcagatcatggggagaagaaactcatctctgtggatacagaacacagcaacatctacctgcaaaatggcccagatcgcatcggacggttatacaagaaggcactatatctacagtacaccgacgaaaccttccggaccacaattgaaaagcccgtctggctgggattcctcggccctatcattaaagccgaaacaggcgacaaggtgtacgtacacctcaagaacctggcgtctaggccctacaccttccattcgcatgggataacatattataaagagcatgagggagccatatatcctgacaacacaacagatttccagcgcgcggacgataaagtttacccaggcgaacagtatacatatatgctgttagccaccgaggaacagtctcccggagagggagacggcaactgtgttacacgcatttatcactcccacattgatgcccctaaagacatagccagcggcctgattggtcctctgataatatgcaaaaaagattccctggacaaggaaaaggaaaaacacatcgatagagagttcgtagtcatgttcagcgtggtggacgagaacttctcttggtatttggaagataacatcaaaacatattgttccgaacccgaaaaagtggataaagacaacgaagatttccaggaatccaataggatgtactccgtgaacgggtatacctttggtagcttacctggtctgtctatgtgtgccgaggatcgagtcaaatggtatctgtttggaatgggaaatgaggtcgatgtgcacgctgccttcttccacgggcaggccctgacgaataagaattacagaatagacactataaatcttttccccgcgacactgttcgatgcttacatggtcgctcaaaatcccggtgagtggatgctctcctgccagaacctgaatcacctgaaagccgggctgcaagcctttttccaagtgcaggaatgtaacaagtcttccagcaaggataatattcggggaaaacatgtgcgacactactatatcgcagctgaggagatcatctggaactacgcacctagcggaattgatatattcaccaaagagaaccttaccgcgcctggttctgacagcgcggtgtttttcgagcagggaacgacgcgaataggaggctcttacaagaaactagtttaccgtgaatacacagacgcttccttcacaaatagaaaggagcggggacctgaagaggaacaccttggaattctggggcccgttatctgggccgaagtcggcgacactattagggtgacctttcacaacaaaggagcatatcctctctcaattgagcccatcggggtgagattcaataagaacaacgagggcacatactacagtcccaactataatccacagtccaggtccgtccccccgagcgcttcccacgtcgctcccaccgaaacgttcacctatgaatggactgtgcccaaggaggtgggacctaccaatgcagacccagtgtgtttagccaagatgtattattccgccgtggatcccaccaaggacatcttcaccggtcttatcggccccatgaagatctgcaagaagggctcactgcacgcaaatgggcggcagaaggacgttgataaagaattttatctcttccccacagtgtttgacgagaacgaaagtctcctgctggaagataacatccggatgttcacaaccgcgcctgaccaggttgataaagaagatgaggatttccaggaaagcaacaaaatgcacagtatgaacggctttatgtacggtaatcaaccgggattaaccatgtgtaagggggatagcgtcgtgtggtatctcttctctgccggtaacgaagctgacgtacatggtatctacttctctggaaacacatatctgtggagaggggaaaggcgtgatacagccaacttgttcccgcaaacttcactcacactgcacatgtggccagataccgaaggaacattcaacgtcgagtgtctgactaccgaccattataccggcggtatgaaacagaaatatactgtaaaccaatgccgcaggcagagtgaagacagtaccttttatctcggggagaggacctattacattgcagctgtggaggtcgagtgggactactcccctcagcgagagtgggaaaaggagctgcatcatctgcaagagcagaacgttagtaacgcctttttggacaaaggcgagttttacatcgggtccaagtacaagaaggtagtctatcgtcaatatacagattcaacctttcgggtgcccgtagaaaggaaagccgaggaagagcacctgggtatattgggaccgcaattgcacgcagacgtgggtgataaggtcaagatcatctttaaaaacatggccaccagaccctatagtatccacgcccacggcgtgcagactgagagtagtaccgttacccccactcttcctggtgagactctaacatatgtttggaagataccagagcgcagtggagcaggcactgaggactcagcctgtattccttgggcatactattccacggtggaccaggtgaaagatctttacagcggactaattggacctctcattgtatgtcggcgaccctacctcaaggttttcaacccgagacggaaactggagttcgccctgctctttttggtcttcgacgagaatgagagctggtatctggatgacaacattaagacgtactcagatcatcctgagaaggttaacaaggacgatgaagagtttatcgagagtaataagatgcacgcgatcaacggaaggatgtttgggaacttgcagggactgacaatgcatgtcggcgacgaggtcaattggtatcttatgggaatggggaatgagatcgacctgcacacggtgcactttcacggtcactcctttcagtataagcaccgcggagtttatagttctgacgtttttgacatctttcccggcacttatcagacattggagatgttccctcggacacctggcatctggctcctgcattgccatgtaactgatcacatacacgccgggatggagactacctacacggtgcttcagaatgaggatacaaagagcggg

SEQ ID NO: 8564 - DNA, 3195 bp, synthetic construct
  misc_feature 1..3195: note = source = /note="Description of Artificial Sequence: Synthetic coding sequence"
  source 1..3195: mol_type = other DNA
atgaagatcttgattctgggtatcttcctgttcctctgttcaaccccagcctgggctaaggaaaaacactactacatcgggattatcgagacgacctgggactacgcttccgaccacggtgaaaagaagttgataagcgtggataccgaacactcgaacatttatctgcagaacgggccggataggatcgggcgcctctacaagaaagcactgtacctgcagtacaccgatgagacttttcgcactaccattgagaagccggtctggctgggattcctcgggccaattatcaaagcagaaactggagataaagtctacgtgcatctgaaaaacctcgcatctcgcccttatactttccacagccacgggatcacgtactataaagaacacgagggcgctatctacccagataatacgactgattttcaacgggccgatgacaaggtgtacccgggcgaacagtacacttacatgcttctggcgaccgaggagcagtcaccgggagagggcgacggcaattgcgttactcgcatttaccattcacacatcgatgccccgaaggacatcgcttcggggcttatcggacccctgataatctgcaagaaggattccctcgacaaggaaaaggaaaagcatattgaccgggagttcgtggttatgtttagcgtggtggacgagaacttctcctggtacctcgaagataacatcaagacctattgctcagaaccagagaaagtcgataaggataacgaggactttcaagaatctaaccggatgtactcagtgaatggttatacctttggaagcctcccgggactgtcaatgtgcgccgaggatagagtgaagtggtacttgttcggcatgggtaacgaggtggatgtgcatgccgctttctttcacggacaggccctcacgaacaagaattatcggatcgataccatcaacctgtttccagcgacgctgtttgacgcctacatggtcgcccagaacccaggcgaatggatgctgtcatgccaaaacctcaaccacttgaaggcgggacttcaggccttttttcaagtccaagagtgcaataagtcctcgagcaaagacaacatccgcggaaagcatgttcggcactactacattgccgcagaggagatcatctggaactacgctcctagcggcattgacatctttaccaaggagaatctcactgcgccggggagcgactccgccgtctttttcgagcagggaacgacccgcatcggaggatcctacaagaagctcgtgtacagggagtacaccgacgcgtcattcactaaccggaaggaacggggaccggaagaggaacatcttggaatcctcggccccgtcatctgggcggaagtgggcgacactatccgggtcaccttccacaataagggagcctacccgctgtccatcgagccaatcggagtgcgcttcaataagaacaacgagggcacttactactctcccaattacaacccgcagtcacgctcggtgccaccgtcggcgtcgcatgtggcccctactgagacttttacctacgaatggaccgtgccgaaagaagtgggaccaaccaacgcggatccagtgtgtcttgccaagatgtattactcagcggtggatcctaccaaggacatcttcactggcctgatcgggcctatgaaaatctgcaaaaagggatctctgcatgcaaatggaaggcagaaggacgtggacaaggagttttacctgttccccacggtctttgacgaaaacgaatcacttctgctggaggacaatatcaggatgttcactaccgccccggaccaggtggataaggaggacgaagatttccaagaatccaacaaaatgcacagcatgaatggtttcatgtacggaaaccagcctggactgacgatgtgcaaaggcgactccgtggtgtggtacctcttttccgccggaaacgaagccgacgtgcacggaatttacttctcgggaaatacctacctctggaggggagagagacgcgacaccgcgaacctcttcccgcagaccagcctgactcttcacatgtggccagatacggaaggaacttttaacgtcgaatgcctgaccaccgaccattacactggcgggatgaaacaaaagtacaccgtcaatcagtgccggagacaaagcgaggatagcacgttctacctcggagaacggacttactacattgcggcggtcgaagtcgaatgggattactcgccccagagggaatgggagaaggagcttcaccatttgcaagagcaaaacgtcagcaacgcattcctcgacaagggtgaattctacattggctcgaagtacaaaaaagtggtgtaccgccagtacactgactccacttttcgcgtgccggtggagagaaaagctgaagaagaacatttgggtatactgggaccacagctgcacgctgatgtgggcgataaggtgaaaatcatcttcaagaatatggcgaccagaccttactcgatccacgcgcatggagtccagaccgaaagctccaccgtgactccgaccctgcctggcgagactcttacctacgtgtggaagatcccggagcgttcgggcgccggtactgaagattccgcatgcatcccttgggcgtactactcaacggtggaccaagtcaaagatctttactcgggattgatcggtccactgatcgtctgtagacgcccgtacctcaaggtctttaaccctcggagaaaactggagtttgccctcctgtttttggtgttcgacgagaacgaatcatggtatctggacgacaacattaagacttactccgaccatccggaaaaagtgaataaggatgacgaagagttcatcgaaagcaacaagatgcatgctatcaatggaagaatgttcggaaatctgcaaggtctgactatgcacgtcggggacgaagtcaattggtacctgatgggtatgggcaacgaaatcgacctgcacactgtgcactttcacggtcactccttccagtacaagcatcgtggagtctactcgtcggacgtgtttgacatttttccgggcacctaccagaccctcgaaatgtttcccagaaccccgggaatctggctgctgcactgtcacgttactgaccatatccacgccgggatggagactacttacaccgtgctgcagaacgaagatactaagtcggga

SEQ ID NO: 8565 - DNA, 3195 bp, synthetic construct
  misc_feature 1..3195: note = source = /note="Description of Artificial Sequence: Synthetic coding sequence"
  source 1..3195: mol_type = other DNA
atgaaaatcttgatcctcgggatcttcctcttcctgtgctcgacccccgcttgggccaaggagaaacactactacataggaatcatcgagactacttgggactacgcatccgaccatggagagaagaaacttatttcggttgacactgaacactccaacatctacctccaaaacggcccagataggatcggacgcctctacaagaaggcactgtacctccaatacacggatgaaacctttaggaccaccatcgagaagccagtgtggctgggattcctgggtcccatcatcaaggcggaaaccggcgacaaagtgtatgtgcacctgaagaacctggccagccgtccttacaccttccattcgcacgggatcacctactacaaagaacatgaaggagctatctacccggataataccaccgatttccaacgggccgacgacaaggtgtaccccggtgaacagtacacctacatgcttttggccaccgaagagcagagcccgggagaaggtgatggcaactgcgtgacccggatctatcactcccacatcgacgcgccaaaggatatcgcatcggggcttatcggaccacttatcatctgtaagaaagactccttggacaaggagaaggagaagcatatcgatcgcgagttcgtggtcatgttctcggtggtggatgagaacttttcctggtacttggaagataacatcaagacttactgctcagagcccgaaaaggtggacaaagataacgaagattttcaagagagcaaccgcatgtacagcgtgaatggttacactttcggctctctcccgggcctcagcatgtgcgcggaggaccgcgtgaaatggtacctgttcggaatgggcaatgaagtggatgtgcacgccgccttctttcacgggcaggcattgactaacaaaaactaccgcatcgatactatcaacctgttccccgcaacccttttcgacgcgtacatggtggcacagaatccgggtgagtggatgctgtcgtgtcaaaatctgaatcatttgaaggcggggctgcaggccttcttccaggtccaggaatgcaacaagtccagttcgaaggacaatatcagagggaagcacgtccggcactactatatcgccgccgaggagatcatttggaattacgccccgtcggggatcgacatcttcacgaaggaaaatctgactgcgcccggaagcgacagcgcagtctttttcgaacagggtactacccgcatcggcggaagctacaagaagctggtgtacagagaatacacggacgcatcgttcaccaacagaaaagaacgcggtcctgaagaggaacaccttggtatcttgggaccggtgatctgggcagaagtgggcgataccatcagagtgacgttccataacaagggggcctacccactgagcatcgaacctatcggtgtgcgcttcaataagaacaacgaaggaacgtactactcaccaaactacaacccacagtcgcgcagcgtgccgccatcggcctcacatgtggcaccgaccgaaaccttcacctacgagtggacggtgccgaaagaagtgggtccaactaacgccgatccggtgtgtctggcaaagatgtactatagcgcggtggaccccaccaaggatatcttcacgggcctgatcggaccaatgaagatctgcaagaagggatccttgcacgccaatgggaggcagaaagacgtggacaaggaattctatctcttcccgacggtgttcgatgaaaacgaatctctgctgcttgaggacaatattcggatgttcaccaccgccccggaccaagtggataaagaggacgaggatttccaggagtccaacaagatgcattcgatgaacggattcatgtacggcaaccaaccgggactcaccatgtgcaagggagattccgtggtgtggtacctcttctcggcaggaaacgaggccgacgtccatggaatctacttttccggcaatacctacctgtggcggggagaacggagagataccgctaatctcttcccccagacctcgctcaccctccacatgtggccggacactgaaggaactttcaacgtggagtgtctgactactgaccactacaccggaggtatgaaacagaagtacaccgtgaaccagtgccgccgccaatctgaagattccactttctacctcggcgaaagaacgtactacatcgcggcggtcgaggtcgagtgggactactcgccgcagagggagtgggaaaaagaactgcatcatctccaagagcaaaatgtgtcgaacgcttttctggataagggagaattctatattggtagcaagtacaaaaaggttgtctaccgccagtacactgactcaacctttcgggtgccagtggaacgcaaggcagaagaagagcacctgggaatcctgggaccccagctgcacgccgacgtgggagacaaagttaagatcatcttcaagaatatggcgacccggccgtacagcatccacgcgcatggagtgcagactgaatccagcactgtcaccccgactctgccgggtgaaaccttgacttacgtgtggaagatccctgaaagatcaggagcgggcaccgaggactcagcgtgtatcccgtgggcgtactactcaactgtggatcaggtcaaagatctgtactccggacttatcggtccgctcatcgtgtgccggcgaccgtacctgaaagtctttaatccaagacgcaaactggaatttgctctgcttttcctcgtctttgacgaaaatgagtcctggtacctggatgataacattaagacttacagcgatcatccggagaaggtcaacaaggatgacgaagagttcattgagtctaataagatgcatgctatcaacggaagaatgttcggaaatcttcagggactgacgatgcacgtgggagacgaggtgaattggtacctcatgggcatgggtaatgaaatcgatctgcatacggtccacttccacgggcactcctttcagtacaagcatcgcggggtgtacagcagcgacgtgttcgacatttttccgggaacctaccagaccctggagatgttccccagaactccagggatctggctcctgcattgccacgtgactgaccatatccacgccggcatggaaactacctacaccgtgctgcagaacgaggacaccaaaagcgga

SEQ ID NO: 8566 - DNA, 3195 bp, synthetic construct
  misc_feature 1..3195: note = source = /note="Description of Artificial Sequence: Synthetic coding sequence"
  source 1..3195: mol_type = other DNA
atgaagatcctgattttgggaattttcctgtttctatgtagtacaccggcctgggctaaggaaaagcattattatatagggattattgagacgacttgggattacgcctctgaccacggcgagaaaaagctaatctccgtggacaccgaacattcgaacatctacttgcagaatgggcccgatcgcatcggccgcctgtacaagaaggcactgtacttacagtatactgatgagacctttaggactactatagagaagccagtgtggctgggattcctgggtcccattattaaagctgaaacaggggacaaagtgtacgtccacctgaaaaacctcgctagcagaccgtacacatttcacagccacggaattacgtactataaggagcacgaaggggcgatctaccccgacaatacgacagactttcagcgcgcagacgacaaggtctatcccggggagcagtacacttacatgctcttagccaccgaggaacagtcaccaggtgagggagatggcaattgcgtgactaggatttatcactcccatattgacgcacccaaggacatcgctagtggtttgatcggacccctgattatctgtaaaaaggactcactggataaagaaaaagagaaacacatagatagagaatttgtcgtcatgttctccgtggtcgatgagaacttctcgtggtacttggaggataatatcaaaacctactgctcggaacctgagaaggtggacaaagacaacgaagatttccaagaatcaaatcgcatgtactccgtgaacgggtacacctttgggtctcttcctgggctctccatgtgcgcagaggatcgggtaaaatggtacctattcggtatgggcaatgaagtcgatgttcacgcagccttctttcatggtcaggcactgaccaataagaattacagaatcgatacaatcaatctctttcctgcaactctctttgatgcttatatggtggcccagaatcccggtgaatggatgttgtcatgccagaacctaaatcaccttaaagctggcctgcaggctttcttccaggtgcaagagtgcaacaaaagctctagcaaagacaatattcgaggcaaacacgtgcggcactactacattgctgccgaagagattatctggaattacgcgccgagtggtatcgacatttttaccaaagaaaaccttaccgcacccggatctgactctgccgtgttttttgagcaaggtaccactagaatcggaggatcctacaagaagctggtatacagggagtacactgatgcttctttcacaaacaggaaggaaagggggcccgaggaggagcatctgggaatcttaggtcccgtgatttgggcggaggtcggcgacaccatcagagtgacatttcacaataaaggggcctaccctttatctatagaacccatcggtgtgcgctttaacaagaacaatgaggggacatactacagccctaattacaacccacagtcacgtagcgtacctccctccgcgtcgcatgtggcaccaaccgagacctttacctacgaatggaccgtgcctaaggaagtggggcccactaatgcagaccccgtgtgcttggcaaagatgtactattccgccgtggaccctaccaaggatatatttaccggactgatcggcccaatgaagatttgcaagaaaggcagcctgcacgcaaacggaagacagaaggatgtagacaaagaattctacttgtttcccacagttttcgatgaaaacgagagtttgctgcttgaagacaatattcgcatgttcactactgcccccgaccaggtggataaggaggacgaggatttccaggagtcaaacaaaatgcatagcatgaatggctttatgtatggtaatcagccagggctcacaatgtgcaagggtgattctgtggtgtggtaccttttctctgcggggaatgaagccgacgtgcacggaatatacttctctggcaatacctacttgtggcggggcgagaggcgtgacaccgccaacttattccctcagaccagcctgactctgcatatgtggcccgatacagagggcaccttcaatgtggagtgcctgaccacagatcattataccggcggcatgaaacagaaatacactgttaaccagtgcagaaggcagtcagaggacagcacattttatttgggcgagcggacttattatattgccgccgtagaagtggaatgggactactctccgcagagagagtgggagaaggagctgcatcatttgcaagaacagaatgtctcgaacgcattcctggacaagggggaattctatatcggctccaaatacaagaaggtggtgtaccgacagtacactgattccaccttcagagttcctgtggagcgcaaggccgaggaggaacatctgggaattctgggtccccaactgcatgctgacgttggagacaaggttaagattatatttaagaatatggcgactagaccttactccatacacgctcacggggtccagaccgaatcttccacagttactccaactcttccaggcgagacactgacgtatgtgtggaagattcctgagagatcaggcgccggcacagaagatagtgcatgtatcccttgggcatactatagtacagtagatcaggtgaaggatctatatagcggccttatcggacccctgattgtttgcaggcggccttaccttaaagtattcaatccaaggcgaaagctcgagtttgctctgctatttctggttttcgatgaaaatgagagttggtacttagacgataacatcaagacttactctgaccaccccgagaaggtgaataaagacgatgaagagtttatcgagagcaataaaatgcatgcaatcaatggccggatgttcggcaaccttcaggggctcacgatgcatgtgggcgacgaagtcaattggtacttgatgggaatgggaaacgaaattgacctccacaccgtgcacttccatggtcacagcttccagtacaagcatcgcggtgtgtattcctcagacgtgttcgatatcttcccagggacttatcagacactggagatgttcccccggacccctggaatatggctcctgcactgccacgtgaccgatcacatccacgctggcatggagactacatataccgtgttgcaaaacgaagatacaaaaagtggc

SEQ ID NO: 8567 - DNA, 3195 bp, synthetic construct
  misc_feature 1..3195: note = source = /note="Description of Artificial Sequence: Synthetic coding sequence"
  source 1..3195: mol_type = other DNA
atgaaaatcttgattcttgggatcttcctgttcctgtgctcaacccctgcatgggccaaggaaaaacactattatattggaatcatcgagacgacatgggactatgccagtgaccacggcgagaaaaagcttatctccgtagacacagagcacagcaacatctaccttcaaaacggccctgacagaatcggccgactgtacaagaaggccctttacctgcagtatacagatgaaactttccggaccactatcgaaaagcccgtctggctgggatttttgggaccgattatcaaagctgaaactggggacaaggtgtacgtgcacctgaaaaacctcgctagtcgcccatacaccttccattcccacggtattacatactacaaggagcacgaaggggcgatttatcccgataacaccaccgactttcagcgggccgacgataaggtataccccggcgaacagtacacctatatgctgttggctacggaggagcagtcccctggggaaggagacggcaactgtgttactaggatttaccacagtcacatcgatgctccaaaggacattgcgtctgggctgattggacccctgattatatgcaagaaggatagcctggataaggagaaggaaaaacatattgacagagagtttgttgttatgttctctgtggtggacgagaactttagctggtatctggaagacaatatcaaaacgtattgtagcgaacccgagaaagtggataaagataatgaggacttccaagagagcaacaggatgtacagtgtaaacggctatacctttggtagcctgcctggtctctcaatgtgcgccgaggacagagtcaaatggtatctcttcggaatgggcaacgaagtggacgtacatgcagcgtttttccacggtcaggcgctgacaaacaaaaactataggattgacacaattaacctgttccccgcaaccttgtttgacgcttatatggttgcccagaaccctggcgaatggatgctgtcctgtcagaatctgaatcatctcaaggccgggctgcaggctttcttccaagtgcaagagtgcaataaatcttctagcaaagataatataaggggcaaacatgtccggcactactatatcgcggccgaggaaatcatctggaactacgccccctccggcatagacatatttaccaaagaaaatttgactgcgccggggtctgatagcgctgtctttttcgagcaaggcactacccggatcggagggtcttacaagaagctggtgtaccgggaatatacggacgcttccttcaccaacaggaaggaacggggacccgaggaggaacatctgggcatcttgggtcccgttatatgggctgaagtaggtgatacaattcgagttaccttccacaacaagggcgcctatcccctctccatagagccgatcggcgtgaggttcaacaaaaataacgaaggaacttactactctccaaactacaatcctcagagccggtccgtgccacctagtgcctcccatgtcgcccctacagagacatttacgtatgagtggaccgtacccaaggaagtggggccaaccaatgctgatcccgtgtgcctggccaaaatgtactacagtgccgtcgatcctaccaaggacatcttcacagggttgatcggaccaatgaagatttgcaagaaggggtcactgcatgccaacggacggcagaaggatgtcgataaagagttctatctgttcccgacagtgttcgatgagaacgagtctcttctgttggaggataatattcggatgttcacaacagctccggaccaagtggacaaggaggatgaggactttcaagagtctaataagatgcatagcatgaatggcttcatgtacggaaatcagccgggcctgaccatgtgcaaaggagactcagttgtgtggtaccttttcagcgccggcaacgaagctgacgtccatggaatatacttttcagggaacacttacctttggcggggagaaagaagagatactgcaaatctgttcccacagaccagtttgacacttcacatgtggccagacacagaaggcaccttcaacgtggaatgcctcaccacggatcactatacaggcggaatgaagcagaagtatacagtaaatcaatgtcgaaggcagtctgaagattccactttctacctcggcgagcgaacgtattatatagccgcggtggaggtcgagtgggattactctccccaacgggagtgggagaaggaactgcaccaccttcaggagcagaacgtaagcaacgcgtttttggacaagggcgagttctacattggtagcaaatacaagaaggtggtgtaccgccagtacaccgacagtacatttcgggttccagtggagcgaaaggccgaagaggagcacctcggcatcctcgggccccagctgcatgccgatgtaggggataaggtcaagattatcttcaagaatatggccacgaggccttatagtatccatgcccacggcgttcaaacagagtcatctaccgttacgcccacacttccaggcgaaacattgacatatgtctggaaaatcccggagcgctcaggcgctggcaccgaggactcagcatgtatcccttgggcctactacagtacggtggaccaagtaaaggacctgtacagtggcctgatcggtcctctgattgtttgcaggcgaccctacctgaaagtattcaaccctagaaggaagctcgagttcgctctgctgttcttggtattcgacgagaatgaatcttggtacctggacgacaatattaagacatatagtgaccaccccgaaaaggtaaacaaggacgacgaggaatttatcgaatctaataagatgcatgcaattaacggaaggatgtttggaaacctccaaggtcttacgatgcacgtgggggatgaagtcaattggtatctcatgggtatgggcaacgagatcgaccttcatactgttcattttcatggccactcttttcagtacaaacatcggggagtgtattcaagtgatgtctttgacattttcccgggaacttatcagactctcgagatgttcccaagaacgcctggcatatggttgctccactgccacgttactgaccatattcatgcgggcatggaaaccacctatacagtgctgcaaaacgaagacacaaagtccggc

SEQ ID NO: 8568 - DNA, 3195 bp, synthetic construct
  misc_feature 1..3195: note = source = /note="Description of Artificial Sequence: Synthetic coding sequence"
  source 1..3195: mol_type = other DNA
atgaagattttgatcctagggatcttcttatttctttgctccactccagcatgggccaaggaaaagcattactatattggcattatcgagaccacctgggattatgccagtgatcacggagagaagaagttaatttccgtagatactgaacactcaaatatatatctgcagaacggccccgatcgcataggcaggctgtataaaaaagcattgtacctgcagtatacggacgaaacattcaggacaaccatcgagaagccggtgtggctcggttttctcggtccgatcatcaaggccgagaccggagacaaggtgtatgtacatctcaagaatttggcctctagaccctatacgtttcactctcacggcataacctattataaggagcatgagggagctatctatcctgataatacgactgattttcagagggctgatgataaagtgtatccaggtgaacaatacacttatatgttacttgcaactgaagaacagagccctggcgagggagacggaaattgcgtgacccgaatctaccacagccatatcgatgcaccaaaagacatcgcaagcgggctgattggacccttaattatttgcaagaaagacagcctggataaagagaaagagaaacacatcgatcgagagttcgtggtgatgttttcggtagtggatgagaactttagttggtacctggaagacaatattaagacttattgcagcgaacccgaaaaagtggataaggacaatgaggatttccaggagagtaatagaatgtatagcgttaacgggtacaccttcgggtcactgcctgggctcagcatgtgcgctgaggaccgcgtgaaatggtacttattcgggatgggaaacgaagtagatgttcacgcagcgttcttccacggacaggcattaacgaataaaaactaccggattgatactattaacttatttcctgcgacactgtttgacgcatatatggtagcacaaaacccgggggagtggatgttgagctgtcagaatctcaaccacttaaaggccggattgcaggctttcttccaggtgcaagaatgtaataagtcttcctcaaaagacaatattagggggaagcacgtccgacactattatatagcggctgaggagatcatatggaattatgccccgagtggtatcgacatctttactaaggagaatcttactgcacctggttctgacagcgctgtgttctttgagcagggcaccaccagaattggcgggtcctataaaaagttagtgtatcgcgaatataccgatgcctccttcacaaacaggaaagaaagaggccccgaagaagagcacctcggcattctcggaccagtcatttgggctgaggtcggggacacgatcagggtcactttccataataaaggagcatatccactgtccatagaaccaatcggggtgaggttcaataagaacaatgaaggtacgtactactctcccaattacaaccctcagagcagaagtgtcccgccatctgctagccatgtcgctccgaccgaaacgttcacttatgagtggacggtgcccaaagaggttggacctaccaacgctgaccctgtctgtttggccaagatgtactacagtgccgtggatccaactaaagacatcttcacaggactaatcggaccaatgaaaatctgtaagaagggctcactccatgcaaatggccgacagaaagacgtcgacaaggaattttatctctttcctacggtgtttgacgagaacgaatccttactgcttgaggacaacatccgaatgttcactacagcccccgaccaggtcgataaggaagatgaagattttcaggaaagcaataaaatgcatagcatgaacggctttatgtacggcaatcagcctgggctaacaatgtgcaagggcgactctgttgtgtggtacttgttctcagcgggtaacgaggcagatgtgcatggtatatacttttcaggaaatacatatctgtggagaggggaaagacgcgacacagccaatttgttcccccagaccagtcttacgctgcatatgtggcctgacacagaagggacattcaacgtagaatgtctgacaaccgatcattacaccggcgggatgaaacagaagtataccgtgaaccagtgtcgacgacagtctgaagacagcactttttacctcggggagcgaacatactatatcgccgcggtggaggtagaatgggattacagtccgcagcgtgagtgggagaaagaacttcaccatttgcaggagcagaacgtatcaaacgccttcctggacaaaggagagttctacatcgggtccaaatacaaaaaggttgtctacaggcagtacactgattctacgttccgagttcctgtagagcgaaaagctgaggaggaacacctcggcattctgggtccccagcttcacgcagatgtgggcgataaagtcaagataatattcaaaaacatggcaacccgaccatatagcattcacgctcatggtgtgcagactgagtcatcaaccgtgacgcctaccctccccggagaaacactcacctatgtttggaagattccagaaaggagcggcgccggaactgaggattcagcgtgtattccctgggcctactactctaccgtggatcaagtgaaggacttgtatagtggactgattggtccactgattgtctgccgcaggccctacctgaaggtattcaatcctaggcgaaagctggaattcgctctcctgttcttagtgtttgacgaaaatgagagctggtacctagatgacaacataaaaacatactccgaccacccagagaaggtgaataaagacgatgaagaattcattgagagtaacaagatgcacgccataaacgggagaatgtttggtaaccttcagggattgacaatgcatgtgggggacgaggtgaattggtacttgatgggcatgggcaatgagattgatctgcacactgtgcactttcacggccacagcttccagtacaagcaccgtggtgtgtactccagcgatgtgttcgatatttttccaggaacctaccaaaccttggaaatgttccctagaacacctgggatatggctgctgcactgtcacgtcacagaccatattcacgctggaatggaaacaacttacacggtgttgcagaatgaggataccaaatccggg

SEQ ID NO: 8569 - DNA, 3195 bp, synthetic construct
  misc_feature 1..3195: note = source = /note="Description of Artificial Sequence: Synthetic coding sequence"
  source 1..3195: mol_type = other DNA
atgaaaattctgatcttgggcatctttttgttcctttgcagtacgccggcctgggccaaggaaaagcactactacattggcattattgaaacaacttgggattacgcgtcggaccacggggaaaaaaagctcatctccgtcgacaccgagcacagcaacatctacctccagaacggcccggaccggatcggccgcttgtataaaaaggcgctgtatctgcagtacacggacgagaccttccgcactaccatagagaaacccgtatggctgggctttctggggccgattataaaagcggaaacgggtgacaaagtttatgtacacctgaaaaatctggcgagccgtccatataccttccactcccacggtattacctactacaaagagcatgagggtgctatttatccggataacacgaccgactttcaacgtgcggacgataaggtgtacccgggggagcagtacacttatatgctgctagcaaccgaagaacagagcccgggtgaaggggacggtaactgcgtgactcgcatctaccactctcacattgacgcgcctaaggatatagctagcgggcttatcggtccattaatcatctgtaagaaggattccctggacaaagaaaaggagaagcacattgatcgggaattcgttgtcatgttctctgttgtggacgaaaatttctcttggtatctggaggacaacatcaaaacatactgtagcgaaccagaaaaggtcgataaagataatgaggactttcaggagtcaaaccggatgtattcagtgaatggttataccttcggctccctgcccgggttaagcatgtgcgccgaagaccgggttaaatggtatctttttggtatggggaacgaggttgacgtccatgccgcgttctttcatggtcaggcactgaccaacaagaattatcggatcgacactatcaatttgttcccggcgaccctgttcgatgcttatatggtggcacagaatcccggcgagtggatgctgagctgccagaatctgaaccacctgaaggcgggtctgcaagccttcttccaggtgcaggagtgcaataagagctccagcaaagataatatacgtgggaaacacgtaaggcactactatattgctgcagaagagattatctggaattacgcgccgtccgggatcgatattttcaccaaagagaatctgacagcgcctggttccgacagcgctgtgttttttgagcagggcactacccgtatcggcggcagttataagaaactggtttatcgcgagtacacagacgccagctttactaaccgcaaggagcgaggcccagaagaggagcatctcggaattctgggaccggtcatatgggcagaagtgggtgacactattcgtgtcacctttcacaataagggcgcgtaccctctcagcatagagcctattggtgtacgtttcaacaaaaataacgagggcacctactacagcccaaactacaacccccaatcccgctccgttccgccgagcgcgagccatgtcgccccaaccgagaccttcacctacgaatggaccgtgccaaaagaagtgggtccaaccaatgcggatccagtttgcctggcaaagatgtactatagcgcggttgacccaactaaggatatcttcactggccttattgggcctatgaagatatgcaagaaagggtcactgcacgccaacggtaggcagaaagatgtggacaaggagttttatctgttccctaccgtgtttgatgagaacgagagccttcttctggaggataatattagaatgttcaccacagccccagatcaagtcgacaaagaagatgaggattttcaggagtctaataagatgcatagcatgaacggattcatgtatggcaaccagcctggcctgactatgtgtaagggtgatagcgtcgtgtggtacctgttcagcgcaggcaacgaagctgatgttcacggcatctatttctccggtaacacctatctttggcgcggggagcgtcgtgatactgcaaatctgtttccgcagacgagcctaacgcttcacatgtggccggacactgaaggtacctttaatgtggaatgcctgacgactgaccattacaccggcggcatgaagcagaaatataccgtgaatcaatgccgtcgtcaaagtgaggacagcaccttctacctcggcgaacgcacctactacattgccgctgttgaagttgagtgggattatagccctcagcgggagtgggagaaagagctacaccacttgcaggagcagaatgtctctaatgcattcctggataaaggcgaattttatatcggttctaagtacaaaaaggttgtctacaggcagtacacagattccaccttccgcgtccctgtagaacgtaaagcggaggaagagcacctgggtattctgggcccgcagttgcatgcggatgtaggggacaaggtgaagatcattttcaagaacatggcaacccgtccatacagcattcacgctcacggtgtgcagaccgaatcttccactgttaccccaactttgcctggcgagaccttgacatatgtgtggaaaatacctgaacgcagcggtgcaggaaccgaggacagcgcctgcatcccgtgggcctattatagcaccgtagatcaagtgaaagacttgtacagcggccttattgggccgctgattgtgtgcagaaggccatatctgaaagttttcaacccacgccgcaagctggaatttgcgctgctcttcttggtttttgacgaaaacgagtcctggtatctggatgataatattaagacctacagcgatcacccggagaaagttaataaggacgacgaggagtttattgaaagcaataaaatgcatgccatcaatggtcgcatgttcggcaacctgcagggcctgaccatgcacgtgggagacgaggtcaattggtacctgatgggtatgggtaatgagatcgacctgcatacggttcacttccacgggcatagtttccagtataaacatcgcggcgtctactccagcgatgtctttgatatcttccctgggacttaccaaaccctcgagatgtttccgcgtaccccaggaatttggctgctccactgccatgttacggatcatatacatgcgggcatggagacgacctataccgttctgcagaacgaggacactaagtctggt

SEQ ID NO: 8570 - DNA, 3195 bp, synthetic construct
  misc_feature 1..3195: note = source = /note="Description of Artificial Sequence: Synthetic coding sequence"
  source 1..3195: mol_type = other DNA
atgaaaatcctgattctagggatcttcctattcttatgttctacacctgcgtgggccaaagagaaacactattacatcgggataatagaaacgacatgggactatgcctctgaccacggggaaaaaaaacttatttccgttgatacagaacatagtaacatatatttgcagaacgggcctgatcgtattggacgactgtataaaaaggccttatacttacagtatacagatgaaacttttagaactactatcgagaaacccgtttggctggggtttctgggaccaatcatcaaagccgaaacaggagataaagtgtatgtccacctgaaaaatctggcatctcggccatatacattccattcccatggaattacttattacaaagaacatgaaggagccatatatcctgacaacacaacagacttccagcgcgccgatgataaagtttaccccggagagcagtatacatacatgctattagcaacagaagaacaatcacctggagagggggacggaaactgcgtaacgaggatctatcactcccatatcgatgctccaaaagatatagcttctgggctgattggacccctgattatatgcaaaaaagattctctggacaaagaaaaagagaaacatattgatcgggagtttgtagttatgttcagtgttgtagatgagaatttttcctggtatctggaggataatatcaagacttattgctctgaacccgagaaagtcgataaggataacgaagatttccaggaatcgaaccggatgtattcagtgaatggatatacttttggatcattgccagggctcagtatgtgtgcagaggatagagtaaaatggtacctctttggaatgggaaatgaagtggatgttcatgctgccttctttcacggacaggctctaacaaacaaaaattatcgcattgatactatcaacctgttccccgcaacacttttcgatgcctacatggtggcacagaatccaggagagtggatgctctcttgccaaaatctcaaccatctcaaggctggactccaggcttttttccaggtccaggaatgcaacaaatcctcttcgaaggataatatacgtgggaaacatgtgcggcactattacatagcagctgaagagatcatatggaactacgccccatctgggatagatatatttactaaagaaaacctgactgcccccggatccgattctgccgtgttcttcgagcagggaactacaaggattggagggtcttacaaaaaactcgtgtatcgggaatatacggatgcttcctttactaaccgcaaagaaaggggaccagaggaagaacacctgggaatactcggacctgtaatttgggccgaggtgggagatacgatcagagtgacattccacaataaaggggcctaccctctttcaatagaacctatcggagtaagattcaataaaaacaatgaggggacttattactctcccaattataatcctcagtcacgatccgtgcctccaagtgctagtcacgtggcccccactgagacttttacatatgaatggacagtgcctaaagaagtggggcccacaaatgcagatcccgtttgtcttgccaagatgtactattctgcagtggatcctacaaaagatatcttcactgggcttatcggacctatgaagatatgtaaaaaaggatcactgcacgccaacggacgacagaaagatgttgataaagaattctatctatttcctacagtattcgatgaaaatgaaagtctactactggaagataacatacgaatgttcactactgcccccgatcaggtagataaagaagatgaggatttccaggaatcaaataagatgcattctatgaacgggtttatgtatggaaatcagcctgggttgactatgtgcaagggagattcagtcgtctggtatctattctctgcggggaatgaagctgatgtacatgggatatatttttcggggaacacatatctttggcgcggggagagacgcgatacagccaatctcttccctcagacatccttaactctgcacatgtggcccgatactgaagggacattcaatgtggaatgtctcactactgatcattacacagggggaatgaaacagaaatatactgttaatcagtgtcgcaggcagtctgaggacagtacgttctacttgggagaaaggacttactacattgcagctgtggaagttgagtgggattattctccccagcgggaatgggaaaaggaattacaccatttgcaggaacagaacgtgtccaacgccttcctcgataagggggaattctatatcggatccaaatataaaaaggtggtttacagacagtatacagactctacattcagggtaccagtggaacggaaagccgaagaagaacatcttgggatccttggaccacagctccacgccgatgtcggggataaagtaaaaatcatattcaaaaatatggcaacacgaccatattctattcatgcacacggggttcagactgaatcctcaactgtgacaccaactctacctggagaaacactaacttacgtttggaaaataccagagcggtctggggccggaacagaagatagtgcctgtataccgtgggcatattactcaacagtcgatcaggtgaaagatctctattcagggttaatcggaccgctaatagtttgcaggcggccctatctcaaagtgtttaatccccggagaaaactcgaatttgcacttctcttcttagtgtttgatgaaaatgaatcttggtacctggatgacaatattaaaacatattctgatcaccctgaaaaagtcaataaagacgatgaagaattcatagaatctaacaaaatgcacgcaataaatggaagaatgttcggaaatctccaggggttgacaatgcatgttggggatgaagtaaattggtatctgatgggaatgggaaacgaaatcgatctacacacggtgcacttccacggacacagttttcagtataaacatcgcggggtatattccagtgatgtgtttgacatatttcccgggacatatcagacactagaaatgttcccgagaacaccaggaatctggctcctccactgtcatgtgacagatcatatacacgccggaatggaaacaacttatacagtgctgcagaatgaggatactaagtccgga

SEQ ID NO: 8571 - DNA, 3195 bp, synthetic construct
  misc_feature 1..3195: note = source = /note="Description of Artificial Sequence: Synthetic coding sequence"
  source 1..3195: mol_type = other DNA
atgaagatccttatccttggaattttcctctttctctgttcgaccccagcctgggctaaggagaagcactattacatcggcatcatcgaaaccacctgggattacgcctcagaccacggcgaaaagaagctgatcagcgtcgacactgaacactccaacatctacttgcaaaatggaccggaccggatcgggcgcctctataagaaagctctttatctgcagtacaccgatgagactttccgaactaccatcgaaaaaccggtgtggctcggttttctggggccgatcattaaggccgaaacgggcgacaaagtgtatgttcatctgaaaaacctcgcctccagaccatacactttccactcgcatggaataacctactacaaagaacacgagggagcgatatacccagacaacactactgattttcagagggccgatgacaaggtgtaccctggtgagcaatacacctatatgttgcttgccaccgaggaacagtcgccaggagaaggcgacgggaattgcgtcactcgcatttaccactcgcacattgacgctcctaaagatatcgcctccggcttgatcggacctctcatcatttgtaagaaagattccctggataaagaaaaggaaaagcatatcgatcgcgaatttgtggtgatgtttagcgtcgtggacgagaacttctcctggtatctggaggataacatcaaaacctattgctccgagccggaaaaggtcgacaaggacaatgaggactttcaagagtcaaaccgcatgtactccgtcaacggatacacgttcggatccctgcccgggttgtctatgtgcgcggaggacagggtgaagtggtaccttttcggaatgggcaacgaagtcgatgtgcacgcagccttcttccacggtcaggcactcactaacaagaattacaggatcgatactatcaatctgttcccggcgactctgttcgacgcctacatggtggctcagaaccccggagagtggatgctctcctgccagaacttgaaccatctgaaggcggggttgcaagcattcttccaagtccaggaatgtaacaagagctcaagcaaagacaacatacggggaaagcatgtgcggcactactacatcgcagccgaggaaatcatctggaattacgccccctcgggaatagacatattcacgaaagaaaatctcaccgcgccaggatcagactctgcggtgttctttgaacaaggaactactagaatcggagggtcctacaagaaactcgtgtaccgggaatacaccgacgcgagcttcaccaatcggaaagagcggggcccggaggaggaacatctgggaattctgggacccgtgatctgggccgaggtcggagacaccatcagagtgacgttccacaacaagggggcatacccgctgagcatcgaaccgattggcgtccggttcaacaagaacaatgaggggacctactattcgcctaactacaatccacagagcagatctgtgccgccgagcgcctcgcacgtggcgccgaccgagacgttcacctacgaatggactgtgcctaaagaagtgggtcccaccaacgccgatcccgtctgcctcgccaaaatgtactactccgccgtggacccaacgaaggatatctttactggtctgatcggaccgatgaagatttgcaagaagggaagcctgcacgctaacggaaggcagaaggatgtggataaagagttctacctgtttcctaccgtgtttgatgagaatgagtccctgctgcttgaagataacatccgaatgttcaccaccgctcctgaccaagtcgacaaggaggacgaggacttccaagaatcgaacaaaatgcattccatgaatgggttcatgtacggaaatcaacctggtttgactatgtgcaagggtgattcggtggtctggtacctgttctcagccggtaacgaggccgacgtccacggaatttacttctcgggcaacacctatctctggcggggagaaagacgggacacggccaacctcttccctcagactagcctcactctgcatatgtggccggacaccgaaggcaccttcaacgtcgagtgcctgactaccgatcactacaccggaggtatgaagcagaagtacactgttaatcagtgccgcagacaatcagaggattcgaccttctacttgggcgagcgaacttactatatcgcggctgtggaagtggagtgggactactccccacaaagagagtgggaaaaggaactccaccatctgcaagaacagaacgtgtctaatgcattcctggataagggagaattctacattggttcaaagtacaaaaaggttgtgtaccggcagtacacggacagcaccttccgggtcccggtggaacgcaaggcagaagaagaacatttgggcatcctgggtccccagctgcatgcggacgtgggagacaaggttaagatcatcttcaagaatatggcaactcgcccctactcgatccacgcccacggcgtccagaccgaaagcagcaccgtgactccgaccctcccgggagaaaccctgacttatgtgtggaagattccagaaaggtccggagcaggaaccgaggactcagcttgcatcccgtgggcctattactcgactgtggaccaggtgaaggatctgtactcgggactgatcggcccgttgattgtgtgccgccggccttacctcaaagtctttaacccgaggcggaagctcgagttcgctctcctgttcctggtttttgacgaaaacgagtcatggtacctggatgacaatatcaaaacctactccgaccacccggagaaggtgaataaggacgacgaagaattcatcgagtcaaacaaaatgcacgcgatcaacgggagaatgttcggaaatctgcaagggcttactatgcacgtgggagacgaggttaactggtacctcatgggaatgggaaacgaaatcgatctgcacactgtccactttcatggccactcgttccagtacaagcatcgcggggtgtactcgtcggacgtgttcgacatctttccgggaacctaccagacgctggaaatgtttccgcgcactcccggaatctggctcctgcactgtcatgtcactgatcacatccatgccgggatggaaactacctacaccgtgctgcagaatgaggataccaagagcggc

SEQ ID NO: 8572 - DNA, 3195 bp, synthetic construct
  misc_feature 1..3195: note = source = /note="Description of Artificial Sequence: Synthetic coding sequence"
  source 1..3195: mol_type = other DNA
atgaagattctaattcttggaatctttttgttcctgtgttccacccctgcctgggcaaaggaaaaacattattatatcggaataattgaaaccacctgggattatgcctcagatcacggtgaaaaaaagctaatctcagtcgacacagaacactcaaacatctaccttcaaaatggacctgatcgtattggtagactctacaaaaaagctttgtaccttcaatatactgatgaaacattccgaacaactattgaaaaaccagtttggctgggatttcttggacctattattaaagctgaaactggagacaaagtgtatgttcatttgaaaaaccttgcaagcagaccctatactttccatagccatggaattacttattataaggaacacgaaggagctatctacccagataacactacagatttccagagagcggacgataaagtgtatcctggagagcaatacacttacatgcttctggctacagaggaacaatcgccgggagaaggtgatggaaattgcgttacaagaatctatcatagtcatattgacgcaccgaaggatatagcgtctggacttatcggaccactgatcatctgcaagaaggattctcttgataaagagaaagaaaagcacatagatcgtgaatttgtggttatgttctccgtcgtagacgagaattttagttggtacttagaagataatataaaaacatattgtagcgagcctgaaaaagttgataaggataatgaagattttcaagagtcaaatcgaatgtattcggtgaatggatatacttttgggagtttgccaggactttccatgtgtgctgaggaccgtgttaagtggtatctctttggaatgggaaatgaagtcgatgttcatgctgctttcttccacggacaagctttaacgaacaagaactatcgtattgatactatcaatctcttccctgctactttgtttgacgcttacatggtcgcacaaaatcccggagaatggatgttgtcatgccagaatcttaatcacttgaaggctggtcttcaggccttctttcaagtccaggagtgtaataaatcatcaagtaaggataatattcgaggaaaacacgtgcgacattactacatagcagctgaagaaattatatggaactatgcaccatcaggaatcgatattttcactaaggagaatttgacggcaccgggatctgattcagctgtcttctttgagcaaggaactacccgaattggtggtagctacaaaaagctcgtttatcgagaatatactgatgcaagtttcactaatagaaaagaaaggggtccagaagaggagcaccttggaattctgggaccagttatttgggccgaagttggtgatacaatccgcgtgacatttcataacaaaggagcatacccgctttctatcgaaccgatcggagtaagattcaataaaaataatgagggaacttactattctccaaattataacccacagtctagatctgtgccaccatctgcgtcccacgtagccccaacagagacgtttacgtacgaatggaccgttcccaaagaggtgggcccaacaaacgccgacccggtttgtttggcaaaaatgtattactctgcagtcgatccaactaaggacatatttactggacttataggtccgatgaagatctgtaaaaagggtagtctgcatgccaacggacgtcaaaaggatgtggataaagaattttacctttttcctactgtcttcgatgagaatgaatctctacttttagaagataacataaggatgtttactacagcccctgatcaggttgataaagaagatgaagattttcaagaaagtaacaagatgcacagtatgaatggtttcatgtacggaaatcaaccaggtctgactatgtgtaaaggagatagtgtagtatggtatctgtttagcgctggaaatgaagcggatgttcatggaatttattttagcggtaatacatatctgtggcggggtgagaggcgcgatacggccaatctgtttccgcaaacatctctgactttgcatatgtggccagatactgagggcactttcaatgttgagtgccttaccacagatcattacacaggaggtatgaaacagaagtatacagtgaatcagtgtagacgacaatcagaagattcgactttctacttgggtgaaagaacctattacattgcagctgtggaagtcgagtgggactattccccacagcgagagtgggaaaaggaactacatcatctacaagaacagaatgtgtccaacgcgttcttggataaaggggagttctacatcggttcaaaatataaaaaagttgtctaccgtcaatacactgattctaccttccgcgttccagttgaacgtaaggctgaagaggaacaccttggaattcttggaccccagctgcatgctgatgtaggagataaggtgaaaattatctttaaaaacatggctacacgtccgtattccattcatgcacatggggttcaaacagaatcgtcaactgttacaccgaccctgccaggagaaacattgacgtatgtttggaaaatcccggaaaggtccggagccggcacagaggattctgcttgtatcccttgggcgtactattctacggtcgaccaagttaaagatctttacagcggattaataggaccgttgattgtttgtagacgtccttacttaaaggtattcaatccgcggcgaaagctggaatttgcattgttgtttttggtctttgacgaaaatgaatcatggtatcttgatgataacataaagacatactccgatcaccctgagaaggtcaataaggatgatgaagaattcattgagtctaataagatgcatgccatcaatggcagaatgtttggaaatctacagggattgacgatgcatgtaggtgacgaggttaattggtacttgatgggaatgggaaacgagatcgacctccatacagtacatttccacggacatagctttcaatataaacaccgtggggtttattcctcggacgtgtttgatatcttccccggaacgtatcagacattggagatgttccctcgcaccccaggcatctggctcttgcactgtcatgtcactgatcatatacatgcgggaatggaaactacctatacggtgttacaaaatgaggacactaagtcggga

SEQ ID NO: 8573 - DNA, 3195 bp, synthetic construct
  misc_feature 1..3195: note = source = /note="Description of Artificial Sequence: Synthetic coding sequence"
  source 1..3195: mol_type = other DNA
atgaaaatactgatacttggtattttcctgttcctctgcagcacccccgcctgggcaaaggaaaagcattactatattggtatcattgaaacgacgtgggactacgcaagcgaccacggcgagaagaagctgatctccgttgatacggagcattccaacatttatcttcaaaacggtcctgatagaattggtcgattgtacaagaaggcactttatctgcaatataccgatgaaacctttcggaccaccattgagaagccagtctggcttgggtttctgggacctatcatcaaggcagaaaccggagataaggtgtacgtccatcttaagaatctcgcatctcgaccttacacttttcattcccacggcattacctactacaaggagcatgaaggagcgatttacccggataataccaccgattttcaacgagcggacgacaaggtttacccgggtgaacaatacacttacatgcttctggccaccgaagaacagtcgcccggtgagggagatggaaactgcgtgacccgaatctaccactcccatatcgatgcacccaaggacattgcatcgggtcttataggtcccttgattatctgtaaaaaggattcgcttgataaggaaaaagagaaacacattgatcgcgaatttgtcgttatgttttcggtggtggatgagaatttctcatggtatctcgaggacaacataaagacttattgttcggagcccgaaaaggtggacaaggataatgaagatttccaggaatcgaacagaatgtactccgtgaacggatacacttttggaagtttgcctggtctgtccatgtgtgcagaggatagagtcaaatggtacctcttcggaatgggaaatgaagtggatgtccacgcggcattctttcatggacaagctctcactaacaaaaactacaggatcgataccataaatctgtttcctgctacgctttttgatgcatacatggtggcacagaacccaggagaatggatgctctcatgtcagaacctgaatcatctgaaagcaggtctgcaggcgtttttccaagtgcaggaatgtaacaagtccagcagcaaggacaatattcgaggcaagcatgtccgccattactacatcgcagccgaagaaatcatatggaattacgccccctcaggcattgacattttcacgaaggaaaaccttaccgcacccggaagcgactctgcagtcttttttgaacagggaaccaccagaatcggggggtcgtacaaaaaactggtgtacagggagtacaccgatgcatccttcaccaacagaaaagagcgtggtcctgaggaggagcacctgggtattttgggaccagttatatgggcggaagtgggtgataccatcagagtcacctttcataacaagggtgcgtacccgctgtcaatcgaaccgattggtgtgagatttaacaagaacaacgagggtacgtattacagcccgaattacaatccacagtcgcgatccgtgcctccatcggcatcgcatgtggcccctaccgaaacctttacctacgaatggaccgtgccaaaggaagtgggaccaaccaacgccgatcctgtttgtctcgcaaaaatgtactattcagcagtcgatcccaccaaagatatcttcactggacttattggaccaatgaagatatgtaaaaagggtagcctccacgcaaacggacgccagaaggacgtggacaaggagttttacctgtttcccaccgtctttgatgaaaatgagagcctgcttctcgaagataacattagaatgtttaccactgcaccagaccaagtggataaagaggacgaagatttccaagaatcaaacaagatgcactcgatgaacggatttatgtacggaaaccaacctggattgaccatgtgtaagggagactctgtcgtgtggtacctgttctcagccgggaacgaagcagatgtgcacggtatatacttttccggtaacacctacttgtggcggggagaaagaagagataccgcaaatcttttcccacaaacctcccttaccctgcatatgtggcctgatactgagggtaccttcaacgtagaatgtctcaccaccgatcattacaccggcggaatgaagcagaagtacactgtgaatcagtgcaggaggcaatcagaagattcaacgttttaccttggagaaaggacctattacatcgcagctgtggaagtcgaatgggactactccccacaacgcgaatgggagaaggagctccatcatcttcaggagcagaatgtatcaaacgcattccttgataaaggcgagttctatataggctcaaagtacaagaaagtggtctaccgccaatacaccgactcgacctttagagtgccagtggagaggaaggccgaagaagaacaccttggtatactcggaccacagctgcatgcagatgtgggcgataaggtgaagatcatattcaagaacatggcaacccgtccatactcgattcatgctcacggcgtgcagactgaatcttccactgtcactccaaccctcccaggggaaacccttacttacgtgtggaaaatccctgaaaggagcggagcgggtaccgaggattcggcatgcattccgtgggcatactactcaactgtcgaccaggtgaaggacctctactctggtttgattggacctctgattgtgtgtagacgcccctaccttaaagtgttcaatccacggaggaagctcgaattcgctctgctctttcttgtctttgatgagaatgaatcctggtacctggacgataacattaagacttattcggaccatccagagaaggtgaataaagatgacgaagaattcattgaaagcaataagatgcatgccatcaatggaaggatgtttggtaacctccagggacttaccatgcatgtcggagatgaggtgaactggtacttgatggggatgggcaacgaaatcgacctgcacactgtgcactttcacggccactccttccaatacaaacacagaggggtgtactcgtcagacgtgtttgacatcttcccgggcacctaccaaactcttgaaatgtttcctcgtacccctggtatttggctgctgcattgccatgtcactgatcatatacatgcaggcatggagacgacttatactgtcctccagaatgaggatactaagtccgga

SEQ ID NO: 8574 - DNA, 3195 bp, synthetic construct
  misc_feature 1..3195: note = source = /note="Description of Artificial Sequence: Synthetic coding sequence"
  source 1..3195: mol_type = other DNA
atgaaaattctgatcctagggatatttttgtttctatgttctactccagcttgggccaaagaaaaacattactacataggaattattgaaactacttgggattatgcatctgaccatggggaaaaaaaacttatctccgtggatactgaacactccaacatatacttgcagaatgggcctgatagaatcggacgcctttataaaaaggccctttatttgcagtacacagatgaaacattccgaactactatcgagaaacccgtttggttagggttcctcgggccaatcatcaaagccgagactggggataaagtgtacgtgcacctgaagaacctcgcctctcggccatacacgttccatagtcatggaatcacatattacaaggaacatgagggagccatatatcctgacaatacaactgatttccagcgagctgatgataaagtttatcccggggaacagtatacttatatgttactcgctacagaagaacagtcacctggagagggggatgggaactgcgttactaggatatatcactctcatatcgatgcaccaaaggacatcgcttccggactcatcggacctctcattatatgcaaaaaagattccttggataaagaaaaagaaaaacacatcgatcgggaattcgtggttatgttctcggtggttgatgaaaacttttcttggtatctcgaagataatatcaaaacttactgttccgagcccgaaaaagttgataaagataatgaagattttcaggaatccaaccgaatgtattcggttaacgggtacacttttggatctttgccaggactgtcgatgtgcgccgaagatcgggtaaagtggtatctctttggaatggggaacgaggtcgatgtgcacgcagcctttttccacgggcaggccctcactaataaaaactaccggatcgatactattaaccttttccccgctactctgttcgatgcttatatggtagcacagaatccaggggaatggatgctctcctgccaaaatctcaatcatttaaaagccggactgcaggctttcttccaggtacaggaatgtaataaaagttcttctaaagacaacattaggggaaaacatgttagacactattacatagcggccgaagagataatttggaactatgctccctcaggaatcgatatcttcactaaggaaaacctcacagctcctgggtccgattccgccgtctttttcgaacagggaactacaagaatcggagggtcctataaaaaactggtgtatcgagaatatacagacgcttcgttcactaaccgcaaggaaagaggacctgaagaggagcatttggggattttggggcctgttatctgggccgaggtgggagatactatacgagtgacatttcacaacaaaggggcctatcccctgtctatcgaaccaatcggagttaggtttaacaaaaacaacgaaggaacatattattctcccaattataacccacagtctaggtcagtacccccatctgcttcacacgtagcacccacagagacttttacgtatgaatggacagtgccaaaagaagtggggcccacaaacgccgatcccgtgtgtctggcaaaaatgtattatagtgccgtggatcccacaaaagatatatttactggactgatagggcctatgaaaatatgcaaaaaagggtccctgcacgccaacgggaggcagaaagatgttgataaagaattttatctgttccccactgtgtttgatgaaaatgaatcactcctcctggaagataatattcgaatgttcactacggcccccgatcaggtggataaagaagatgaagattttcaggagagtaataaaatgcactctatgaacggatttatgtatggaaaccagcccggactaacaatgtgtaaaggagattccgtggtctggtatttgttttccgccgggaacgaagccgatgtacacgggatatatttctccggaaacacatatctctggcgcggagaaaggcgggacacggctaacctcttcccccagactagtctcactctacacatgtggcccgatacagaagggactttcaatgtggaatgcttgacgacagatcattacacaggagggatgaagcaaaaatacacagtgaatcagtgtagacggcagtcggaagattccactttctatcttggggaacgcacttactatatagccgccgtggaagtcgagtgggattatagtcctcagcgggagtgggaaaaagaacttcaccatctccaggaacagaatgtgtctaatgcattcctagataaaggggaattctatatcgggtcgaaatacaagaaagtggtttacaggcagtatacagattctacttttagggtccctgtggaacgcaaagctgaggaagagcatcttgggatcctgggacctcagcttcatgctgatgtcggagataaagtaaaaattatcttcaagaatatggccacaaggccttactctatacatgctcatggggtccagacagagtcatcaacagtcacaccaactctgccaggggaaactctaacttatgtgtggaaaatacctgagcgatccggagccgggactgaagactctgcgtgtattccctgggcatattactctacggtggatcaggttaaagatttgtattctgggttaataggacccctgatagtgtgcagaagaccatacctgaaagtcttcaaccccagacggaagctggagtttgctcttctttttcttgtgtttgatgaaaacgaatcctggtatttagacgataatatcaaaacttattcagaccacccagaaaaagtcaacaaagatgacgaggagtttatcgagtcaaataaaatgcacgccataaacgggcggatgtttggaaatcttcaggggctcacaatgcacgttggagacgaagtcaactggtatcttatgggaatggggaatgaaatagacctccatacagtgcatttccacgggcactcattccagtataaacacaggggggtctattccagtgatgtctttgatatctttccagggacatatcagactctggaaatgtttccacgtacacctgggatatggctcctgcattgccatgtcactgatcacatacatgctgggatggaaacaacatatactgtattacagaacgaagatactaaatccggg

SEQ ID NO: 8575 - DNA, 3195 bp, synthetic construct
  misc_feature 1..3195: note = source = /note="Description of Artificial Sequence: Synthetic coding sequence"
  source 1..3195: mol_type = other DNA
atgaagatcctgattcttggcatctttctgtttctttgcagcactcctgcttgggcaaaggaaaagcattactacataggtatcattgaaactacctgggattacgcatcggatcatggagagaagaagctcattagcgtcgatactgaacactcgaacatctaccttcagaacggaccagatcgaattgggagactgtacaagaaggcactgtacctgcaatacactgatgagacgttcaggactactattgaaaaacctgtgtggcttgggtttctcggtccaataatcaaggctgaaactggcgacaaggtgtacgtccatctgaagaatctcgccagcagaccttacaccttccatagccacggaatcacttactacaaggaacatgaaggtgcaatctaccctgacaacaccaccgactttcagcgagccgatgataaagtgtaccccggtgaacagtacacttacatgcttctggcgaccgaagaacagtcgccaggagaaggtgacggcaattgcgttactcgtatttaccactcgcatatagatgcaccaaaggacatcgcatccggactgatcgggccactgattatctgtaagaaggattccctcgataaggaaaaagaaaagcacattgatagagagttcgtggtgatgttttcggttgttgacgaaaacttttcatggtatctggaagataacatcaagacctactgttccgaacccgaaaaggtcgacaaggataacgaggatttccaagaaagcaacaggatgtattccgtcaacgggtacactttcggatctcttcctggactttccatgtgcgccgaggacagggtcaagtggtacctgttcggaatgggcaatgaggtggatgtgcatgccgcattctttcatggacaagcactgaccaacaagaactaccgaattgacacgattaatctgtttcctgcaactcttttcgacgcatacatggtggcacaaaatccgggcgagtggatgctgagctgtcagaacctcaaccatctcaaagccggtttgcaagccttctttcaagtgcaagaatgtaacaagtcctcctcaaaagataacattagagggaagcacgttcgtcactactacatcgcggccgaagagattatctggaattatgcgccatcgggaattgacatattcaccaaggaaaaccttactgccccaggtagcgactcagcggtctttttcgagcaaggtactactcgtattggaggatcatacaagaagctcgtctaccgggagtataccgacgcatcctttactaataggaaagagcgcggccccgaagaagaacatctcggaattctcggtcctgtgatatgggccgaagtgggtgataccataagagtgacctttcataacaaaggtgcataccccctgtccatagagccaataggcgtccggttcaataagaacaacgaaggaacctactattcccctaactacaaccctcagtccagatccgtgccgccttcagcctcacatgtggcacctactgaaacctttacctacgaatggacggttcctaaggaggtgggaccaactaatgctgatcctgtgtgcctggccaagatgtactatagcgccgtggatccgaccaaggatatcttcactggcctcatcggtccgatgaagatttgtaagaaagggtcgcttcacgcaaacggaaggcaaaaggatgtggacaaggagttttacctttttccaactgtgttcgatgagaacgaatcgctcctccttgaggataacatacgcatgtttacgaccgcccctgaccaagtcgataaggaagatgaagattttcaagagtcgaacaaaatgcattcgatgaatggtttcatgtacggtaatcagcctggtcttaccatgtgtaaaggagactccgtcgtttggtaccttttctcggcagggaacgaagcagacgtgcacggaatctacttctccggcaatacctacctgtggcgcggtgaaagacgggacaccgcaaatctgttccctcaaacgtcgctgaccttgcatatgtggccagatactgaaggcacctttaacgtggaatgtcttactactgatcactacaccggagggatgaaacagaaatacactgtcaatcaatgtaggagacagtcggaggattccactttctatcttggagagagaacgtactacatagcagcagtggaagtcgaatgggactactcccctcagagggaatgggagaaggaactgcatcatttgcaagaacagaacgtctccaatgcattcctcgataaaggtgaattctacattggatccaagtacaaaaaggtggtgtaccgccaatacaccgattccacttttagagttccagtggagaggaaagcagaagaagagcacctgggcatcctcggaccgcagcttcatgcggatgtcggagataaagtgaagatcatattcaaaaacatggcgaccagaccatattcgattcacgctcatggagtgcagaccgaaagctcgactgtcacgccgaccctgcctggcgaaaccttgacttatgtgtggaaaattcctgagcggtcgggcgcaggtacggaggactcagcctgcattccttgggcatactacagcaccgtggatcaggtgaaagacctttactccggactcatcggtccactcattgtttgtcgccgaccataccttaaggtctttaatcctcggcggaagctggagtttgccctgttgtttcttgtctttgatgagaatgagtcctggtacctggatgataacatcaaaacctattctgaccacccggagaaggtcaacaaggatgacgaggaattcatcgaatccaacaagatgcatgcaatcaacggaagaatgttcggaaatctgcaaggtctgactatgcatgtgggagatgaggtcaactggtaccttatgggcatggggaacgaaattgatctccatactgtgcattttcacgggcactcctttcaatacaaacatcgtggggtgtacagctccgatgtgttcgatatcttccccgggacttatcagacccttgaaatgtttcccagaactccaggtatttggttgctgcactgtcacgtgactgatcacattcatgccggaatggaaaccacctacactgtgctccaaaacgaagataccaagagcgga

SEQ ID NO: 8576 - DNA, 3195 bp, synthetic construct
  misc_feature 1..3195: note = source = /note="Description of Artificial Sequence: Synthetic coding sequence"
  source 1..3195: mol_type = other DNA
atgaagattctcattctgggcatcttcctgtttctctgcagcaccccagcctgggccaaagaaaagcactattacatcggaatcatcgaaactacttgggactatgcgtccgaccatggagagaaaaagctgatctcggtcgataccgaacactccaatatctatcttcaaaacggccccgaccggatcggacgcctctacaagaaagcgctgtacttgcagtacaccgatgagacttttcggactactatcgaaaagccggtgtggttgggcttcctggggccgatcattaaggctgaaaccggagataaggtctacgtccatctgaagaatctggcaagccggccatacactttccacagccacggaatcacttattacaaggaacacgaaggtgctatttaccccgacaacaccactgacttccaaagagccgacgataaagtctaccctggggagcaatacacgtacatgctgttggcgacggaggagcagtccccgggcgagggtgacggcaactgcgtgacccgcatctaccattcgcatatcgacgcccctaaagatatcgcgtccgggctgataggaccacttatcatttgtaaaaaagattctttggataaggagaaggagaagcatatcgaccgcgagtttgtcgtgatgttttccgtcgtggacgaaaatttctcgtggtatctcgaggataatatcaagacctactgctcggagccagagaaggtggacaaggacaatgaggacttccaagaatcgaaccggatgtactcagtcaacggctacaccttcggatccctgcccggtctgtcgatgtgtgctgaagatcgcgtaaagtggtacctcttcgggatgggcaacgaagtggatgtgcacgccgcgttcttccatggacaggcgctgactaacaagaattacagaatcgacactataaacctgttcccggccactctgtttgatgcatacatggtggcccaaaatcctggggaatggatgctgagttgccagaatcttaaccacttgaaggcaggtcttcaagcgttttttcaggtccaggaatgcaataaatcatcaagcaaggacaacatccgcggcaagcacgtgcgacactactacatcgccgctgaagaaatcatctggaactacgccccctccggtatcgacatcttcaccaaggagaacctgactgcaccaggatcggacagcgctgtgttcttcgaacaagggaccaccaggattggaggctcgtacaaaaagctcgtgtaccgggaatacaccgatgcctcgtttaccaatagaaaggagcggggaccggaagaagagcacctcggaattctcggtcctgtcatctgggccgaggtcggagataccattagagttaccttccacaacaaaggagcctaccctttgagcatcgaaccgatcggcgttagattcaacaagaacaatgagggaacctactattcgccaaactacaacccccaaagccggtcggtgccgccatcagcaagccatgtggcaccgaccgaaacgtttacctacgagtggactgtgccgaaggaggtcggcccgaccaacgccgatccggtttgtcttgcgaagatgtactacagcgcagtggacccaactaaggacatctttactggccttatcggaccgatgaagatatgcaaaaaaggatcactgcacgccaacggcaggcagaaggacgtcgacaaggaattttaccttttcccgaccgtgtttgacgaaaacgagagcctgctgctggaagacaacatcaggatgtttactactgccccggaccaggtggataaggaggatgaagacttccaggaatcgaacaagatgcactcgatgaacggcttcatgtacggcaaccagccgggcctgactatgtgcaaaggagacagcgtagtgtggtacctgttcagcgcaggaaacgaagccgatgtgcatggtatctacttctcgggaaacacttacctctggcggggggaaaggcgtgacaccgcgaatcttttcccgcagaccagccttactctccacatgtggcccgataccgaaggaacctttaacgtggagtgtcttaccaccgaccactacaccggaggtatgaaacagaagtacactgtcaatcagtgccggcggcaaagcgaggatagcacgttctacctgggagaaagaacctattacatcgctgcggtggaagtggaatgggactattcacctcagcgcgaatgggaaaaggagctccaccatctgcaggagcagaacgtgagcaacgccttcctggacaagggcgagttctacatcggatcgaagtacaagaaggtcgtctaccgccagtacaccgactccactttcagggtacctgttgagcggaaggccgaggaagaacatctcggaatactcgggccacaactgcatgcagacgtgggggacaaagtgaaaatcatcttcaagaacatggccacccgaccgtactccatccacgcccacggtgttcagaccgagtcgtccaccgtgaccccgactctgccgggagaaactctgacttacgtttggaagatccctgaacggtcgggagcagggaccgaagattccgcgtgtatcccctgggcttactactcaactgtggaccaggtgaaggacctgtatagtggacttattgggccgctgattgtctgcaggcgcccgtatcttaaagtcttcaatccgcggcgcaagctggaatttgctctcctgttcctggtgttcgacgagaatgagtcctggtacttggacgataatatcaaaacctactcagaccatcctgagaaggtgaacaaggatgacgaggaatttatcgaatccaacaaaatgcatgctatcaacgggcgcatgttcggaaacctccaaggtttgaccatgcatgtgggcgacgaagttaattggtacctcatgggaatgggaaatgaaatcgaccttcacactgtgcatttccatggtcactcgtttcagtacaaacacagaggcgtgtacagcagcgacgtgttcgatatcttcccagggacctaccagaccctggaaatgttcccacggaccccgggaatttggctgctccactgccacgtgactgatcacatccacgctggaatggagactacgtataccgttttgcagaacgaagacactaaatccggg

SEQ ID NO: 8577 - DNA, 3195 bp, synthetic construct
  misc_feature 1..3195: note = source = /note="Description of Artificial Sequence: Synthetic coding sequence"
  source 1..3195: mol_type = other DNA
atgaaaattctcattctggggatttttctttttctgtgctccacccccgcgtgggcgaaggagaaacattactacataggtatcatagaaaccacctgggactacgcttcggaccatggtgagaagaaactcatctcagtggatactgagcatagcaacatttacctccaaaatggtccagatagaattggacgcctttacaaaaaagccctttaccttcagtacaccgatgaaacttttcgaaccactattgagaaaccggtgtggcttggttttctcggtccaatcatcaaggcagaaaccggagacaaagtgtacgtgcacctgaagaacttggcctcacggccgtacacctttcatagccatggtattacttactacaaggaacacgagggggccatttacccagataacactaccgactttcaaagagccgatgataaggtttatcccggtgagcaatacacgtacatgcttctggcaaccgaagaacaatctcctggagaaggcgacggaaattgcgtcactcggatttaccactcccatattgatgcacctaaagatattgcaagcggtctgattggtccactgatcatctgtaagaaggattcccttgataaggaaaaggaaaagcatattgacagggaattcgtcgtgatgttttcagtggtcgatgaaaacttttcctggtaccttgaagataacattaagacttactgttcggagcctgaaaaggtggataaggataacgaggattttcaagaatccaacagaatgtactcagtgaatggctacaccttcggaagcctgccaggacttagcatgtgtgcagaagatcgggtgaagtggtacttgttcggcatgggcaacgaagtggatgtgcatgctgccttttttcacgggcaagcactgaccaataagaactaccgtattgataccattaaccttttcccagccacgctctttgatgcatacatggtggctcagaatccaggggaatggatgctttcgtgtcaaaacctcaatcacctcaaggctggactccaggcctttttccaagtgcaagaatgtaataagtcgtcgagcaaggataacataagaggcaagcacgtgcgtcattactacatcgctgcagaagaaatcatatggaactatgcaccttcgggaattgacatattcactaaagaaaatctcactgccccaggaagcgattcggcagtgttcttcgaacagggaaccacccggatcgggggatcgtacaagaagctcgtgtaccgtgagtatactgatgcatcgtttactaacaggaaggaaagaggaccagaagaggaacatctgggaatactggggccagtgatatgggctgaagtgggcgataccattcgagtgacctttcataacaaaggagcttacccactgtccatagagccaattggtgtcagatttaacaaaaacaacgaaggcacttactactcgcccaactacaacccccaatcaaggtccgttcctccctcggcgtcgcacgtcgcaccgactgaaactttcacttacgaatggactgtgcccaaggaagtcggacccaccaacgcggaccctgtgtgtctggcaaaaatgtactactcggcagtggatcctaccaaggatatcttcactggactgattggtcctatgaagatatgcaagaaaggaagcctccatgccaacggccgtcaaaaagacgtggataaggaattctacctcttcccaaccgtgtttgacgaaaacgagtccctccttctggaagataacatacggatgtttaccactgctcctgatcaagtggacaaggaggacgaggactttcaggagtcgaacaaaatgcactcgatgaacggcttcatgtatggtaaccagccaggccttaccatgtgtaagggcgacagcgtcgtctggtacctcttttccgcgggaaacgaagcagatgtgcatggaatctactttagcggaaatacgtacctgtggagaggagagcgacgggatactgcaaacctgttcccacaaactagcttgactctccatatgtggcctgacaccgaagggacctttaatgtggaatgccttaccactgatcactacactggtggtatgaaacaaaagtacacggtgaatcaatgtcggcgacaatccgaagattcaaccttttaccttggagaacggacgtattacatcgccgctgtggaagtggagtgggactactccccacaaagagaatgggaaaaggagctgcatcacctgcaggagcaaaacgtgtccaacgcattcctggataagggcgagttttacatcgggtcgaaatacaagaaagtggtgtacagacaatacaccgactcgacgttccgcgtgccggtggagaggaaggccgaggaggagcatcttggaattcttgggccccaactccatgccgatgtcggcgataaggtcaagatcattttcaagaacatggcaactcggccctactcgatccatgcacatggtgtgcagaccgagtcgtcgaccgtgaccccaactctgcctggagaaaccctcacctacgtgtggaagatccctgaacgctccggagcaggaaccgaggattcggcatgtattccctgggcgtattactccaccgtggatcaagtcaaagatctctactcgggtctgatcggtccgctcattgtttgcaggaggccatacctgaaagtgtttaatccaaggagaaaactcgaatttgctctgctgtttctcgtgttcgacgaaaatgaatcctggtacctggatgataacataaagacctactcagaccatcctgaaaaggtcaacaaggatgatgaagagttcattgagtcgaacaagatgcacgcgattaatggtcgcatgtttggcaacctgcagggactgaccatgcatgtgggagacgaggtcaactggtacctgatgggaatgggaaacgaaattgacttgcataccgtccattttcatggacacagcttccagtacaagcatagaggagtgtacagctccgacgtgtttgacattttccccggaacttaccaaacccttgaaatgtttccgcgcactcctggaatctggcttcttcactgtcacgttactgatcatatacatgcgggcatggaaaccacctacaccgtcctccagaatgaagatactaaatcggga

SEQ ID NO: 8578 - DNA, 3195 bp, synthetic construct
  misc_feature 1..3195: note = source = /note="Description of Artificial Sequence: Synthetic coding sequence"
  source 1..3195: mol_type = other DNA
atgaagatccttattcttggcatcttcctgtttctgtgttccactccggcgtgggctaaggaaaaacactattacatcgggataattgaaactacctgggactacgcatcagaccacggcgagaaaaaacttatcagcgtggatactgagcactccaacatttacctccagaacgggccagatagaatcggacgcctgtacaagaaagcactctaccttcagtacacggacgaaacctttaggaccaccatcgaaaagccggtgtggcttggattcctggggcccatcatcaaggcagaaactggagacaaggtgtacgtgcacctcaaaaacctggcctctcgcccatacacttttcacagccacggcatcacctactataaggaacacgagggagcgatctacccagacaacactacggacttccagagagccgacgacaaggtatacccaggagaacaatacacttacatgctgctggccaccgaggaacagtctcctggtgaaggcgacggcaattgcgtgactaggatctatcactcacatatcgatgctccaaaggacattgcgagcgggctcattggaccgctgatcatctgtaaaaaggatagcctggacaaggaaaaggaaaagcacatcgatagagagttcgtggtgatgttctcagtcgtggacgagaacttctcgtggtacttggaagataacatcaaaacttattgctcggaaccggaaaaggtggataaagataacgaagatttccaggaaagtaacagaatgtacagcgtgaacggatacacctttgggtcactcccgggcctctccatgtgtgcagaagatcgggtcaaatggtaccttttcggaatgggtaatgaagtcgacgtccatgctgcattcttccatggtcaggcgctgaccaacaagaactaccgcatcgacaccatcaacctcttcccagcgactctgtttgacgcttacatggtggcgcagaatcctggggagtggatgctgtcctgccaaaatctcaaccatctgaaggcaggcctgcaggctttcttccaagtgcaagaatgtaacaagagcagtagcaaagacaacattcgcggaaagcacgtccggcattactatatcgcagccgaggaaatcatctggaattacgccccctcagggatcgacatctttactaaggaaaatctcaccgctccgggttcggactcggccgtgttctttgaacaaggcactacccgcatcggaggctcatacaagaagctggtctaccgcgagtacaccgatgcatcgttcactaacagaaaggagcgcggaccagaggaggagcacctgggcatcctggggccggtgatctgggccgaggttggagacactattcgggtcaccttccacaacaaaggggcgtatccacttagcatcgaaccgatcggagtgcggtttaacaagaataatgaaggcacttactacagcccaaactataacccgcaaagtcggtcggtgcccccttcggcctcccacgtggccccgaccgaaacctttacgtacgaatggacggtcccgaaggaagtcggccccaccaatgctgatccggtgtgcctcgccaaaatgtactactcggccgttgacccaacgaaggacatcttcactggattgatcggaccgatgaagatatgtaaaaaggggtcactgcatgccaatgggcgccagaaggatgtcgataaagaattctacttgtttccgactgtgtttgacgagaatgagagcctgctcctcgaggataacatacggatgttcactactgctccggaccaagttgacaaagaggacgaggattttcaggaatccaataagatgcactcgatgaatggattcatgtacggcaatcaaccaggactcactatgtgcaagggggatagcgttgtttggtacttgttctctgcgggaaacgaagccgatgtccatggaatttacttctcgggcaatacgtatctgtggcggggtgaacggagagataccgcgaatctgttcccacagactagcctgaccctccatatgtggcccgacaccgagggtactttcaacgtggaatgccttactaccgaccactacaccggcggaatgaagcagaagtacaccgtgaatcagtgcagacgacagtcggaggactccaccttttacttgggagagagaacttactacatcgcggcagtggaggtcgaatgggactactcaccgcaacgagagtgggagaaggaactgcaccacctccaggaacagaatgtgtcgaatgccttcttggataagggcgaattctacataggaagcaagtacaaaaaggtggtgtacaggcaatacaccgacagcactttccgcgtgccagtggagcgtaaagcggaagaagagcatctgggaattctgggacctcagctccatgccgacgtcggggacaaagtgaaaatcatctttaagaacatggccacccgtccgtactcgatccacgcccacggcgttcagaccgagtcgtcaacggtgacccctaccttgccgggagagactttgacctacgtgtggaagattccggaacgctcaggcgcaggcaccgaggacagcgcctgcatcccttgggcgtactacagcaccgtcgaccaagtgaaggacctgtactctggtctgatcggacctctgatcgtgtgccggaggccgtacctgaaggtctttaatccgcgacggaaactcgagttcgcgctgttgtttctggttttcgacgaaaacgaatcgtggtacctcgatgataacattaagacctactcagatcacccggagaaagtcaacaaagacgacgaagagttcatcgaatcaaacaagatgcatgccattaacggacggatgttcggtaatctgcagggtctgactatgcatgtgggcgacgaggtgaactggtacctcatggggatggggaacgagatcgatcttcacactgtccacttccacggacattccttccagtacaaacatcggggagtatactcatcagatgtgttcgacatcttccctggtacgtatcagactctggaaatgttcccccgcactccaggaatctggctgctccactgtcatgtgacggaccatatccacgctggtatggagactacgtacactgtgctgcaaaacgaggacaccaagtccggg

SEQ ID NO: 8579 - DNA, 3195 bp, synthetic construct
  misc_feature 1..3195: note = source = /note="Description of Artificial Sequence: Synthetic coding sequence"
  source 1..3195: mol_type = other DNA
atgaagattttgattctcggaatcttcctttttctgtgttctaccccagcctgggcaaaagaaaagcattactacattggcatcatcgaaaccacctgggattacgcatcggatcatggagaaaagaagctgatttcagtggacaccgagcacagcaacatctaccttcagaatgggcctgatcgaattggacgcctctacaagaaggccctctaccttcagtacactgatgaaaccttccgtaccactattgaaaagcctgtctggttggggttccttggaccgattatcaaggcagaaaccggagataaggtgtacgtccatctcaaaaacctggcatcacggccttacacctttcatagccacgggattacctactacaaggaacatgaaggagctatctaccctgacaacactaccgattttcaacgagcagatgataaagtctacccaggtgaacaatatacttacatgctgcttgctactgaagaacagtcacctggtgaaggtgatgggaactgcgtgactagaatttaccattcccatatcgatgcccctaaggatattgcgtccggcctgatcggacctctgatcatctgtaaaaaggactcacttgataaagaaaaggagaagcatattgatcgagaattcgtcgttatgttctctgtcgtggacgagaactttagctggtaccttgaggacaacattaagacttactgttccgagcccgagaaggtggataaggataacgaagattttcaggagtccaatagaatgtactcggtgaacggatatacctttggtagccttcccggcctttccatgtgcgcagaagatagagtcaagtggtacctgttcggaatgggtaatgaagtggacgtgcatgcagcttttttccatggccaagcgctcactaacaaaaactaccgtattgataccattaatctgtttcctgcaaccctttttgatgcttacatggtcgcgcaaaatcccggggaatggatgctcagctgccagaacctgaaccaccttaaggccggcctgcaggcgttctttcaggtccaggagtgtaataagtcatcctcaaaggataacatccgggggaagcatgtgagacactattacattgccgcagaggagataatctggaactacgcgccatccgggatcgacatctttaccaaggagaacctcactgcaccaggatccgatagcgcagttttctttgaacagggaactacgagaatcggtggttcctacaagaagctcgtgtatagagagtatactgacgcatccttcactaatcggaaggaaaggggtccagaagaagaacatctgggcattctcggaccagtgatttgggcagaggttggcgacaccattagagtgaccttccataacaaaggcgcttacccgctgtcgatcgagcctattggcgtccggtttaacaagaacaacgaagggacttactactcaccaaactacaacccccaatcgaggtcggtgccacccagcgcatcgcacgttgccccaaccgagacttttacctacgagtggactgtgccaaaagaagtgggacctaccaacgcagatcctgtgtgtcttgcaaagatgtattactcagcagtggatccaactaaggacattttcactggtctgataggaccgatgaaaatctgtaagaagggatcgctgcacgccaacggcaggcaaaaagacgttgataaggagttctacctctttcccaccgtgtttgacgaaaacgagtcccttctgcttgaagataacatcaggatgtttaccactgcacctgaccaagtcgataaggaagatgaggattttcaagaatccaacaagatgcactcaatgaatggatttatgtacggtaatcagcccggacttaccatgtgcaagggagactcggtggtgtggtaccttttttcagcagggaacgaggcagatgtccatggaatttacttttccggaaatacctatctgtggagaggagagcgtagagatacggcgaatctctttcctcagacttccctgactctccatatgtggccggacactgagggcacttttaacgtcgaatgtctcaccactgaccattacaccggtggaatgaagcagaagtacaccgtgaaccagtgtaggcgacagtccgaagattcgaccttttacctcggcgaacgtacctactacatagccgcagtcgaagtggaatgggattattcgccacagcgggagtgggagaaggaacttcatcatctgcaagaacagaacgtctcgaacgcctttctcgataagggagagttctatattggatccaagtacaaaaaggtcgtctaccgccaatataccgattcaaccttcagagtccctgtggaaaggaaagcagaggaagaacaccttgggatacttggtcctcagcttcatgccgacgtgggcgataaggtgaagattatctttaagaatatggcaacccgaccatactcgatccacgcacatggggtccagaccgaatcttcgaccgtgactccgaccctgccaggtgaaaccctgacttacgtatggaagatccccgaaagaagcggggcaggtacggaggactccgcttgtattccttgggcatactatagcaccgtggaccaagtgaaggacctgtactcgggtcttattggccctctgatcgtctgccgcaggccctacctgaaggtgtttaatccccgtcggaagctggagtttgcacttctttttcttgtattcgacgagaacgaatcttggtacctggatgataacataaagacttactctgatcatcctgaaaaggtgaacaaggatgatgaggagttcatcgaatcgaataagatgcacgccatcaatggacgcatgttcggtaacctgcaaggccttactatgcatgtgggagacgaagtcaattggtacctcatgggcatgggtaatgagatagatctgcacactgtgcatttccacgggcattcattccaatacaaacataggggagtctacagttcggacgtattcgacatatttcctggaacctaccaaactctggaaatgtttcctaggaccccaggaatttggctcctccactgtcacgtgacggaccatatacatgctggcatggaaacgacctacaccgttctgcaaaacgaagataccaagtcggga

SEQ ID NO: 8580 - DNA, 3195 bp, synthetic construct
  misc_feature 1..3195: note = source = /note="Description of Artificial Sequence: Synthetic coding sequence"
  source 1..3195: mol_type = other DNA
atgaaaatcttgatcctggggatatttttgttcctttgcagtacccctgcttgggcgaaagaaaagcactattacattggcataatcgaaaccacatgggactacgcctccgaccacggcgaaaagaagctcatttcggtcgacacggagcatagcaatatttatctacagaatggccccgacagaattgggcggctttacaaaaaggcgctctatctgcagtacacagatgagacctttagaactacaatcgagaaaccagtgtggctcggatttctcggcccgatcatcaaggctgaaacgggagacaaagtttacgtgcatttaaaaaacctcgcgagcagaccctacactttccattcgcatggtatcacatattacaaggaacacgaaggggcgatctacccagataatacgacggactttcaaagggccgatgacaaggtgtacccaggagaacagtatacttatatgctgctggcaacagaagaacagagtcctggagaaggtgacggtaattgcgtgacccgtatataccattcccacatcgatgccccaaaagatatagcctccgggttaatcggacctcttatcatttgtaaaaaggattcactggacaaagagaaggagaagcacatcgaccgcgagttcgttgttatgttttcagtcgttgatgagaacttctcttggtaccttgaggataacattaagacctactgttcggaaccagagaaggttgacaaggataatgaagactttcaggaatcgaataggatgtactcagtcaacggatacaccttcggatctcttccagggctatcaatgtgtgcagaggacagagtgaaatggtaccttttcggaatgggcaacgaggtggacgtgcatgctgcattctttcatggccaggctcttaccaacaagaattacagaatcgacacaatcaatctttttcctgccaccctgttcgatgcatacatggtggcccagaaccctggggagtggatgctgtcctgccagaatttaaatcacttgaaggccgggctgcaggctttttttcaggtgcaggaatgtaacaagtccagctcaaaggacaatattaggggaaaacacgtgaggcattactacattgctgcagaggaaatcatctggaactacgctccttctggaattgatatcttcactaaggaaaatttgacagcccccggatctgatagcgccgtgttcttcgaacagggcaccacccggatcggaggctcgtacaagaagctggtgtacagggagtatacagatgcctcttttactaatcgcaaggaaaggggccccgaagaagagcacctggggatactgggtccggtgatctgggcagaagtgggcgacaccatcagggttacgtttcacaataaaggagcctatccactgagcattgagcctatcggagtccgcttcaacaaaaacaacgaaggaacctattatagtcctaattacaacccacagagccgttcagtgcctccatcagcaagtcatgtcgctcctacagaaaccttcacttatgaatggacagtgcccaaggaggtaggccccacgaacgctgatcctgtgtgtctggcaaagatgtactactcagcagtggatcctacaaaagacatatttaccggactcatcggaccaatgaagatctgtaaaaaaggctctcttcacgcaaacggtcggcagaaggatgttgacaaagagttttatctgtttcccacagtattcgatgaaaacgaatctctgctgctggaagacaacattaggatgttcacgactgcaccggaccaggtagacaaagaggatgaggactttcaagagtcaaacaaaatgcactcaatgaacggcttcatgtacgggaatcagccaggactcaccatgtgtaagggggacagcgtagtgtggtatctgttctctgcgggtaatgaagcggatgtccacggcatctatttttccggcaatacctacctgtggagaggtgagcggcgagataccgcaaacctcttcccgcagacaagtttgactctccacatgtggcctgatactgaaggaaccttcaacgtggagtgcctaaccaccgaccactatactggcggcatgaaacaaaagtacacagtgaaccagtgcaggaggcagagcgaagactcaacgttttatttaggagaacgcacatattacattgccgctgtggaggtggaatgggactattccccacagcgggagtgggaaaaggagcttcatcatctacaggagcaaaacgtcagcaacgcgtttctcgataagggcgagttttacatcggttcgaagtacaaaaaggtggtttaccgccagtacaccgattccacctttcgcgttccagtggagagaaaggctgaagaagagcacctggggatcctgggacctcagctacacgccgatgtgggggacaaagtgaagataatcttcaaaaacatggctaccagaccatacagcatccatgcccacggagtgcaaaccgagagtagcacagtgacccctacgctgcctggcgagaccctgacttatgtgtggaagatccctgagcggtccggggccggaacggaagacagtgcctgtatcccctgggcctactacagcaccgtcgatcaggtcaaagacttgtactccggactgattgggcctttgatcgtttgccggagaccctacctaaaggtgttcaaccccaggaggaagttggaattcgccttactctttctggtttttgacgagaatgagagctggtacctggacgataatatcaaaacctattctgatcatcctgagaaggttaacaaggacgatgaggagttcatcgaatcaaacaagatgcacgccatcaacgggaggatgttcggcaacttgcagggcctcacgatgcacgtgggcgatgaggttaactggtatttaatgggaatgggtaacgaaatcgacctgcataccgtgcacttccatggacattcatttcagtacaagcatcggggtgtatatagttcagacgtcttcgatatctttcccggcacatatcagaccttggaaatgtttccacgcacacctggtatctggctcctgcactgtcacgtaaccgaccatatccatgctgggatggagactacttatacggtgctgcaaaatgaggacaccaaatctggc

SEQ ID NO: 8581 - DNA, 3195 bp, synthetic construct
  misc_feature 1..3195: note = source = /note="Description of Artificial Sequence: Synthetic coding sequence"
  source 1..3195: mol_type = other DNA
atgaagatactcattcttgggatcttcttgttcctgtgctccactccggcatgggcgaaggagaaacactactatatagggatcatcgaaaccacctgggattacgccagcgaccacggagagaagaaattgatctcagtggacaccgaacactcgaatatctacctgcagaacggccctgacaggatcggacgactttacaagaaagcactctacctgcagtacactgacgaaaccttccgcaccaccatcgagaagccagtgtggctgggattcctgggaccgatcatcaaggcagagactggcgataaggtgtacgtccacttgaagaatctcgcctcccggccgtacaccttccattcacatggtatcacctactacaaggagcatgaaggagcaatctaccctgacaacaccactgacttccagcgggcggacgacaaagtgtaccctggagaacagtacacgtacatgctcctcgctactgaggagcagtccccaggtgaaggcgatggcaattgtgtgacccgcatctaccatagccatatcgatgccccaaaagacattgcatcaggcctcatagggcctctcatcatctgtaaaaaggactccttggataaggaaaaagagaagcacattgatcgcgagtttgtggtgatgttttccgtggtcgatgagaacttctcttggtacttggaggacaatatcaaaacttactgcagcgaaccggaaaaggtcgataaagataatgaggacttccaagagagcaatcggatgtactccgtgaacggatacacgttcggttccctgccgggactcagcatgtgcgctgaggatcgcgtgaaatggtatctcttcggaatggggaacgaagttgacgtgcacgcggccttttttcatggacaggcgctgactaataagaattaccggatcgacacgatcaacctgttcccagcaaccctcttcgacgcttacatggtggcccagaacccaggagaatggatgttgtcgtgccaaaatctgaaccacctcaaagcaggcttgcaggcctttttccaagtgcaagaatgcaacaagtccagcagcaaggataacatccgagggaagcacgtgcgtcactactacatcgcggctgaagaaatcatctggaattacgctccgtcggggattgacatcttcaccaaggaaaacctgaccgccccaggctccgattcggctgttttcttcgagcagggcacgacccggatcggaggcagctacaagaaactggtataccgcgaatatactgacgcctcgtttactaaccgcaaggagcggggtccggaggaggagcacttgggcatcctgggaccagtgatctgggcggaagtcggagacactatcagggtcactttccacaacaaaggagcctaccccctctccatcgaaccgattggtgtgcggttcaataagaacaatgaaggtacttactactccccaaattacaatccgcagagccggtcggtcccgccttccgcctctcacgtcgcccctactgagactttcacgtacgagtggactgtgccaaaagaggtcggcccgacgaacgccgacccggtgtgcttggccaagatgtactactcagcagtcgaccctactaaggacatcttcactggacttatcgggccaatgaaaatctgcaagaaggggtcgctgcacgccaacggacggcaaaaagatgtggacaaagagttttacctgttcccaaccgtgttcgatgagaacgagtcattgctcctggaagataacatcagaatgtttactactgcgccggaccaggtggataaggaagatgaggactttcaagaaagcaacaagatgcacagcatgaacggattcatgtacgggaatcagccaggactgaccatgtgcaagggagactcagtggtgtggtatctgttttcagccggaaatgaagccgacgtgcatgggatctacttttctggaaacacctacctgtggcgcggcgagagacgcgacaccgctaacctgtttccgcagacgtcgctgacgctgcatatgtggccggatactgaaggaactttcaacgtcgaatgtctgactaccgaccactacaccgggggaatgaagcagaaatacaccgtgaaccaatgcaggcgccagtcagaagatagcaccttctatctgggggaacgcacttactacatcgctgctgtcgaggtggaatgggactactcacctcagagggagtgggaaaaggagctgcaccatctccaggaacagaacgtgtctaatgccttcctggacaagggagaattctacatcggatccaagtacaagaaagtggtgtacaggcagtatactgatagcacctttagggtccccgtggaacggaaggcagaagaggagcatctgggaatcctcggaccgcagctgcacgccgatgtgggagataaggtcaagattatctttaagaacatggcaaccagaccgtactcaatccatgcccatggagtgcaaaccgagagctcaacggtgactcccacgctgcccggggaaaccctcacttatgtttggaagattccggaaaggtctggagccggaactgaagatagcgcttgcatcccatgggcgtactactccactgtggaccaagtgaaagatctgtacagcggacttatcggaccacttattgtgtgtcggcggccgtacctgaaagtctttaacccgcgccggaaactggagttcgcgctgctgttcctggtgttcgacgagaacgaatcatggtacctggatgacaacatcaaaacctacagcgatcaccctgaaaaagtcaacaaagatgacgaagaattcatcgagtccaataagatgcacgccatcaatggtcggatgttcgggaacctccagggactgactatgcatgtcggagacgaggtcaattggtacctcatgggaatgggaaacgaaatcgatttgcatactgtgcattttcatggtcactcatttcagtacaagcatcggggagtgtactcgtcggatgtgttcgatatcttcccggggacctaccagacgcttgaaatgtttccacgcactccgggaatctggctcctccactgtcatgtgaccgaccatatccatgcaggcatggaaactacctacacggtgctccagaatgaggatactaagtccgga

SEQ ID NO: 8582 - DNA, 1866 bp, synthetic construct
  misc_feature 1..1866: note = source = /note="Description of Artificial Sequence: Synthetic coding sequence"
  source 1..1866: mol_type = other DNA
atggcacacgtgcgcgggcttcagctgccaggttgcctcgcgctcgcagcactgtgttccctggtgcattcccaacatgtgtttctcgcaccgcaacaggcgcgctcactgctccaaagagtccggagagcaaatactttccttgaggaagtgaggaagggtaacctggaaagggagtgtgtcgaagaaacttgttcatacgaggaagcatttgaggccctggaatcgtcaaccgcaaccgacgtgttttgggcaaagtacacggcctgcgagactgcgcggacccctagagataagctggccgcatgtctggaggggaattgtgcagaagggctgggtaccaactatagaggtcatgtcaacattacccggtcgggaatagaatgtcaactttggcgcagccgctatccgcataagcctgagattaactcaactacccatcccggtgctgacctgcaagaaaacttctgccgtaaccccgacagctcaactaccggaccttggtgttacaccactgatcccaccgtgcgcagacaagaatgctccattcctgtctgtggtcaggaccaggtaacggtcgcaatgacccccaggtccgaaggatcgtcggtcaacttgtcgccacccctggagcaatgtgtccctgatagaggacagcaataccaaggtaggctggcagtgaccactcatggattgccatgtctggcatgggcgtccgcgcaagcgaaggctctttcaaaacatcaggatttcaactcagcggtccaacttgtcgagaacttttgccgtaaccctgatggagacgaagaaggggtctggtgttatgtggcaggaaaacctggtgatttcggctactgtgacctgaattactgcgaagaagcagttgaagaggaaaccggagatggtcttgacgaagattcagaccgtgcaatcgagggccggactgccacgtccgaatatcaaacctttttcaatccacgtaccttcggctccggcgaggctgattgcggtctgcgacccctctttgagaagaagagcctggaggataagactgaacgggaactgctggaatcttacatcgacggtcggattgtggaaggtagcgatgccgaaattggcatgtcgccctggcaagtcatgctgtttagaaaatcgcctcaagaactgctgtgtggagcatcacttatttcggatcgatgggtcctgaccgcggcgcactgccttctgtacccgccatgggacaagaactttacggaaaatgacctcctggtgagaataggtaagcatagcaggacccgttacgaaagaaacatcgaaaagatctcaatgcttgaaaagatttacatacatccgcgatacaattggcgtgaaaacctggatcgcgatattgcacttatgaaactgaagaagccagtggctttctccgattacattcatcccgtgtgcctcccagatcgtgaaaccgctgcaagccttcttcaagcgggttacaaagggcgcgtgaccggatggggaaaccttaaggaaacctggactgccaacgtgggtaaggggcagccgagcgtgcttcaagtggtgaatctgcccatagtggaacggccagtctgtaaggattcgaccagaatcagaattactgataacatgttttgcgccggatacaagcctgacgaaggcaaacgcggggatgcatgtgaaggtgactccggtggaccattcgttatgaaatccccattcaataacagatggtaccaaatgggaatagtgagctggggtgagggatgcgacagagacgggaagtacgggttctacacccatgtctttaggcttaagaaatggatccagaaagtgatcgaccagttcggagaa

SEQ ID NO: 8583 - DNA, 1866 bp, synthetic construct
  misc_feature 1..1866: note = source = /note="Description of Artificial Sequence: Synthetic coding sequence"
  source 1..1866: mol_type = other DNA
atggcccatgtgagaggtttgcagttgcccggatgtcttgcactggccgccttgtgcagcctggtgcacagccaacatgtctttctggcaccccagcaagcaagatcacttcttcaaagggtcagacgggcaaatacgtttttggaagaagtgagaaagggaaaccttgaacgggagtgcgtagaagaaacttgctcgtacgaagaggcatttgaggccttggaatcatcaactgcaaccgacgtgttttgggccaaatacacggcatgtgaaacggcccgaactcctcgagataaactggcagcatgtctggaaggaaattgtgcagaaggactcggaaccaactatagaggacatgtgaatatcactcgcagcgggatcgagtgccaactgtggagaagccgctatccgcacaaacccgaaatcaactccaccactcacccaggtgccgatttgcaggaaaacttctgtcggaaccccgattcgtccaccaccggtccttggtgttacactaccgaccccactgtgagacgacaagaatgcagcatacctgtctgcgggcaagatcaggtcactgtggcaatgactccaaggtctgagggttcaagcgtgaacttgagcccccctctcgaacagtgtgtgccagatcgtggccaacagtaccaagggcgacttgcagtcactacgcatgggctcccttgtctggcatgggcatcggcgcaagctaaggcactgagcaagcatcaagacttcaattccgccgtgcaactcgtggagaacttttgccgcaatccagatggggacgaagaaggtgtgtggtgctacgtggccggcaagccaggcgactttggatattgcgatctgaactattgcgaagaagcagtcgaggaagaaactggagatggtctggacgaggatagcgaccgtgcaattgagggacgcaccgcaacttcggagtaccagacgttctttaacccacgtacttttggttccggtgaggctgattgtggactcaggcccctctttgaaaagaagtcgcttgaggataagaccgaaagggaacttcttgagtcctacatagatggacggattgtcgagggaagcgatgcagaaattggaatgtccccgtggcaagtgatgctcttcagaaagtccccacaagaactgctttgtggagcttctcttatctccgaccgttgggtcttgaccgccgcacattgtttgctttaccctccctgggacaagaatttcaccgaaaacgaccttttggtcagaattggcaagcactcccgtacccgctacgagagaaatatcgaaaagatttcgatgctcgagaagatctacatccacccgagatacaactggcgagaaaatctggatagagacattgcacttatgaaacttaagaaaccagtggccttttcggactacatccatcctgtgtgtctgcctgatagagagactgcagcgtcattgctccaggcaggctacaagggacgcgtgaccggatgggggaacctgaaggaaacctggaccgcaaacgtgggtaagggacagcctagcgtcctgcaggtcgtgaacctgccgatcgttgaacggcctgtgtgtaaggactcaacgcgaattcgaatcaccgataacatgttttgtgccggttacaagccagatgaagggaagagaggagatgcatgtgaaggagattccggaggaccatttgtcatgaagtccccatttaacaaccggtggtaccagatgggtatagtgtcgtggggtgagggttgtgaccgcgatggtaaatacggcttctacacgcatgtgttccgacttaagaaatggatccagaaagtgatagatcaattcggtgaa

SEQ ID NO: 8584 - DNA, 1866 bp, synthetic construct
  misc_feature 1..1866: note = source = /note="Description of Artificial Sequence: Synthetic coding sequence"
  source 1..1866: mol_type = other DNA
atggcccacgtgcgaggcttgcaattgcctggatgcctggcccttgctgccctttgctccttggtgcacagtcaacacgtcttcttagccccccagcaggcgaggagcctattgcagcgggtgcggagagcaaatacattccttgaggaagtcaggaagggtaacctcgaaagagaatgtgtcgaggagacctgtagttatgaggaagctttcgaagctctcgaatcttccacagcaacagacgttttctgggccaaatataccgcctgcgagacagcccggacaccgcgggataagttggcagcatgcttggagggcaactgcgccgaaggacttggaactaactatagagggcacgtgaatataactagatcgggcatagagtgccagttgtggcggtcccgttatcctcacaaacctgaaatcaacagcactacacaccctggcgccgatctgcaagagaacttttgcaggaatccagatagcagcactaccggcccttggtgctacactacagatcccaccgtgcgcagacaggagtgttcgatcccagtatgcggacaggaccaagttacagttgctatgactccgaggtcagagggtagttccgtgaatctgagtccgcctctcgagcaatgtgtgcctgaccgtgggcaacagtaccaggggcggctagctgtcacgacacacggcctgccatgcctggcatgggcatccgctcaagctaaagcactgagcaaacatcaggattttaacagtgctgtccaattggttgagaatttctgtaggaacccggacggagatgaagaaggagtatggtgctacgtagctgggaagccaggcgattttgggtactgcgacctgaactactgcgaagaggcagtggaggaagagacaggcgatgggctggacgaggatagtgaccgggccatcgaaggccggaccgctaccagcgagtaccagacattttttaaccctcgaaccttcgggtcaggagaagctgattgcggactacggccgcttttcgaaaaaaaatccctggaggataagacagagagggaactgttagagtcatacattgacggccggatcgtagaggggtcagacgccgagattggtatgtccccttggcaggtaatgctgtttcgtaaatccccccaagagttgctgtgcggtgctagtttaatatctgaccgatgggtgctgactgctgcccactgtcttctgtatccaccttgggataagaacttcaccgaaaatgaccttcttgtccgaattgggaaacactctaggacgagatacgaaaggaacatagagaaaatttccatgctggagaagatttatattcatcctaggtacaactggcgcgagaatctcgaccgtgatatcgcactgatgaagctcaagaagccagtggcattcagcgattacattcaccccgtttgcttgccagatcgggaaactgcggccagcctattgcaggctggttataaggggcgggtgaccggctggggcaacttaaaagagacctggacggcaaatgtaggaaaagggcagccatctgtgctccaggtcgtaaatctgccaatcgtggagagacctgtttgtaaggactcaactcgtattcgtataaccgacaacatgttctgcgcgggctacaagcctgacgagggcaagagaggcgatgcttgcgagggggattctggtggcccattcgtgatgaaatcacctttcaataaccgctggtaccagatgggtatcgtcagctggggcgaggggtgcgaccgggacggcaagtacggcttttacacccatgtatttcgtcttaaaaagtggattcagaaagtgattgatcagtttggagag

SEQ ID NO: 8585 - DNA, 1866 bp, synthetic construct
  misc_feature 1..1866: note = source = /note="Description of Artificial Sequence: Synthetic coding sequence"
  source 1..1866: mol_type = other DNA
atggcgcatgtccgcggactgcagctgcccggttgcctggcactagccgcgctttgctcactcgttcattctcaacacgtcttcttggctccccagcaagcgcggtctctgcttcagcgcgtccgtagggctaatacctttctggaggaagtgaggaagggcaaccttgagcgtgagtgcgtcgaggagacctgttcctatgaagaggctttcgaggccctggagagtagtaccgccaccgacgtgttctgggcaaagtacacggcctgtgagaccgctagaaccccccgcgacaaattggccgcctgcctggagggtaactgcgccgagggactgggtaccaactaccgcggtcatgtcaacattacccgtagtggtatcgaatgccagctgtggcgctcacgatacccgcataagcctgagatcaactcgacgacgcacccgggagccgacttacaggagaacttctgccgtaatcccgactcttcgaccactggaccctggtgctacaccactgacccaacggtccgtcgtcaagagtgttcgatcccggtgtgcggtcaagaccaggttacagtcgccatgacacctagatcagagggcagctccgtgaatctctccccacccctggaacaatgcgttcccgatagaggccagcagtaccagggcagactggccgttacaacccatggcctcccctgcctggcttgggcgagtgctcaggccaaggcccttagcaaacaccaggacttcaactcggccgtccagctggtggagaacttctgccgcaaccccgatggcgatgaagagggagtgtggtgttatgtcgccggcaagcccggtgacttcggttactgcgatcttaactactgtgaggaggccgtcgaggaggagactggagacggactcgacgaggacagcgacagagctatagagggcaggacagctacctccgagtaccagacctttttcaacccccgcaccttcggtagcggcgaggctgattgcggtcttcgtccccttttcgaaaaaaagtccctggaggacaagaccgagagggagctcctcgagagttacatcgacgggcgcattgttgagggctccgatgctgaaattggcatgtccccctggcaggttatgctattccgcaagtccccccaagagctcctctgtggggcctctctgatttccgaccgttgggtcctgacggctgcgcattgcctgctctaccctccgtgggataagaatttcaccgagaacgacctgctagttcgtattggcaagcattccaggacccgctacgagcgtaacatcgagaaaatctcgatgctggagaagatctatatccatcccaggtacaattggcgcgaaaacctcgatcgcgacatcgcccttatgaagctgaagaagccggtagccttttcggactacatccacccggtgtgcctgccggatagggaaaccgccgcctctcttcttcaggccggctacaagggccgagtaacaggctgggggaacctcaaggagacctggaccgctaacgtcggtaagggacagccctccgtcttgcaggtcgtcaatctgcctatcgttgagcggcccgtctgcaaggattctacccggattcgcattaccgataatatgttctgcgcgggttataagcctgatgaaggaaagcgcggagacgcttgcgaaggcgattctggtggaccctttgtcatgaagtcccctttcaacaaccgatggtaccagatgggcatcgtctcctggggtgagggttgcgaccgggacggtaagtatggtttctacacgcacgtgttccggcttaagaagtggatccaaaaggtcatagaccagttcggtgag

SEQ ID NO: 8586 - DNA, 1866 bp, synthetic construct
  misc_feature 1..1866: note = source = /note="Description of Artificial Sequence: Synthetic coding sequence"
  source 1..1866: mol_type = other DNA
atggcacacgttagaggactccagctgccaggatgtctggcactggcagccctgtgcagtctagtccattcgcagcacgtgttcctagctcctcagcaggcacggtccttgctccagcgagtgcggcgggccaatacattcctcgaggaagttagaaaagggaacctagaaagggagtgtgtggaggaaacatgctcttatgaagaagcatttgaggccctagaaagttcgacagcaacagatgtattttgggctaagtatacagcctgcgaaacagcaaggactccacgggataagcttgctgcttgcctcgaaggaaactgtgcagaagggcttgggactaactacagaggacatgttaatattactaggtctgggatagagtgtcagctttggaggtctcgctaccctcataagccagaaatcaactcgacaactcacccaggggctgatcttcaggaaaacttttgtcggaatcccgattcatctactacagggccctggtgttacactacagatcccacagtgagacggcaggaatgttcaataccagtatgtgggcaggatcaggttactgtggcgatgactcctaggtccgaaggatcctccgtgaatttatcacccccactagaacagtgcgtgcccgatcgagggcagcagtaccagggaagactcgcagttactactcacggactaccatgtctagcatgggcttctgcccaggccaaagctttaagtaagcaccaggacttcaactccgccgttcagttagtagaaaatttttgccgcaatcccgatggagacgaggaaggggtgtggtgttatgtggctgggaaacctggggattttgggtattgcgatttaaattattgtgaggaagcggtggaagaggaaactggggatggattagatgaagatagtgatcgcgccatagaagggcgcactgcaactagtgaataccagactttcttcaacccaagaacattcggatctggagaagccgactgcgggttgcggccactctttgaaaaaaaatcattagaagataaaacagaaagggaactgcttgagtcatacattgatgggcgaatagttgaaggatctgacgcagaaattggaatgtctccttggcaggtaatgctgttccgaaagtctccacaggaactgctttgtggggcctcactcatatctgaccggtgggtgctgacagcagcacactgtttgctgtatcctccctgggataaaaacttcactgaaaacgatctgctcgttaggattggaaaacattcccgaacacgatatgaacgcaacatagagaagatatcaatgctagagaaaatatacattcaccctcgatataattggagggaaaaccttgaccgggacattgcactgatgaagctgaaaaaacccgtagcattttccgactatattcatcctgtctgtctccctgacagagaaacagcagcctctctcctgcaggctgggtataaaggaagggtaactgggtgggggaaccttaaagaaacttggacagccaatgtgggaaaagggcagcctagtgtactccaggttgtgaatttacccatcgtcgagcgcccagtatgtaaggactctacacgaataagaattactgacaacatgttttgtgcggggtataaacccgatgaaggaaaaaggggagatgcctgtgaaggggactccggagggcctttcgtaatgaagtccccctttaataatagatggtaccagatggggatcgtgtcatggggggaggggtgtgatagggatgggaaatacggattctatactcacgtgttcaggctcaagaagtggattcagaaagtgatcgatcagtttggagaa

SEQ ID NO: 8587 - DNA, 1866 bp, synthetic construct
  misc_feature 1..1866: note = source = /note="Description of Artificial Sequence: Synthetic coding sequence"
  source 1..1866: mol_type = other DNA
atggctcacgtgcgcggcctccagttgccaggatgcctggccctggcggcgctgtgcagcctggtccattcacagcatgtgttcctggcaccgcaacaggctcggagcctgctgcagcgcgttcgacgggccaatacgttcctcgaagaggttaggaaagggaaccttgaacgggagtgcgtagaggaaacctgctcctatgaggaggcattcgaggctctggagtcctcaaccgcaaccgacgtgttctgggccaagtacactgcatgtgagaccgcacgcacgccacgcgataaactggcagcctgtcttgagggcaactgtgcggagggtttaggcaccaactatcgtggccatgtgaacattaccagaagcggcattgagtgccagctgtggcgctcacgttacccgcacaagccggaaattaacagcacaactcacccaggagccgacctgcaagagaatttctgccgcaacccagatagcagcacaacgggcccctggtgttacactacggatcctaccgttaggcggcaggaatgttcaatcccggtgtgtggccaggatcaggtgaccgtggccatgacccctcgatccgagggtagcagcgtgaacctgagcccgccattggaacagtgcgtccctgataggggccaacagtatcaaggtcgcctcgcggtcaccactcacggcttgccatgtctcgcgtgggcatccgcgcaagcgaaagcgctgtcaaaacaccaggactttaactccgctgtgcaactggttgagaatttctgtcgaaacccggatggggatgaggaaggtgtgtggtgctacgttgcaggtaagcctggcgattttggttattgtgacctgaattactgcgaggaagcagttgaagaagagacaggcgacgggctggatgaggacagcgatagggctattgaaggacgcaccgccacttcagagtaccaaactttctttaacccacgcacttttggcagcggggaagccgattgcggcctcaggccgctttttgaaaaaaaatcgctggaggataaaaccgagagggagctgctggagagctacatcgacggtagaatagtggagggtagcgacgcagaaattggtatgtctccgtggcaggtgatgttgttccggaagagtcctcaggaacttctgtgcggagccagcctgatcagcgatcgttgggttctgacggctgcgcactgcctgttgtacccgccatgggacaagaactttacggaaaacgacctcttagtacgcattggaaagcacagccgcacgcgctacgagcgtaacatcgaaaaaatatctatgctagaaaagatttatatccatccgcggtacaactggcgagaaaaccttgaccgagatatcgcactgatgaagctgaagaagccggtcgctttttcagactatatacatccagtttgtttacctgaccgggaaacagccgctagcctcctacaggctggatacaagggccgcgtgacgggctggggaaatttgaaggagacctggaccgcgaatgtcggtaagggtcaaccatccgtcctgcaagtggttaacctgccgattgttgaacgcccggtttgcaaagatagtacgcgtatacgaatcacggacaatatgttttgtgccggttacaagccggacgaaggtaagcgaggtgacgcgtgcgaaggtgatagcggcggcccgttcgtgatgaagagcccgtttaataaccggtggtatcagatgggtatcgtgagctggggcgagggctgtgaccgcgacggtaagtacgggttttacacccacgtctttcgtctgaaaaaatggatccaaaaggttatcgaccagtttggtgag

SEQ ID NO: 8588 - DNA, 1866 bp, synthetic construct
  misc_feature 1..1866: note = source = /note="Description of Artificial Sequence: Synthetic coding sequence"
  source 1..1866: mol_type = other DNA
atggcacacgtgcgggggctccagctgcccggctgccttgccctggcagccctgtgctccctcgtacactcacaacatgtcttccttgcacctcagcaagcacgatctttgttgcaaagagtgcgaagagcaaacacgttcttggaagaagtgcggaaaggtaatttggagagagaatgcgtggaagaaacctgcagctacgaagaggccttcgaggctctcgaaagtagtaccgcaactgatgtcttctgggctaagtacacagcttgtgaaactgccagaacccctcgcgacaagctcgcagcctgtcttgagggtaattgtgccgagggacttggaacgaattatagaggacacgtgaacatcaccagatcagggattgaatgtcagctgtggagaagtcgctatccacacaagccagaaattaactctacgactcaccccggtgcagacctccaggagaacttttgtcggaatcctgatagcagtaccacagggccatggtgctacacgacggacccaacggtgagacgccaggagtgttcaatccctgtatgcgggcaagatcaagttacagttgctatgacaccacgctctgagggctccagcgtgaaccttagtccgcccctggaacagtgtgtacctgatcggggccaacagtaccagggaagattggccgttaccacacatggcttgccttgcctcgcttgggcctcagctcaggccaaggccctttctaaacatcaggacttcaacagtgcagtgcaactggtagagaatttttgtcggaacccagacggggatgaagaaggtgtctggtgttatgtggcggggaagccaggcgatttcgggtattgtgacctgaattactgtgaagaggcggtggaagaagaaacgggggatggcctcgacgaagattctgaccgcgctatcgaaggtcggacggcgacctccgaatatcagacgtttttcaatcctcgaacattcggtagtggggaggcagactgtggcttgaggcctctcttcgagaagaagtcactggaggataaaacagagagagagctgcttgagtcctacatcgatgggcgaatcgttgagggctcagatgctgagattggcatgagtccgtggcaggtgatgttgttccgcaagtcaccacaggaacttctgtgcggggctagcttgatcagtgacagatgggtcctgaccgcggcacactgtcttttgtatccaccttgggacaaaaatttcaccgaaaatgatctcctcgttagaatcggcaaacattcacggaccaggtacgaacgaaacatcgagaagatctccatgctggagaagatctacatccatcctcgctacaattggagagagaacctggacagagacatagctctcatgaagctgaaaaaacccgtggctttctcagactatattcaccccgtgtgcttgccagatagggagaccgctgcctctctgcttcaggcagggtataaaggccgggttactggatgggggaacctcaaggaaacctggaccgcaaatgttgggaagggtcagcctagtgtactccaggtcgtgaacctgccaatcgtggagcgaccagtgtgtaaggattcaacccgcattcgaatcaccgataatatgttttgcgctggatacaagcccgacgaaggcaagagaggcgatgcttgtgaaggcgactccggcggaccattcgttatgaagagcccattcaacaataggtggtaccagatgggaattgtgtcctggggagagggttgtgatagagatggcaaatacggcttttatacacacgtgttcagactcaagaagtggattcagaaggtgatcgatcagttcggggag

SEQ ID NO: 8589 - DNA, 1866 bp, synthetic construct
  misc_feature 1..1866: note = source = /note="Description of Artificial Sequence: Synthetic coding sequence"
  source 1..1866: mol_type = other DNA
atggctcacgtcaggggactccaactgccaggctgcctcgcacttgcggccctgtgctcactggtgcacagccagcacgtgttcctggccccacaacaggcaagaagcctgctccagcgcgtccggagggccaatacatttctggaagaggtgagaaaaggaaacttggagagagagtgtgtggaggagacgtgcagttatgaagaggctttcgaggcactggaatcgtctacagccactgacgtattctgggccaagtataccgcttgtgagacagcgcgcacaccacgggataagctggccgcttgtttggaaggaaactgcgccgaaggcctgggcacaaactataggggtcacgtgaacattacccgcagcggcattgagtgccaactgtggcggagcaggtacccgcataagcccgagattaacagtactacccatccaggggcagacctccaggagaatttctgcaggaacccggacagtagcacaacagggccatggtgctatacaacagaccctacagtgagaaggcaggagtgctctattcccgtgtgcggacaagatcaggtcacagtagcgatgactccccgttcagaaggatcttcagttaatctctcaccccctttggagcagtgtgtgccagaccgcgggcaacaataccagggtagattggctgttactactcatggcctcccatgtcttgcttgggctagcgcccaggcaaaagcccttagtaagcaccaagacttcaactccgcagtgcaactggtggagaacttttgcagaaaccctgatggcgatgaagaaggcgtgtggtgctatgtggccggaaaaccaggtgatttcggatattgtgacctcaattattgcgaggaagctgtcgaagaagaaaccggagacggtctggatgaagacagcgatagagctatcgaaggtagaacagctaccagtgaatatcagacattctttaaccctaggacatttggctctggagaagccgactgtgggctgcgcccgctgtttgaaaaaaaatccctcgaagacaagacagagcgagagctcctcgagtcttacattgatggacgaattgtagagggaagcgacgctgaaatcggaatgtctccgtggcaggtgatgctgtttcggaaaagcccccaagaactgttgtgcggtgctagcctcatctctgatagatgggtcctcacagcagctcattgccttctgtacccaccctgggacaaaaattttacagaaaacgaccttttagtgcgcatcggcaaacatagtagaacccgctatgagagaaatatcgaaaagattagcatgctcgagaaaatctacatccacccaagatacaattggagggaaaacttagacagggacatcgctcttatgaaactgaaaaagcccgtggctttcagcgattatatacaccctgtgtgtctccctgacagagagacagccgcatcacttctgcaggccggttacaagggcagggttacaggctgggggaatctgaaggaaacttggacagcaaacgtgggaaaaggccaaccgagtgttttgcaggtggtgaacctgccgatcgtggaaaggccagtatgtaaggatagcacacgcatccgaattactgacaacatgttttgtgctggatacaaaccagatgagggaaaacgcggagacgcttgtgagggagacagcggcggaccctttgtgatgaagagtcctttcaataatcgctggtatcagatgggaattgtgagctggggcgaaggatgtgatagggatggaaaatacggattctatactcacgtgttcaggttgaagaagtggatccaaaaagttatcgatcaattcggcgaa

SEQ ID NO: 8590 - DNA, 1866 bp, synthetic construct
  misc_feature 1..1866: note = source = /note="Description of Artificial Sequence: Synthetic coding sequence"
  source 1..1866: mol_type = other DNA
atggcgcacgtgcgagggcttcagcttcccggttgtcttgcactcgcggcactctgctcgctggtgcattcgcaacatgtgtttcttgccccacaacaggcaagatcgttgctgcagagggtgcgccgagcgaacaccttccttgaagaggtgcgcaagggaaacctggaacgtgagtgtgtggaagaaacttgttcttacgaagaggcattcgaggcactggaatcgtccaccgcaaccgacgtcttttgggcaaagtacactgcatgcgaaaccgcacgcaccccgagagataaactggcagcatgcctcgaaggtaactgcgccgaaggcctgggtacgaactaccgtggacatgtgaacattactcgctcgggtattgaatgtcagctctggcgctctcggtacccacataagccagaaatcaattccacgacccacccgggagcagatttgcaggaaaacttttgtcgtaaccctgattcctccactaccggaccttggtgctacaccactgaccctactgtgcgccgtcaagaatgtagcatcccagtgtgcggtcaagatcaggtgacggtggcaatgactcctcggtcggaaggatcatcagtgaacctgtcaccgcctctcgaacaatgcgtgcctgacaggggccaacaataccaggggcggctcgcagtgactacccatggactgccttgccttgcttgggcttcggcacaggccaaagcactctccaaacatcaagactttaacagtgcagtgcaactcgtcgaaaacttctgcagaaatccagatggagatgaggagggagtgtggtgctacgtggccggaaagccaggggattttgggtattgtgatctcaactactgcgaggaggcagtggaagaggaaaccggggatgggcttgatgaggattcggatcgggcaatcgaaggccggactgccaccagcgaataccagacctttttcaaccccagaactttcggttccggcgaagctgactgtggacttagaccactttttgaaaagaagtcacttgaagataaaaccgagagagaactcctcgaaagctacattgatgggaggatcgtggaagggagcgatgccgagatcggaatgagcccgtggcaggtgatgctttttcgcaagtcgcctcaagagcttctgtgtggtgcaagcctgatcagcgatcggtgggtgctcacggccgcacattgcctcctgtacccaccttgggataagaacttcaccgagaacgaccttctggtgcggatagggaaacatagccgtactcgctacgaacgcaacattgagaagattagcatgttggagaagatatacattcatcctcgttacaactggcgggagaaccttgatcgcgatattgcactgatgaagctgaagaagccagttgcgttttcggactacatccatcctgtgtgccttcctgacagagaaaccgcagcctcgctgcttcaggcgggatacaaggggcgggtgactggatggggaaacctgaaggaaacttggactgccaatgtgggaaagggtcagccctccgtcctccaagtcgtgaatctgccaattgtcgaacgaccagtgtgcaaggatagcacccgcataagaattactgacaatatgttctgtgccggttacaaaccagacgaagggaagagaggagacgcgtgtgaaggggatagcggtggtccctttgtcatgaaaagcccttttaacaacagatggtaccaaatgggtattgtgtcctggggagagggatgcgaccgtgatggaaagtatgggttctacacccacgtgttcagacttaagaaatggatccaaaaggttattgaccaatttggtgag

SEQ ID NO: 8591 - DNA, 1866 bp, synthetic construct
  misc_feature 1..1866: note = source = /note="Description of Artificial Sequence: Synthetic coding sequence"
  source 1..1866: mol_type = other DNA
atggcccatgtgaggggcctgcaacttcctgggtgcttagccttagccgccctttgtagcctggtccactcacaacacgtatttctcgccccccagcaggcacggtctctgctgcagagagttagaagagctaacacattcctggaagaagtgagaaagggaaatctggagagagagtgtgtggaggaaacctgtagctatgaagaggcgttcgaggccctggagtcctcgactgctacggatgtcttctgggcgaagtatactgcttgcgagaccgccaggacaccaagagacaagttagccgcctgtcttgaggggaattgcgcggaagggctgggaactaactaccgagggcacgtgaatattacgcgcagtggcattgagtgccaactgtggcggtctagatatccacacaaacctgagatcaactccactactcacccgggcgccgatcttcaggagaatttctgccgtaatcctgactcgtctacaactggcccatggtgttacaccacagaccccaccgttcgcaggcaggaatgttctatccccgtgtgcggtcaagatcaagtgacagtcgctatgactcccaggagcgagggatccagtgtcaatttaagccccccacttgaacagtgcgtgcccgacagaggtcagcaataccagggccggcttgctgtgaccactcatgggctcccttgtctggcatgggctagcgcacaggccaaggcgctcagcaaacaccaggatttcaatagcgcggtccaacttgtggaaaacttttgtcggaatcctgatggagacgaagaaggagtgtggtgctacgtggctgggaaacccggcgactttgggtactgcgacctgaattactgcgaggaagccgtcgaggaggagacaggtgatggactggatgaggacagcgaccgggcaatcgaagggcggaccgccaccagcgagtaccagacattcttcaacccaaggacatttgggagtggggaggcggactgcggactgaggccgctgttcgagaagaaaagcctagaggataaaaccgaaagagaattattggaaagctacattgacggtaggatcgttgaaggttctgatgccgagataggaatgtccccctggcaagtgatgctatttaggaagagtccgcaagagctactatgtggagcttcactaatcagcgaccgttgggtgctcacggcggcacattgcctgctgtaccctccttgggacaagaattttacagagaacgatctactcgtgcgaatcggcaagcactctcgcacgcgctacgagagaaatattgagaaaatatccatgctggagaaaatttatatacacccacgatataactggcgcgaaaacctcgatagagacatcgctttgatgaagctgaagaagcccgtcgccttctcagactatatccacccggtgtgtttgcctgaccgcgaaacggccgcctcgctcttacaggccggatacaagggtcgggtgacgggttggggcaacttgaaggagacatggaccgcgaatgttgggaaagggcagccatccgtattacaagtggtcaacctgccaatagtggagcgtccggtttgcaaggactctactagaattagaattacagacaacatgttttgcgccgggtacaagcctgacgagggcaagagaggggatgcctgcgaaggcgattcaggcggcccatttgtcatgaagtctccctttaacaatcgatggtaccagatgggtattgtgtcgtggggggaggggtgtgaccgagacggaaagtatgggttctatacccacgtatttcggctcaaaaaatggattcagaaagtgattgatcagttcggggaa

SEQ ID NO: 8592 - DNA, 1866 bp, synthetic construct
  misc_feature 1..1866: note = source = /note="Description of Artificial Sequence: Synthetic coding sequence"
  source 1..1866: mol_type = other DNA
atggcacatgtccggggcctgcagctgccgggttgcctggccctggctgcgctgtgttcactggtgcactcacaacacgtctttcttgcacctcagcaggcgagatcactcctgcagcgggtgcgcagggcgaatacctttctggaggaagtccgcaaaggaaacctcgagcgggaatgcgtggaagaaacttgttcatacgaagaggcttttgaggcactggagtcgagcaccgcgactgacgtcttttgggcaaaatacactgcttgcgagactgccagaaccccccgcgacaagctcgcggcctgcctggaaggaaactgtgccgaaggccttgggaccaactaccgcgggcatgtgaacattacccgctccggaatcgaatgtcaactgtggcgctcgcgttatccacacaagccggagatcaactccaccacccatcccggagccgacctgcaagagaatttctgtcgcaatcccgactcctcgaccacgggaccatggtgctacacgactgaccctactgtgcgccgccaagaatgcagcattccagtctgtggacaagaccaggtgactgtcgcgatgaccccaaggtccgagggctctagcgtgaacctgagcccgccgctggaacagtgcgtcccggatcggggacaacaataccaggggcgtttggcggtaactacccacggtctgccgtgcctcgcatgggcgagcgcacaagccaaagcactgtccaagcatcaggacttcaacagcgccgtgcaactcgtggaaaacttctgccgcaatccggatggagacgaagagggagtgtggtgttacgtggctggcaagcccggagattttgggtattgcgacctcaactactgcgaagaggcggtcgaagaggagactggagacggactcgatgaggattcagatagagcaatcgagggccgcaccgccacctctgaataccaaacctttttcaacccacgcaccttcgggtcgggggaagccgattgcggtttgcgcccgctcttcgagaagaagtcgctggaagataagaccgaacgcgaactcctggagtcgtacatcgacggacggattgtggagggcagcgacgccgaaatcggtatgtccccctggcaggtgatgctgttccggaagtcccctcaggagctgctctgcggggcatcgctgatttcggaccggtgggtgctgactgctgcgcactgcctgctgtacccgccgtgggacaagaacttcaccgagaacgatcttctcgtgcgtattggaaagcactcaaggactaggtacgagcggaatatcgaaaagatttcaatgctggagaagatctacattcaccctaggtacaattggcgggagaatctggacagagatatcgccctcatgaaacttaagaaacctgtcgctttctcggactatatccatccggtgtgcctcccagatcgggagactgctgccagcctgctgcaagcgggctacaagggccgcgttaccggctggggaaatctgaaggagacgtggaccgcgaacgtgggcaagggacaaccttctgtgcttcaggttgtgaatctgccgattgtcgaaagaccggtctgtaaggactcgaccagaatacgcatcacggacaacatgttctgcgccggatacaaaccggacgaaggaaagagaggcgatgcatgcgaaggagattccgggggccccttcgtgatgaaatcgccgttcaacaaccgatggtaccaaatgggaatcgtctcgtggggagaaggatgtgacagggacggaaaatacggtttttacactcacgtattccgtctcaaaaagtggatccagaaggtgatcgaccagttcggggag

SEQ ID NO: 8593 - DNA, 1866 bp, synthetic construct
  misc_feature 1..1866: note = source = /note="Description of Artificial Sequence: Synthetic coding sequence"
  source 1..1866: mol_type = other DNA
atggcccacgtgcgcggcttgcagctacctggatgtcttgccctagctgccctatgctccctggtccacagtcagcacgtatttttagctccgcagcaggcaaggtctttactgcagagagtgcgccgtgccaatacgttccttgaggaggtgaggaaaggcaacctggaaagagaatgcgtggaggagacatgctcctatgaagaggccttcgaggccctcgagagttccacagccacggatgttttttgggctaagtatacagcctgtgaaaccgcaagaactcctagggacaaacttgcagcctgcctcgagggtaattgcgcagaagggctcggcactaactaccggggacatgttaatataactaggagcggtattgaatgccagctgtggcgctcccggtacccccataagccggaaataaacagcactactcatcccggcgcggatctccaggagaacttttgtaggaacccggacagtagtacaacagggccatggtgctacacgacagatcccaccgttaggcgccaggagtgtagcattcccgtctgcggccaagatcaggttacagtggctatgacaccgagatcagagggatcttccgtgaatctaagtcccccgctggagcagtgtgtacccgatcgcggccagcagtatcaaggacgactggccgtgactacacacggcctgccttgcttggcctgggcatccgcacaggctaaagccctctctaagcatcaggactttaactctgctgtccagcttgtagagaacttttgccgcaacccggacggagacgaagaaggggtgtggtgttatgtcgccggcaaacctggagactttggatactgcgacctgaactactgcgaggaagctgtcgaggaagaaaccggagacggcctggacgaggactcagacagggctatcgaaggacgaacagccacaagcgaataccagacattcttcaatcccagaaccttcggcagcggtgaggctgactgcgggctccgccccctgttcgaaaaaaagagcctggaagacaagactgagagagaactcctggaatcctatatcgatggccgtattgtggagggatccgacgccgagattggaatgagtccctggcaggtaatgctttttagaaaatctccccaggaactcttatgcggagcttcgctgatcagtgatcgctgggtcttaacggccgcccattgtctgctttatcccccctgggacaagaacttcacggagaatgacctcctggttaggattgggaagcacagtagaaccaggtatgagagaaacattgagaagatcagcatgttagagaagatttacatccacccaaggtataattggagggaaaacctggacagagacattgcgttgatgaagcttaagaagccagtcgctttcagcgactatatccaccccgtgtgcctgccagacagagagaccgccgcctcactgcttcaggcagggtataaggggcgcgtgaccggctggggcaacctgaaagaaacttggaccgctaacgtggggaaggggcagccttcagtcctgcaggtggtcaacctgcccatcgtagagcgtccagtttgtaaagattccacacggatacgcatcaccgacaacatgttctgcgcgggctataaacctgatgagggaaagaggggggacgcctgcgagggggactcagggggcccattcgtaatgaaaagcccatttaacaaccgctggtaccagatggggatcgtcagctggggagagggatgtgatagggacggtaagtatgggttttatacccacgtgtttcgtctgaaaaaatggattcagaaggttattgatcagttcggagag

SEQ ID NO: 8594 - DNA, 1866 bp, synthetic construct
  misc_feature 1..1866: note = source = /note="Description of Artificial Sequence: Synthetic coding sequence"
  source 1..1866: mol_type = other DNA
atggctcacgtccgggggctgcagcttccgggttgtcttgcgctcgccgccctctgctccctggtccactcgcaacatgtgtttctggccccacagcaggcccgtagcctgctgcagcgcgtccggcgcgctaatacctttcttgaggaagtccgcaaaggcaacctggagagagagtgcgtggaggaaacctgtagctacgaagaagcattcgaagcactggaatcaagcaccgccactgacgtcttttgggccaagtataccgcttgtgaaaccgcccgcacccccagagacaagctcgcggcgtgtctcgaaggaaactgcgctgaggggctggggaccaactacagaggacacgtgaacatcactcgcagcggaatcgaatgtcagctgtggcggtcgcggtacccgcacaagcctgagatcaactcgaccacccatcctggagccgacttgcaagagaatttctgccgcaacccggactcatccacgacgggaccctggtgctacactacggatccaactgtgaggcggcaagagtgttctatcccggtgtgcggacaggaccaagtgaccgtggcaatgaccccgcgctcagaaggttcatccgtgaacttgtcgccgccgttggagcagtgcgtcccagatagaggacagcaataccaggggcgtctggcggtgactactcatggactgccgtgcctggcctgggcctccgcccaagcaaaagcgctctcaaagcaccaagacttcaactccgctgtgcagctcgtggagaacttttgccggaatcccgacggagacgaggagggagtgtggtgttacgtggcaggaaagccaggggatttcggctactgcgacttgaactactgcgaagaagctgttgaagaagagactggtgacggactcgacgaggactctgatcgggccattgaaggccggactgcgacgagcgaataccaaactttcttcaatccgcgcaccttcggttcaggtgaggcggattgcggcctcagaccgctcttcgagaagaaatccctcgaagataagaccgaacgggaactgctggagtcatacatcgacggccgcatcgtggaagggtcggatgccgaaattggcatgtccccctggcaagtgatgctctttagaaaatcgccacaggagctgctttgcggcgcctccctgatttccgaccgctgggtgctgactgcagcgcattgcctcctgtacccaccttgggacaagaacttcaccgagaacgacctgcttgtgcgaatcggaaaacactcgcgcactaggtacgaacggaatattgagaagatcagtatgctcgaaaaaatctatatccatccgagatacaattggagagaaaatttggaccgggacatcgcgctgatgaagctgaagaagcctgtggcgttctcggattacatacaccctgtgtgcctgccagatcgcgaaactgctgcaagcctgctccaggccggttacaagggcagggtcaccggatggggaaacctgaaagagacttggactgcaaatgtcggaaagggacagccgagcgttctgcaagtggtgaacctgccgatcgtcgagaggcccgtctgcaaagattcgacccgaatcaggatcaccgacaacatgttctgcgccggatacaagccagatgaaggcaagcgcggtgatgcctgcgagggagatagcggcggacctttcgtgatgaagtcgccgttcaataaccgctggtatcagatgggaatcgtctcctggggagaaggctgcgacagagacggcaaatacgggttctacactcacgtgtttcggctcaagaagtggatccagaaggttatcgatcagttcggagaa

SEQ ID NO: 8595 - DNA, 1866 bp, synthetic construct
  misc_feature 1..1866: note = source = /note="Description of Artificial Sequence: Synthetic coding sequence"
  source 1..1866: mol_type = other DNA
atggcccacgtgaggggactgcaactcccgggctgcctcgccctggctgccctgtgttcacttgtgcattcacagcacgtctttctcgccccacagcaagcgagatccctgctccaaagggtccggagagccaacacctttttggaggaagtgagaaaggggaatctggaacgcgagtgcgtggaagaaacttgttcgtacgaggaggcgtttgaggccctggagagcagcaccgccaccgatgtattctgggctaaatacaccgcctgcgagactgcgagaacgccgcgggacaaacttgcagcgtgcctcgaagggaactgtgcagagggcctgggaaccaactaccgcggccatgtgaatatcacgagatccggcatcgagtgccagctctggcgatcacgctacccgcacaagcccgagatcaattcaaccacccacccaggagccgaccttcaggagaatttctgtcgaaacccggactcatcgactaccggcccgtggtgctacactaccgacccaaccgttcgcaggcaagagtgcagcattccggtgtgcggtcaagatcaggtgaccgtggccatgactccgcgcagcgaaggctcctcagtgaacctgagccccccgctcgaacagtgcgtgccggatagaggtcaacagtaccagggacggctggccgtgaccactcacggactgccttgcttggcatgggccagcgcgcaggcaaaggcccttagcaagcaccaagacttcaattcggccgtgcaattggtggagaacttctgtaggaacccagacggagatgaggagggagtgtggtgctacgtggcaggaaagcctggcgatttcggatactgtgacctcaattactgtgaagaggcagtcgaagaagaaaccggagacggactggacgaagatagcgatagagcgatcgagggaaggactgcgacttcggaataccaaactttcttcaatcctcggaccttcggctctggcgaagcggactgcgggcttcgccccctgttcgagaagaagtccctggaggacaaaactgagcgcgagctgctggaatcgtacatcgacggccgcatagtggaaggcagcgacgccgaaatcggaatgtccccatggcaagtgatgctgttcagaaaatcaccgcaggaattgctgtgtggagcaagcctcatctcggacagatgggtgctgacggccgcccattgcctgctctacccgccctgggacaaaaactttactgaaaacgatctcctcgtgaggattggaaaacattcaagaacccggtacgagcgcaatatcgagaagatctcaatgttggagaagatctacattcatccgcggtacaactggcgggagaacctcgaccgcgacatcgctctgatgaaactgaaaaagccagtggccttctcggactacatccacccggtgtgcctccctgaccgggaaactgccgcctcgctcctgcaggcgggctacaagggacgggttaccggatggggaaacctgaaggaaacttggactgccaacgtgggcaagggacaaccatcggtcctccaagtggttaacctgcctatcgtcgagcgcccggtctgcaaagattcgactcgcattagaatcaccgacaacatgttctgcgcgggatataagcctgatgaggggaagcgaggagacgcatgcgagggagactcgggaggacctttcgtgatgaaatcgcctttcaacaaccggtggtaccagatggggatcgtgagctggggcgaaggatgcgatcgagacggaaagtatggcttctacactcacgtgttcagactcaagaaatggatccaaaaagtcattgaccaattcggcgag

SEQ ID NO: 8596 - DNA, 1866 bp, synthetic construct
  misc_feature 1..1866: note = source = /note="Description of Artificial Sequence: Synthetic coding sequence"
  source 1..1866: mol_type = other DNA
atggcacatgtgagggggctccagctgcctggatgtttggcgctggcggcgctttgttcactcgtccatagccagcacgtgttcttggccccgcaacaagcgcggagcttgttgcagcgtgtgcggcgggccaacaccttcctcgaggaggtgcgaaaggggaacctcgagagggaatgcgtcgaggaaacttgtagctacgaagaggcattcgaggcgctggagtcatccaccgctacggacgtgttctgggccaagtacacggcgtgcgagactgcccgcaccccgcgcgataagctcgcggcatgcctcgaagggaattgcgcggaaggactggggaccaactaccgaggccacgtgaatatcactcgctctggcattgaatgtcagttgtggcgctcgcgctacccccacaaaccggagataaactcaaccactcatccaggagcagatttgcaagagaacttttgtcgcaaccctgactcatcgaccaccgggccttggtgctacaccaccgacccgaccgtgcggcgccaggagtgctcgattccggtgtgcgggcaggaccaggtgactgtggccatgactcctcggagcgagggctcgtcggtgaatctctcaccaccattggagcagtgtgtccctgacaggggacagcagtaccagggacggctcgccgttacgacccacgggctgccatgccttgcctgggcctcggcgcaagcaaaagccctgagcaagcaccaagacttcaattcagctgtccagctggtcgaaaacttctgccgcaacccggacggcgacgaagaaggcgtctggtgttacgtggctggcaagccgggagacttcggatactgcgatctcaattactgcgaagaagcggtggaagaagaaaccggagatgggctggatgaggactccgaccgggcaattgaagggagaactgccacttcagagtaccaaaccttctttaatccacggaccttcggatcaggggaagcagactgtggactgcgtccactgttcgaaaagaagtcgctggaggacaaaactgaacgggagttgttggaatcctacatcgacgggagaatcgtggagggttcggacgcagaaatcggaatgtccccttggcaagtgatgctgttccgcaagtcaccacaagaactgctgtgcggagcttccttgatctccgacagatgggtgctgaccgccgcgcattgcctcctttacccaccttgggataagaacttcaccgagaacgacttgctcgtgagaatcgggaagcactcccggacgcgctacgaaagaaatatcgaaaagatctcgatgcttgaaaagatctacatccacccccggtacaattggcgcgaaaacctggacagagatatcgccctgatgaaactgaaaaagccggtggccttttcggattacatccacccggtttgcctgccggaccgcgaaactgccgcttccctgctgcaggccggatacaagggacgcgtcactggttggggaaatctgaaagaaacctggactgcgaacgttggaaagggccagccgagcgtgcttcaagtggtgaacctgcccatcgtcgagcgcccggtgtgcaaggattccacgaggatccgcatcaccgataacatgttttgcgcgggatacaagcctgatgaagggaagcgaggagatgcatgcgagggagactcgggcggccccttcgtcatgaagtccccattcaacaaccggtggtaccagatgggaatcgtctcttggggagaaggatgcgatcgcgacggaaagtatggtttctatactcatgtttttcgcctcaaaaagtggatccagaaggtcatcgaccagtttggcgag

SEQ ID NO: 8597 - DNA, 1866 bp, synthetic construct
  misc_feature 1..1866: note = source = /note="Description of Artificial Sequence: Synthetic coding sequence"
  source 1..1866: mol_type = other DNA
atggcgcatgtgcgcggcctgcagctgccgggatgcctggcgctcgccgcgctctgcagcctggtgcactcccagcacgtgttcctggcaccacaacaggctagaagcctgttgcaacgcgtgcgccgtgccaacacttttctcgaagaagtgaggaagggcaaccttgagcgcgaatgtgtggaggagacgtgttcctacgaagaagcattcgaagctctcgagtcctcaactgcaaccgacgtattctgggccaaatacaccgcgtgtgaaaccgcgcgcaccccgcgtgacaaactcgccgcttgtctggagggaaactgcgcagaaggactcggaaccaattaccggggacatgtcaacatcactaggtcagggatcgaatgccagctctggcggagccgctacccccacaaacccgaaatcaacagcactacccacccaggcgctgacctccaggaaaacttctgccgtaaccctgattcgagcaccaccgggccgtggtgttacaccaccgatcccaccgtccgccggcaggagtgctcgatcccggtctgcggccaggaccaagtgactgtggcaatgaccccaaggtcggaagggagctccgtgaatctgtcgccgccattggaacagtgcgtgccggatcggggtcaacagtaccaggggcggctcgcggtgaccacccacggcctgccttgcctcgcctgggcctcagcccaagcgaaggccctctccaagcaccaggactttaacagtgcggtccagctggtggagaatttctgcaggaacccggatggggatgaagagggagtgtggtgctacgtcgcaggcaagcccggggatttcgggtactgtgatctcaactactgcgaggaagccgtggaagaggagactggcgacgggctggacgaggactccgatagagccatcgaaggcaggacggccacctcggaataccagactttctttaacccgcgcacttttgggtcaggggaagcagattgcggactgcggcccctgttcgagaaaaagtcactggaggacaagactgagagagaactgctcgaaagctacatcgatgggcgcatcgtggaagggtctgacgccgaaattggaatgtccccgtggcaggtgatgcttttccggaagtcgccgcaagagctgctgtgtggagcatcgctgatctcagacagatgggtcctgaccgccgcgcactgtctgttgtacccgccgtgggacaagaatttcaccgaaaacgatttgctcgtgagaattggtaagcactcgcggacgagatacgagagaaacatcgaaaagatttccatgctggagaaaatctatatccatccgcggtataactggcgcgaaaatctcgaccgcgacattgccctgatgaagctgaagaagccggtcgccttttcggattacatccatcccgtgtgcctcccggaccgcgagactgcggccagcctgcttcaagccggatacaaagggcgggtcaccggatggggcaatctgaaagaaacttggaccgctaatgtgggaaaaggtcagccttcggtcctgcaagttgtgaatttgccgatcgtcgagcggccggtgtgcaaggattcaaccagaatccgaatcaccgacaacatgttctgtgcgggatacaagccggatgagggcaagcgcggcgatgcgtgcgagggagactccggaggacctttcgtgatgaagtccccgtttaacaaccggtggtaccaaatgggaatcgtgagctggggcgaaggatgcgacagggatggcaagtacggattctacacccacgtgttcaggctgaagaaatggatccaaaaggtgattgatcaattcggagag

SEQ ID NO: 8598 - DNA, 1866 bp, synthetic construct
  misc_feature 1..1866: note = source = /note="Description of Artificial Sequence: Synthetic coding sequence"
  source 1..1866: mol_type = other DNA
atggcccacgtgaggggcctccaactccccggatgcctggcactcgctgctctatgttcgctggtgcactcccaacatgttttccttgccccacagcaggctcgctccctgctgcagagggtccggagggctaatactttccttgaggaagtacgaaagggaaacctggaacgcgaatgcgttgaggagacctgcagctatgaagaagcctttgaagctctagaaagtagcaccgcgactgacgtcttttgggcaaagtacaccgcctgtgaaactgcacgaacccctcgggacaaactcgccgcctgtttggaaggcaactgcgctgagggtctggggacgaactatagggggcacgtgaacatcacgagatccggcatcgaatgccagttatggagatcacgttacccccacaaacctgagataaactcaacaacgcatccgggcgctgatctgcaagaaaatttttgtcggaaccctgattcctcgacaacggggccttggtgctataccaccgacccgacagtcagacgacaggagtgttctatccccgtgtgcggtcaggaccaggtcaccgtggcaatgacgcctcgctccgagggttcgtcagtcaatttgagccccccactagaacagtgcgttcctgacagggggcagcagtatcagggtcgcctggccgttacaactcatggactgccatgtctcgcgtgggcctccgcacaggcaaaggcattgtcaaagcaccaagatttcaatagcgctgtacagctggttgagaatttctgccggaatcctgacggcgatgaggagggggtgtggtgttatgtcgcaggcaagcccggcgacttcggctactgtgatctcaactattgcgaagaggctgtggaagaagagacgggggatggactggacgaggactccgaccgggccatagagggaagaacagctacctcagagtatcagaccttcttcaatccaaggacattcgggtccggagaggcagactgcggactgcggcctctgtttgaaaagaagtcactggaggacaagaccgaacgggaacttctcgaatcttacatcgatgggcggattgttgaagggtcagacgccgagattggaatgagcccctggcaagtgatgctgtttcgaaaaagtccccaggagcttctttgcggcgcctccctgatatctgaccggtgggttctaacggctgctcactgtctcttataccccccctgggacaaaaacttcaccgagaatgatctgctagtccggattggaaaacacagtcgcacccggtacgaaagaaatattgagaagatatccatgctcgaaaagatttacatccacccaaggtacaattggcgcgagaatctcgaccgcgacatcgccttgatgaagctgaaaaaaccggttgccttcagtgactacatccaccctgtgtgtctgcccgatcgcgagactgctgccagcctcttgcaggccggatacaagggacgggtcacaggttggggtaatttgaaggagacttggacagccaatgtgggaaaaggccaaccatctgtacttcaagtggtgaatttacctatagtggagcggcctgtgtgcaaagacagcacgagaatcagaataacagacaacatgttctgtgctggttacaagcccgatgagggaaagaggggagacgcttgcgaaggggatagcgggggtccattcgtgatgaaaagtccctttaacaaccgatggtatcagatggggatagtttcatggggagaaggctgcgacagggatggtaagtatggattttacacacatgtgtttcgcctgaaaaagtggattcaaaaggtgatcgaccagttcggggaa

SEQ ID NO: 8599 - DNA, 1866 bp, synthetic construct
  misc_feature 1..1866: note = source = /note="Description of Artificial Sequence: Synthetic coding sequence"
  source 1..1866: mol_type = other DNA
atggcacacgtgcgaggcctacaactacccgggtgcctcgccctggctgctttgtgctccttggtgcatagccagcatgtgttcctagccccccagcaggcaaggagtctccttcaaagggtgcgacgcgccaatacttttctagaagaagttcgcaagggaaatcttgagagggagtgcgttgaggagacctgttcatatgaagaagcctttgaggccctggaatcaagcactgctaccgacgtgttctgggccaagtatactgcttgcgagacagcaagaacccccagggacaaactggccgcttgcctcgagggcaactgcgccgaggggctggggactaactaccggggccatgtcaatatcactagatcaggaatagaatgccaactgtggagaagccggtacccccacaagcccgagataaacagcaccacacaccccggcgctgacctacaggagaacttctgtcgtaatcccgactctagcaccacaggtccatggtgctacacaacagaccctaccgtgcggcgccaggaatgtagcattcctgtgtgcggccaggatcaggttactgtggctatgacccctcgcagtgaaggcagttctgttaacctgtctcctcccctcgaacaatgcgttcccgaccgcggacaacagtaccagggtcgattagccgtgaccacccatggcctgccgtgcttagcctgggctagtgcccaggctaaagcactgtccaagcatcaggattttaatagcgcagtccagctagtcgagaacttttgtcgcaacccagatggcgacgaagaaggtgtttggtgctatgtggcaggcaagcctggagacttcggctactgcgacctgaattactgtgaggaggccgtggaggaggagaccggcgatggcctagacgaggattcagatcgggccatagaagggagaaccgccacctcagaataccaaacttttttcaaccctcggacttttgggtcaggtgaagcagactgcgggctgcgccctctgtttgagaagaagtccctggaagataagaccgagcgcgagctgctggagtcatatatagatgggcgcattgtggagggtagtgacgccgaaattggtatgagtccttggcaggtgatgttattcaggaaaagcccccaggagctcctatgcggagcttctcttatttctgatcggtgggtcttaacagccgcccactgcttattatatcctccttgggacaagaatttcaccgagaatgatttactagtcagaataggcaagcatagccgaacccgctacgagcgcaatatcgagaaaattagtatgctggaaaaaatttatattcacccaagatataactggagagagaatttagaccgggatatcgccctaatgaagctgaagaaaccagtggccttttccgactacatccaccccgtgtgtcttcccgatcgcgaaaccgctgctagcttgctgcaagcaggatataaaggcagagttactggatggggcaacttaaaagaaacttggacagcaaatgtgggcaaaggccagccatcagtgctgcaagtggtcaacctccccatcgttgaacgcccagtttgcaaggactctacaagaatacggatcaccgataatatgttttgtgcagggtataagcccgatgagggtaaacggggggatgcttgtgagggcgattcagggggtccattcgtaatgaaatcccccttcaacaatcgatggtaccagatggggattgtatcctggggcgaagggtgtgacagagacggcaagtacggcttttacacccacgtgtttaggctgaagaagtggatacagaaggtcatcgaccagttcggggag

SEQ ID NO: 8600 - DNA, 1866 bp, synthetic construct
  misc_feature 1..1866: note = source = /note="Description of Artificial Sequence: Synthetic coding sequence"
  source 1..1866: mol_type = other DNA
atggcacacgtgcggggactgcagttgcccggctgccttgccctggcggcgctctgctccctggtccattcccagcacgtgtttctcgccccgcaacaggcgcgcagcctcctccagcgagtgagacgcgccaacacgtttctggaagaagtgcgcaagggaaatctggagcgggaatgcgtggaggagacttgttcatacgaagaggcgttcgaagccctggaatctagcaccgcgactgatgtgttctgggccaagtacacggcctgcgaaaccgcacgcactccgagggacaagttggccgcgtgcctggaggggaactgtgccgagggactcggcaccaattaccgcgggcatgtgaacatcacccggtctggaatcgaatgtcagctctggcgctcccggtacccacataagccggagattaactcgaccacgcacccgggggccgaccttcaagaaaacttctgccgaaaccccgattcctcgactaccggaccatggtgctacactaccgatccgactgtgagacgacaggagtgctcgatcccagtctgcggacaagatcaggtcaccgtggctatgactcctagatcggaaggctccagcgtcaatctctctccgccacttgagcagtgcgttccagaccgcggccaacagtaccagggacgcctggccgtcactacccacgggttgccttgcctggcatgggcgtcggcacaagcgaaagccttgagcaaacaccaggatttcaactcggccgtgcagctcgtcgagaacttctgtcggaaccctgatggtgacgaggagggagtctggtgttacgtggcaggaaaacctggagacttcggatattgcgatcttaactactgcgaggaagctgtggaggaagaaacgggagatgggctcgacgaagattcagatcgcgccatcgagggacggacggctaccagcgagtaccaaaccttctttaatccgcggactttcggatcaggggaagcagactgcggattgcgcccgttgtttgagaagaaatctctcgaggacaagactgaaagagaactcttggaaagctacatcgatggacggatcgtcgagggaagcgacgcagagatcggaatgtccccctggcaggttatgctgttccggaagagcccacaggaattgctgtgcggcgcctccttgatctcggaccgctgggtgctgaccgcggcacattgcttgctctacccaccgtgggataagaatttcactgaaaacgatctgctggtgcggatcggaaagcactcacggacccggtatgaacggaacatcgagaagatatctatgttggagaaaatctacatccacccgcgctacaactggagggagaatctggacagagatattgcgctgatgaaactgaagaagccggtggccttctccgattacatccatccggtgtgcctgcctgatcgcgagactgcagcttccctgctccaagctggatacaaaggtcgggtgaccggatggggaaatctgaaggaaacctggactgccaacgtggggaaaggacagccgagcgttctccaggtcgttaacctgccgatcgtcgagcggcctgtctgcaaggactccacccgcattagaatcaccgacaacatgttttgcgccggttacaagccggacgagggtaagaggggggacgcttgtgaaggtgactcgggcggaccgttcgtcatgaagtccccgttcaataatcgttggtaccaaatgggaatagtgtcgtggggagaaggctgtgatagggacgggaagtacggcttttacacccacgtgttccgcttgaaaaagtggatccagaaggtaatcgaccagttcggagaa

SEQ ID NO: 8601 - DNA, 1866 bp, synthetic construct
  misc_feature 1..1866: note = source = /note="Description of Artificial Sequence: Synthetic coding sequence"
  source 1..1866: mol_type = other DNA
atggctcatgtacgaggtctccagctcccaggatgccttgccttggctgcgctttgcagcctggtccattcccagcacgtgtttttagcgccgcagcaggcccgatcccttttgcagcgggtacgacgcgcgaacacatttcttgaagaggttagaaaagggaatcttgagagagaatgtgtggaggagacttgttcttacgaagaggctttcgaggccctggaaagctcaacagctaccgacgtgttctgggcaaaatacaccgcgtgcgagacggcgagaacacctcgagataagcttgccgcttgtcttgaaggaaattgtgctgagggtttaggaactaactatagaggtcacgtcaatatcactcggagtggtattgagtgtcagctgtggcggagccgatatcctcacaaaccggaaataaattcaactacgcacccgggcgcggatctacaggagaatttttgccgtaacccggactcgagcacgacaggcccttggtgctacacgaccgacccgacagtaaggcgacaggaatgttccatcccagtgtgtgggcaagaccaggtgaccgtggcgatgacccctcgatctgagggtagcagtgttaatctgagtccgcctctggagcagtgcgtgcctgaccgtggacagcaatatcaaggccgtcttgctgttacgactcacggactcccctgcctggcttgggcatctgcgcaggcgaaggccctctccaaacaccaagacttcaattccgctgttcagcttgtggaaaacttttgtcgaaatcccgatggtgacgaggagggcgtttggtgctatgtggcaggaaagccaggcgactttggctactgcgatcttaactactgtgaagaagctgtggaggaggaaactggagacggcctagacgaagatagcgaccgcgcgattgagggtcggaccgcaactagcgagtatcagacttttttcaatcccagaacattcggaagtggggaggcagactgcggccttaggccattattcgagaagaagagcctcgaggacaagaccgagcgtgagttgttagaatcatacatcgatggccgcatcgtcgaaggttctgatgccgaaattggtatgtccccctggcaagtcatgctcttccggaaatcgccccaggagcttctttgcggcgctagcctgatttcagaccgctgggtgctcacagctgcacactgtctcctctatccgccttgggacaagaactttactgagaatgacctgctagttcgcataggtaagcatagtcgaacgcgatacgagcgaaacatagagaagatctcgatgctggaaaagatctacattcacccgcgatacaattggcgcgaaaacttggatcgggacatcgccctcatgaagttaaagaagccggttgccttcagcgactatatccaccccgtgtgtctccctgacagagagacagcagcgagccttctccaagcaggatacaaaggccgggtgaccggatggggcaatttgaaagagacgtggactgccaacgtgggtaaggggcagccaagcgtcttgcaggtcgtcaatctgcctattgtagagcgtcccgtctgtaaagactctacacgaatccgaattacagataacatgttttgtgctggctacaaaccagacgaaggaaagaggggcgatgcttgcgagggagactccggcggtccttttgttatgaagtctccgtttaataaccgttggtaccaaatgggtattgtgagttggggtgaaggttgcgatcgtgacggcaaatacggcttctacacacatgttttccgtttgaagaaatggattcagaaggtgatcgatcaattcggcgaa

SEQ ID NO: 8602 - DNA, 1866 bp, synthetic construct
  misc_feature 1..1866: note = source = /note="Description of Artificial Sequence: Synthetic coding sequence"
  source 1..1866: mol_type = other DNA
atggctcacgtgcgtggacttcagctgccaggttgcctcgcactcgcagcactttgctcactcgtccattcacaacatgtgtttcttgcaccccaacaagccagatccctgctgcaaagagtgaggcgggccaacacctttcttgaggaagtcaggaaggggaatcttgaaagagaatgcgtggaggagacttgctcctacgaggaagcatttgaggccctggaatcgtcgacggcgactgatgtgttctgggcgaagtacaccgcgtgtgaaactgcacggactcctagagataaacttgcagcatgtctggaaggaaactgtgctgaaggactgggtaccaattatcggggacacgtgaacattacccgttccggtatagagtgtcaactttggcgttccaggtaccctcataagccagagatcaattccaccacccaccctggggcagacctgcaggagaatttctgtagaaacccagattcatctaccaccgggccttggtgctacactactgaccctaccgttaggcgccaggaatgctccatcccagtgtgtggacaagatcaggtgaccgtggcgatgaccccacgtagcgaaggatcgtcagtgaacctcagccctccactggaacaatgtgtgcctgatagaggccagcagtaccaaggacggctggcggtcaccactcacggactgccatgtctcgcgtgggccagcgcacaagcaaaggcactctccaagcaccaagacttcaactccgccgtccaactcgttgagaacttttgtagaaatcctgacggtgacgaagagggggtgtggtgttacgtggcgggaaagccaggcgattttggttactgtgacctgaactactgcgaggaagcagtggaagaagaaaccggggatggactggatgaggacagcgatcgagcaatcgagggtcggaccgcaacttcagaataccaaacgttctttaatccgcgcacttttgggtccggagaagctgattgtggcctgcgccctctttttgaaaagaagtccttggaagataagacggaacgcgaacttctcgaatcatacatcgacggccggatcgtggaaggcagcgatgccgaaattggaatgtcaccatggcaagtgatgctttttagaaagtcgcctcaggagcttctgtgtggcgcgtccctcatttcagatcgttgggttctcactgccgcccattgtttgctgtacccgccatgggacaagaactttaccgaaaacgacctgctggtgcggatcggaaagcattcaagaaccagatacgagaggaacatcgagaaaatctcaatgcttgaaaagatttacattcacccccgctacaattggcgcgaaaatctcgacagagacattgctcttatgaagctgaagaagcctgtggcttttagcgactatattcacccagtgtgtctgccggaccgtgagactgccgctagcctcctccaagcgggatacaaaggaagggtcaccggctgggggaacctgaaagaaacctggactgcgaacgtgggaaagggccaacctagcgtccttcaagtggtgaaccttccgatcgtggaacggcccgtgtgtaaagattcgacgagaatcagaattactgataacatgttctgcgctggatacaaacctgatgaggggaaaagaggggatgcatgcgagggtgacagcggaggtccgtttgtcatgaagtcgcctttcaacaacaggtggtaccaaatgggtattgtgtcttggggtgagggctgtgaccgcgatggcaaatacgggttctacactcatgttttccgacttaagaaatggatacaaaaggtcatcgaccagtttggtgag

SEQ ID NO: 8603 - DNA, 1866 bp, synthetic construct
  misc_feature 1..1866: note = source = /note="Description of Artificial Sequence: Synthetic coding sequence"
  source 1..1866: mol_type = other DNA
atggcgcatgtgcggggacttcagctgccagggtgcctggcgctggccgccctctgctcactggttcattcacagcacgtgtttttggccccccaacaagcgaggtcgctgctgcagcgagtccggcgcgccaacacctttctggaagaggttcggaagggcaacctggagcgggaatgcgtcgaagaaacttgctcgtacgaggaggcgttcgaagctctggagagttcaaccgctactgatgtcttttgggccaaatacactgcttgcgaaacggcccgcacccctcgggacaaattggccgcctgcctcgagggaaactgcgcggaaggactgggaaccaactaccggggccatgtcaatatcaccaggagcggtatcgagtgccaactgtggagatcccgctaccctcacaagcctgaaatcaactcgaccactcacccgggggcggatctgcaggaaaacttctgcagaaatcccgactcgtctaccacgggaccttggtgttacactactgacccaactgttcgccggcaagaatgttccatccctgtgtgcgggcaagaccaagtgactgtcgcaatgaccccaagaagcgaagggtcgtcagtcaacctgtcgcctcctttggaacagtgcgtgcctgacaggggacaacagtaccaaggccggctggcggtgactactcacggactcccttgtctcgcatgggcctccgcccaggcgaaagcgctctccaagcatcaggatttcaactccgcagtgcagcttgtcgagaacttctgccgcaatccggacggcgacgaggaaggagtctggtgctacgtggccggcaagccgggagatttcggctactgtgacttgaactactgtgaggaagccgtggaagaagaaactggggatggactggacgaggattccgaccgggcgattgaaggacgcactgccacctcggagtaccagaccttctttaacccgaggaccttcggaagcggtgaagcggattgcggactgcgtccgctgttcgaaaagaagtcgctggaggataaaaccgaacgggaacttcttgaaagctacatcgacggccgcattgtcgaaggttcggacgccgaaatcgggatgtccccctggcaggtgatgctcttccggaagtcaccacaagaactgctctgcggagcgtcactgatttcggacagatgggtgctgactgctgcccattgcttgttgtacccaccgtgggataagaatttcaccgaaaacgatctcctggtgaggattggcaagcattccagaacccggtacgagcgcaatattgaaaagattagcatgctggagaagatctacatccacccacggtacaactggcgcgagaacctggatcgcgacattgcgctgatgaaactgaaaaagccggtggccttctccgattacattcacccggtgtgcctgccagatcgcgaaaccgccgcctccctgctgcaggcaggatacaaaggtcgcgtgactggctggggcaatctcaaggaaacttggaccgccaacgtgggaaaaggacaacccagcgtgttgcaggtggtgaacctgccaatcgtggaaagacccgtctgtaaagactccacccgtatccgcatcaccgacaatatgttctgtgccggatacaagcctgacgaggggaagcgcggggacgcgtgtgagggagattccggtggaccattcgtgatgaagagcccgttcaataacagatggtaccagatgggaattgtgagctggggtgaaggatgtgatcgcgatggaaagtacggtttctacacccacgtgtttaggctgaaaaagtggatccaaaaggtcatcgaccagttcggggaa

SEQ ID NO: 8604 - DNA, 1866 bp, synthetic construct
  misc_feature 1..1866: note = source = /note="Description of Artificial Sequence: Synthetic coding sequence"
  source 1..1866: mol_type = other DNA
atggcacatgtgcggggcctgcagcttccaggctgccttgccctcgcagcgttgtgcagtctcgtgcacagtcaacatgtctttctcgctccacagcaggcgagatcactgctgcagagagtgaggcgggccaacacatttctggaagaggttaggaagggcaatttggaacgggagtgcgtggaggaaacttgtagctacgaagaagcatttgaagccctcgagagcagcaccgctaccgatgtcttctgggctaagtacaccgcgtgcgagactgcaagaactccaagagacaagcttgccgcttgtctagaaggaaactgcgctgaagggttaggaactaactaccgcggtcacgtcaacatcacgcgcagtgggatcgagtgccaactttggcggtctaggtatccccataaacctgaaatcaatagcaccacacatcctggggccgacctgcaagagaatttttgtcgcaacccagactcgagtactaccgggccctggtgttacactactgatccaacagtcagaaggcaagaatgttctatccctgtttgtggtcaggaccaggtgacagtcgcaatgacccctcgctcagaaggctcctcggtgaatctctctcctccccttgaacagtgtgtgccagaccgaggacaacaatatcagggccgcctggccgtgaccacacacggattgccttgtcttgcgtgggcatctgcacaagcaaaagctctgagtaagcatcaggactttaattctgctgttcagctggtcgagaatttctgcagaaaccctgacggggacgaagaaggagtgtggtgctatgtcgctggcaaacctggcgattttggatattgcgatcttaattattgcgaggaggccgtggaggaagagaccggagacggattggacgaggatagtgatagagccattgagggaagaaccgcaacctctgaataccagacatttttcaatcctcgcactttcggaagcggggaggccgactgcggtctgagacccctgttcgagaagaagtctttggaggacaagacagagagagagcttttagagagctacatcgacgggaggatcgtggagggcagcgacgcagagatcggcatgagtccatggcaggtgatgctcttccgcaagtcgccccaggaacttttgtgcggtgctagcctgatctctgataggtgggtattgaccgccgcacattgtctgctctatccgccttgggacaaaaactttaccgagaacgacctcctggtgaggattggaaagcattcgagaactcggtacgagaggaatatcgagaagataagcatgcttgagaagatttacatccatcctcggtacaactggagagagaaccttgatagagacattgcattgatgaaacttaagaagcccgttgcattttctgactacatccacccggtttgcctgcccgaccgcgaaaccgctgcttctttgttacaggcaggttacaagggtagggtgacaggatggggcaaccttaaggagacctggacagctaacgttggcaagggccaaccatctgtgctgcaagtggttaacttgccaatcgtggaaaggcctgtgtgcaaagattcgacaaggatccggatcactgataacatgttttgtgccggatataaaccggacgaaggaaaaaggggagacgcttgcgaaggcgactctgggggcccctttgttatgaagtcccctttcaacaacagatggtaccagatgggaattgtgtcttggggtgaaggatgtgatagagatggaaagtatggcttttacacccacgtttttagacttaagaaatggatccaaaaagtcatagaccagtttggcgag

SEQ ID NO: 8605 - DNA, 1866 bp, synthetic construct
  misc_feature 1..1866: note = source = /note="Description of Artificial Sequence: Synthetic coding sequence"
  source 1..1866: mol_type = other DNA
atggcccacgtcaggggactgcagttgcctgggtgtcttgcactcgctgctctgtgctctcttgttcacagtcaacacgtattcctggcacctcagcaagctcgatcacttctccagcgcgtccggagagctaatacattcctggaggaagtcaggaaggggaacctcgagagagagtgcgtggaagaaacctgctcctacgaggaagcatttgaggcccttgagagcagtaccgccacagatgttttctgggctaaatatactgcttgtgagaccgcccggaccccccgcgataaactggccgcttgtctcgaaggtaactgcgccgaaggactgggcacgaactatcgggggcacgtaaacattacacgatcaggtattgagtgccagttgtggaggagccgctatccacataagcccgaaattaacagcacgacacacccgggggcagacttgcaggaaaacttttgtaggaacccggactcctctacaacaggaccctggtgctacacaactgatccgaccgtcagacgacaagagtgcagcatcccagtgtgcggacaggaccaagtgacagttgctatgaccccccgtagcgaggggagttctgttaatcttagtccccccctggagcagtgtgtcccagatagaggtcagcagtatcaagggagattagcagtgaccactcacggcctcccttgtctggcttgggccagtgcacaggctaaggctctgagcaaacatcaggatttcaattctgcagtgcagctggtagagaacttctgccgcaaccctgacggagatgaggaaggtgtgtggtgctatgtggcaggaaagcctggcgatttcggctactgcgacctcaactactgcgaggaggcagtcgaggaggagaccggtgacggccttgacgaggacagcgaccgcgctatcgaaggccgcacagccacgtctgagtaccagacctttttcaatccaagaacctttgggtccggggaggccgattgcggacttcggcccctatttgagaagaaatctctggaggataagaccgagcgagagttgctggagtcctatattgatggaaggatcgttgagggctctgatgcagagatcggcatgagcccctggcaggtgatgctgttccggaaatcccctcaagaactgctctgcggcgctagcctcatctcagacaggtgggtccttaccgctgcccactgtctactgtatcccccttgggacaaaaatttcactgagaatgatctattggttcgtatcggcaagcatagcaggactaggtacgagcgcaacatcgagaaaatcagtatgcttgaaaaaatatacattcatcccaggtacaattggagggaaaacttggaccgagacatcgctctgatgaaactgaaaaaacctgtggcatttagcgactacatccaccccgtctgcctgccagaccgggaaaccgctgcatctctgctgcaggccggatacaagggccgagtaaccggctggggtaacttgaaggagacttggacagccaacgtggggaagggccagcccagcgtactccaggtggtgaatctccccatcgttgagaggcccgtttgcaaggactcgactaggattagaatcaccgataacatgttctgcgctggttataaaccagacgagggcaagagaggtgacgcctgcgaaggggactcgggcggacctttcgttatgaaaagcccatttaacaatagatggtaccagatgggtatcgtctcctggggcgaagggtgcgatcgggacggtaagtatgggttttacacccacgtctttcgactgaaaaaatggatacagaaggttatagaccagttcggggaa

SEQ ID NO: 8606 - DNA, 1866 bp, synthetic construct
  misc_feature 1..1866: note = source = /note="Description of Artificial Sequence: Synthetic coding sequence"
  source 1..1866: mol_type = other DNA
atggcacacgtaagaggactccaattgcccggctgcctggctctggctgcactgtgtagcctggtgcactcacagcacgtattcctggctccacagcaagcgagaagcctgcttcaacgggtgcggcgagcaaacacgtttttggaggaagtgcgcaaaggcaacttggagcgggagtgtgtggaagagacgtgctcatatgaagaggcctttgaggcattggagagcagtacagccactgatgttttctgggcaaagtacacggcctgcgagacagcgcggacccctagggataagctcgccgcctgtctcgagggcaactgcgccgaggggctcgggacgaactaccgaggccatgtcaacattacccggtctggtatcgagtgtcagctttggaggtcccggtatccacataaacctgagatcaatagcacaactcatcctggtgcagatcttcaggaaaacttctgcaggaaccccgactccagcactacaggcccttggtgctacacgacggaccccaccgtgcgccgccaggagtgtagtatacctgtgtgtggccaggatcaggtgactgtggctatgactccacgcagcgagggatcctccgtgaacctgtccccaccactggaacaatgtgtcccggatcgggggcagcagtaccagggtaggctggcggtcacgactcatggcctcccgtgtttggcctgggcgtccgcacaggccaaggcattgtccaagcatcaggacttcaatagtgcggtccagttggtggaaaacttctgtaggaatcccgacggggatgaggaaggcgtgtggtgttacgtggcggggaagcccggggattttggctattgcgacctgaattattgcgaggaggcagtggaggaggaaaccggggacggcctggatgaagacagcgatcgggccatcgagggaagaacagcaacttctgagtatcagacattcttcaacccacggacttttggctctggcgaggctgactgtggtctgagacctttgttcgagaagaaaagccttgaagataaaacagagcgcgagctgctggagtcttatatcgacggcaggatcgtcgaaggctcagacgctgagatcggaatgtccccctggcaggtgatgctgtttcgaaaaagcccacaggagctgctgtgcggcgcatctctgatctctgatcgctgggtcctgaccgccgctcattgccttttgtatccgccttgggataagaacttcaccgaaaacgaccttctcgtgcgcattgggaaacattctcggaccagatacgagcgcaacatcgaaaaaatcagcatgctggaaaaaatttatatccatccacgatataattggcgcgaaaatttggaccgagacatcgctctgatgaagctgaaaaagcctgtggccttctctgactacatccacccagtttgcttgccagacagggagacggctgcctccctgctgcaggcaggctacaaggggcgagtcaccggttggggcaatctcaaggagacttggactgcgaacgtgggtaagggccagcccagtgtgctgcaggtcgtgaacctgccgattgtcgaacggccagtctgcaaagacagtaccaggataagaattacagataacatgttctgcgccgggtacaagccagatgaaggaaaacgcggcgacgcttgtgagggggattccggaggtccatttgttatgaagtctccctttaacaaccgatggtaccagatggggatcgtatcctggggcgagggctgcgacagagatggtaaatacggcttctatacacatgtatttcggcttaagaagtggattcagaaggtgattgatcagttcggcgag

SEQ ID NO: 8607 - DNA, 1866 bp, synthetic construct
  misc_feature 1..1866: note = source = /note="Description of Artificial Sequence: Synthetic coding sequence"
  source 1..1866: mol_type = other DNA
atggcgcacgtgagaggactgcagctgccaggatgcttggccctggcggcgctgtgtagcttggtgcactcccagcacgtctttctggccccacagcaagcgaggtccctgttgcagcgcgtcagacgcgccaatactttcctggaagaagttaggaaaggaaacttggaacgggagtgcgtggaggaaacgtgcagctatgaggaagcgttcgaagcgctggagtcgtccaccgccaccgatgttttttgggctaagtacaccgcatgtgagacggccagaactccacgggacaaactcgcggcctgtctcgaaggcaactgcgcggagggactgggaaccaattaccgcggacatgtgaacatcactcgctcgggcattgagtgccagctgtggcggtcgcgttacccgcataaaccagaaatcaactcgactacccacccaggagcagacctccaggagaacttctgtcggaacccggacagctcgaccaccgggccgtggtgctacacgaccgacccgaccgtgcggagacaggaatgcagtatccctgtgtgcggacaggaccaagtgactgtggccatgaccccgagatccgaaggatcatctgtcaatctgagcccgccgcttgaacaatgtgtgccggatcggggacagcaataccaagggaggctggcggtcacgacgcatgggctgccttgcctcgcctgggcatctgcacaggccaaggcgctgtcgaagcaccaggacttcaactccgctgtgcagttggtggagaacttttgtaggaacccggacggggatgaagaaggagtctggtgctacgttgcgggcaagcctggagactttggctattgcgacttgaattactgcgaggaggctgttgaagaagaaactggagatggcctggatgaggacagcgaccgcgcgattgaaggacggaccgctacttccgaataccagacgttctttaacccgcggacctttggcagcggagaggcggattgtgggctgcgccccctgttcgagaagaaatccttggaggataagactgaaagagagctgcttgaatcatacatcgacggaagaattgtcgagggctcggatgccgagatcggtatgtccccgtggcaagtgatgctgttcaggaagtccccacaggagttgctctgcggagcctcgctgatctcggacagatgggtcttgaccgcagcgcattgcctgctctaccctccgtgggacaaaaacttcactgaaaatgatctgctcgtgcgcatcggtaaacactcccgcactcggtacgagaggaacatcgagaaaatctccatgctcgaaaagatctacatccacccgcggtataactggcgcgaaaatctggaccgcgacatcgcgctcatgaaacttaagaagcctgtggccttctccgactacatacatcccgtatgcctgcccgatcgagaaacggccgcttcgcttttgcaggcgggatacaaggggcgggtcactgggtggggaaacctgaaagagacgtggaccgcgaacgttgggaaaggacagccgtcagtcctgcaagtggtgaaccttccgatcgtggagcgccccgtgtgcaaggactccacccgcatccgcattactgataacatgttctgtgccgggtacaagccagatgaggggaaaaggggtgatgcttgtgaaggagactcaggaggtccgtttgtgatgaagtcgccgttcaacaatcgctggtaccaaatgggtatcgtctcctggggagaaggctgcgaccgcgatggcaaatacggtttctacacccatgtgttccgcctgaagaaatggatccaaaaggtgatcgaccagttcggagaa

SEQ ID NO: 8608 - DNA, 1866 bp, synthetic construct
  misc_feature 1..1866: note = source = /note="Description of Artificial Sequence: Synthetic coding sequence"
  source 1..1866: mol_type = other DNA
atggctcacgtgagggggctccagctgcccggatgcctggccttggcagcactgtgctcgctggtacactcacagcatgttttcctagctccccagcaggccaggtccctcctccagcgggtgcgccgcgctaatactttcctcgaagaagttcgcaaagggaacctcgagagagaatgcgtggaagaaacatgctcatatgaagaagccttcgaagcccttgagtcatccacagctactgacgtattctgggcaaaatatacagcatgcgaaacagcccggactccccgggataaactggccgcctgtctggaagggaattgtgctgaaggactagggacaaattatcgaggacacgtaaatatcacacggtctgggatagaatgtcagctctggcggtcacgctatccacacaaaccggaaatcaactccacaacacacccaggggcggatcttcaggagaacttttgtcggaaccctgatagttctacaactgggccatggtgttacactacagatcctacagttcgacgacaggagtgttctattcccgtttgtggacaggaccaggtcacagtggctatgactccccggtccgaagggagttccgttaatctctcgccaccccttgaacagtgtgtgcctgatagaggacagcagtatcaggggagactggccgtgactacacatggattgccatgtttagcctgggccagtgcccaggccaaagcacttagtaaacaccaagatttcaactcagccgttcagttagtcgaaaatttctgccgaaatccagatggagatgaagagggagtttggtgttacgtggctggaaaaccaggagattttgggtattgtgatcttaactattgcgaggaagctgttgaagaagagactggagatgggctggatgaagactccgatagagccatcgaagggagaacagctacatctgagtatcagactttcttcaaccctaggacattcggatctggggaagcagattgtggattgaggccactctttgaaaagaaatctcttgaagataaaacagaaagagaacttctggaatcttatatcgacgggagaatagtagaaggatctgatgcagaaatcgggatgtccccttggcaggtcatgctgtttaggaaatctccccaggaactactctgtggagcttctctcattagtgatcggtgggtcctaactgccgctcattgtctactctaccccccctgggataaaaatttcacggaaaacgatcttttggtccggatagggaagcacagtcgcacacggtacgagcggaatatcgagaaaatttcaatgcttgagaagatatatattcatcccaggtataactggagggaaaacctcgatcgagatatagctcttatgaaactaaaaaaacctgtggcctttagtgattacatacaccccgtgtgtctacccgatagggaaactgccgcgtccctattacaggccggatataaagggcgggtaactggatggggaaacctaaaagagacttggacggcaaacgtggggaaagggcagccaagtgtgctccaagtggtcaatctgcctattgtcgaaaggcctgtgtgtaaagattctacaaggattagaataactgataatatgttttgtgcgggatacaagcctgatgaggggaaacggggagatgcttgcgaaggggattccggagggccttttgtaatgaaaagtccattcaacaataggtggtatcaaatggggattgtttcatggggagaaggatgcgaccgggatgggaaatatgggttctacacacacgtttttcggcttaaaaagtggatacagaaggtgatagatcagttcggagaa

SEQ ID NO: 8609 - DNA, 1866 bp, synthetic construct
  misc_feature 1..1866: note = source = /note="Description of Artificial Sequence: Synthetic coding sequence"
  source 1..1866: mol_type = other DNA
atggcgcacgtgcgaggtcttcagctgcccgggtgcttagcactagcggccctttgctcattggtgcacagtcagcacgtgtttcttgccccccagcaggcacgttccctgttgcagagggtgagaagagctaacactttcctggaggaggtacggaaaggaaaccttgagcgggaatgtgtggaggagacctgtagttacgaggaggcattcgaggccctggagtccagtaccgccacagacgtcttttgggcaaaatataccgcatgcgagactgcgcggactcctcgcgataagctggccgcttgtttggaaggtaactgtgccgaggggctaggaaccaattatcgtggacacgtgaacattactcggtcgggcattgagtgtcagttatggagaagtcgctacccacacaaacccgagattaacagtacaacccaccccggcgcggatttacaggaaaacttctgccgcaaccccgactcctccacaactggtccttggtgttataccacggatccaaccgtcaggcggcaagagtgctcaattcctgtgtgcggccaagaccaggttaccgtcgcaatgactccgcggtccgagggctcctccgtgaacttgtcacccccactcgagcagtgcgtgcccgaccgcgggcaacagtaccagggtcgtctcgctgtcacgactcacggcctaccatgtctggcatgggctagcgcccaggccaaggcattgtctaaacatcaggattttaattcggcagtccagttggttgaaaatttctgtagaaatcccgatggcgatgaggaaggggtgtggtgctacgtggcaggaaaaccgggcgacttcgggtattgcgatcttaactattgcgaagaggccgtggaggaagagactggggacggacttgacgaagactccgacagggctatagaaggccgcacagcaacgagcgaatatcagacattcttcaatccgagaacgttcggctctggcgaggccgattgcggccttcgcccattgtttgaaaaaaagtcgctggaagataaaaccgagcgggagctgctggagtcatatattgacggaaggatcgtcgagggcagcgatgcggagataggaatgtccccctggcaggtcatgctgttccggaagagcccacaggaactcttatgcggtgccagtcttatatctgataggtgggtgcttacggccgcccactgtctcctataccccccctgggacaaaaactttacagagaatgatctgttggtgagaatcggcaaacattcgcggacgagatacgagcgcaacatcgagaaaatctctatgctcgaaaaaatttatattcatccaaggtacaattggagagaaaatttagacagggatattgcattgatgaaactcaagaaacccgtcgctttttcagattatattcatccagtctgtctgcctgaccgtgagaccgcggcaagccttttgcaggccggctataagggccgagtgaccggctgggggaacctgaaagaaacttggacagctaatgtgggaaaggggcagccttcggtacttcaggtcgttaacttgccaatagtcgagaggcccgtgtgcaaggactccactaggatcaggatcacagacaatatgttctgtgcaggatataagccagatgagggcaagcggggagacgcatgtgagggggattctggcggacctttcgtgatgaaatcgccgtttaataaccggtggtatcagatgggcattgtctcatggggggagggctgcgacagagatggaaagtacggcttctatactcatgtgtttaggctgaaaaagtggatccagaaggtgattgaccagtttggagag

SEQ ID NO: 8610 - DNA, 1866 bp, synthetic construct
  misc_feature 1..1866: note = source = /note="Description of Artificial Sequence: Synthetic coding sequence"
  source 1..1866: mol_type = other DNA
atggcacatgtgagaggactccaactcccgggatgcctggctcttgccgcactgtgcagcctcgtgcattcacaacatgtgtttcttgcaccccaacaggcacgttcgctgcttcaacgggtgcgcagggccaacacgttccttgaagaggttcgcaagggaaacctggaacgagaatgtgtggaggaaacctgttcgtacgaagaagcgtttgaagctctggaatcctccaccgccacggatgtcttttgggcaaaatacactgcatgcgaaactgcccgtacgccacgggataagctcgcagcgtgtctggagggtaattgtgccgagggtctgggtacgaactacagaggacatgtcaacattacccgttcgggcatcgaatgtcaactgtggcgctctcgttacccgcataagcccgagatcaactccacgactcatccaggggcagaccttcaagagaacttttgtcggaacccggattcctcgaccactggtccttggtgttacaccactgatcctactgtgaggaggcaggagtgctccattcctgtgtgtggacaggaccaggtgaccgtcgctatgacccctaggtccgaaggatccagcgtgaacttgtcgccgcccctggagcaatgcgtgcctgatcggggccagcaatatcaaggacgactcgcggtgaccactcatgggctcccttgtctggcctgggcatcggcacaagcaaaggccctttctaaacatcaagatttcaattctgcagttcagctggtcgagaacttctgtagaaaccccgatggtgatgaggaaggtgtgtggtgctacgtcgcgggtaagcctggcgactttgggtactgcgaccttaactactgtgaagaggcagtcgaggaggaaacgggggatggccttgatgaggactcggaccgagcaatcgaaggacgaactgcaaccagcgaataccagactttctttaacccacgtactttcggcagcggagaggctgactgtggtcttagacccctcttcgagaaaaagtcgctggaagataagactgagcgcgaacttttggaaagctacatcgatgggaggattgttgaaggatccgatgcagaaattggtatgtctccgtggcaggtgatgcttttccgaaagtcaccacaggaacttctttgcggcgcgagcttgatatcggatagatgggtgctcaccgcagcccactgcttgctctatcccccttgggataagaatttcaccgaaaatgacctgttggtcagaatcggaaagcactctaggacccggtacgaacggaacattgaaaagatatcgatgctcgaaaagatctacattcaccctaggtacaactggcgtgaaaacctggatagagacatcgcgcttatgaaacttaagaagcctgtggcgttttcagactacattcatccggtgtgtctcccggatagagaaaccgccgcctcactgctccaagcgggttacaaagggagagtgactggatggggaaatcttaaggaaacctggactgcaaacgtcggaaagggacagccttcggtgctgcaagtcgtcaaccttcctatcgtcgaaagacccgtgtgtaaagactccactaggattagaattacggacaacatgttttgtgcgggctataaacctgatgaaggtaagcgcggcgatgcatgtgaaggtgattcgggaggcccttttgtgatgaaatcaccattcaacaatcgctggtaccaaatgggaattgtgagctggggtgagggatgcgacagagacgggaaatacggtttttacacccacgtctttcgtctgaagaagtggattcagaaagtgatagatcagtttggcgaa

SEQ ID NO: 8611 - DNA, 1866 bp, synthetic construct
  misc_feature 1..1866: note = source = /note="Description of Artificial Sequence: Synthetic coding sequence"
  source 1..1866: mol_type = other DNA
atggcccatgtccgaggacttcagctgcctggatgtcttgccctggcagcgctgtgctccttggtgcactcccagcatgtgtttctcgcacctcagcaagcaagatcactccttcagcgcgtgcggcgcgccaacacctttctggaggaagtgcggaaggggaacctggagcgcgaatgcgtggaggaaacgtgttcgtacgaggaagcattcgaggcccttgaatcctcgactgcgaccgacgtgttctgggcaaagtataccgcatgcgaaaccgcccggacccccagagataagctggcggcctgcctggagggcaattgtgcagaaggtctgggaaccaactaccggggtcatgtcaacatcaccagaagcgggattgaatgtcaactgtggagatcccgctaccctcataaacctgagattaactcaacgacccacccgggtgccgatcttcaggaaaacttttgcagaaatccagatagctccacgaccggaccgtggtgttacaccaccgacccaaccgtgcggagacaagagtgttcaattcctgtctgtgggcaggaccaagtgaccgtggccatgacgcctcgatccgagggctcgtcggtgaacctgtcgccaccgctcgaacagtgtgtgccagatcggggacagcaataccaaggtcgtctggctgtgacgacccatgggcttccatgccttgcatgggcaagcgctcaggcaaaggcactttcaaagcaccaagactttaactcggcggtgcagctcgtcgagaacttttgtcgcaatcctgacggcgatgaagaaggggtgtggtgttacgtggcaggcaagcccggtgactttggatactgtgatctcaactactgtgaagaagcagtcgaagaagaaaccggtgatggactggatgaagattcagaccgcgcgatcgagggcaggaccgctaccagcgaataccaaaccttctttaacccacgtaccttcggatccggcgaggcggattgtggacttagacccctttttgaaaagaagtccctggaagataagacggaaagggaacttttggaaagctacatcgatggtcgtattgtggagggatccgacgctgagatcggaatgtcaccatggcaggtgatgctttttagaaaatccccccaagaacttctttgtggagccagccttatttcagaccgctgggtactcactgccgcacactgtttgctttaccccccttgggataagaactttactgaaaacgatcttcttgtccgtattggaaagcattcaaggaccaggtatgaacggaacatcgaaaagatatccatgctggaaaagatttacatccatcctagatacaattggagggagaacttggatcgcgacattgcactgatgaaattgaagaagcccgtggctttctccgactacatccatcccgtatgcctgcctgatcgcgagacggccgcatccctcctgcaagcgggttacaagggccgcgtcactggctggggtaaccttaaggaaacttggactgccaatgtgggaaagggccaaccatcggtgcttcaagtcgtgaaccttcccatcgtcgagcggccagtgtgtaaggactcaaccagaattcgaattaccgataacatgttctgcgcaggttacaagccagatgaaggaaagcgaggagatgcatgtgaaggggattcggggggaccttttgtgatgaagtcgcctttcaacaaccgttggtaccagatgggaattgtgagctggggcgaggggtgcgacagagatgggaaatacggattttacactcatgtctttagactgaagaagtggattcaaaaagtgatcgaccagtttggagaa

SEQ ID NO: 8612 - DNA, 1866 bp, synthetic construct
  misc_feature 1..1866: note = source = /note="Description of Artificial Sequence: Synthetic coding sequence"
  source 1..1866: mol_type = other DNA
atggcccatgtccgaggcctgcagctgcccgggtgcctggcgctcgctgcactctgctcactggtccatagccaacacgtgttccttgctccccagcaggccagatccctccttcagcgcgtgaggagagccaatacttttttagaggaagtgaggaagggcaacctggagcgggaatgtgtggaggagacctgctcctacgaggaagctttcgaagccctcgaaagctcaacagccaccgatgtattttgggctaagtacacagcgtgcgaaactgcccgaacgccaagggataagcttgccgcctgtcttgaaggtaactgtgccgagggcctgggaacaaactaccgaggccatgtgaacatcaccagatccggcatcgagtgccaactctggcgaagcagatacccgcacaagccagagatcaactcaaccacacatcccggcgctgacctgcaggagaatttttgcagaaatcctgatagtagcaccacaggtccgtggtgttataccacagaccctacggttaggaggcaggagtgctctatcccagtttgtggtcaggatcaagtgaccgttgccatgacacctaggagcgaggggagctcagtcaacctcagccctcccctagaacaatgcgttcccgatagggggcagcagtaccaggggaggctggccgtgacaacccacggccttccttgcctggcatgggcctctgctcaggcgaaggcactaagcaagcaccaggactttaactccgccgtgcagctggtggagaatttctgtaggaaccccgacggggatgaggaaggtgtgtggtgttatgtcgccggcaaaccaggggatttcggctattgcgatctgaactattgtgaggaagcagtggaggaggaaactggagatgggctggatgaagattccgaccgagcaatcgagggaagaacagcaacctctgaataccaaaccttttttaatccccgaacctttgggtcaggggaggcagattgtggcctgaggccactgtttgaaaaaaaatccttggaggacaaaacagaaagggaactgctagagtcctacattgatggaaggatcgtggagggttcggatgccgagataggtatgtccccgtggcaggtaatgctctttagaaagtcgccacaggaactgctgtgtggggccagcctcattagcgacagatgggtgctcacagcagctcactgtctattataccctccttgggacaaaaatttcactgaaaacgatctgttggttagaataggaaagcactcccgcaccagatacgaacgtaacatcgagaagatttcgatgcttgagaagatttatatccatcccaggtacaactggcgtgaaaatctcgacagagatatcgcccttatgaagctgaaaaagcctgtggccttctctgactacattcatcctgtttgcttgcccgacagagaaactgccgcttcactgttacaggcgggctacaagggcagagtgaccgggtgggggaatttaaaggagacatggacagcgaatgttggcaagggtcagcccagtgtgctccaggttgtgaatcttccaatcgtggaacgacctgtctgcaaagacagtaccagaatcagaatcacggacaacatgttttgcgcagggtataaaccagacgaaggtaaacgaggtgacgcttgtgagggcgacagtggtggcccatttgtgatgaagagcccgtttaataaccgatggtatcagatgggcatcgtcagctggggcgagggatgtgatagagatggcaagtatggattttacacccacgtgtttcgcctgaaaaaatggattcaaaaggtaattgaccaattcggagaa

SEQ ID NO: 8613 - DNA, 1866 bp, synthetic construct
  misc_feature 1..1866: note = source = /note="Description of Artificial Sequence: Synthetic coding sequence"
  source 1..1866: mol_type = other DNA
atggcgcatgtacgaggtttacaattaccgggttgtctagcgctagcggcgttatgttcgttagtacattcgcaacatgtatttctagcgccgcaacaagcgcgatcgttattacaacgtgttcgacgagcgaatacgtttttagaagaagtacgtaaaggtaatttagaacgagaatgtgtagaagaaacgtgttcgtatgaagaagcgtttgaagcgctagaatcgtcgacggcgacggatgttttttgggcgaaatatacggcgtgtgaaacggcgcgtacgccgcgagataaactagcggcgtgtttagaaggtaattgtgcggaaggtttaggtacgaattatcgtggtcatgttaatataacgcgttcgggtatagaatgtcaattatggcgttcgcgttatccgcataaaccggaaataaattcgacgacgcatccgggtgcggatctacaagaaaatttttgtcgaaatccggattcgtcgacgacgggtccgtggtgttatacgacggatccgacggtacgacgtcaagaatgttcgataccggtatgtggtcaagatcaagtaacggtagcgatgacgccgcgatcggaaggttcgtcggtaaatttatcgccgccgttagaacaatgtgtaccggatcgaggtcaacaatatcaaggtcgtttagcggttacgacgcatggtctaccgtgtctagcgtgggcgtcggcgcaagcgaaagcgttatcgaaacatcaagattttaattcggcggttcaactagtagaaaatttttgtcgaaatccggatggtgatgaagaaggtgtttggtgttatgtagcgggtaaaccgggtgattttggttattgtgatttaaattattgtgaagaagcggttgaagaagaaacgggtgatggtctagatgaagattcggatcgagcgatagaaggtcgaacggcgacgtcggaatatcaaacgttttttaatccgcgaacgtttggttcgggtgaagcggattgtggtttacgaccgttatttgaaaaaaaatcgctagaagataaaacggaacgtgaattactagaatcgtatatagatggtcgtatagttgaaggttcggatgcggaaataggtatgtcgccgtggcaagttatgctatttcgaaaatcgccgcaagaattattatgtggtgcgtcgctaatatcggatcgttgggtattaacggcggcgcattgtctattatatccgccgtgggataaaaattttacggaaaatgatttattagtacgaataggtaaacattcgcgaacgcgttatgaacgtaatatagaaaaaatatcgatgctagaaaaaatatatatacatccgcgatataattggcgagaaaatttagatcgtgatatagcgttaatgaaactaaaaaaaccggtagcgttttcggattatatacatccggtatgtttaccggatcgtgaaacggcggcgtcgctattacaagcgggttataaaggtcgtgtaacgggttggggtaatctaaaagaaacgtggacggcgaatgtaggtaaaggtcaaccgtcggttctacaagttgtaaatttaccgatagtagaacgaccggtttgtaaagattcgacgcgtatacgtataacggataatatgttttgtgcgggttataaaccggatgaaggtaaacgtggtgatgcgtgtgaaggtgattcgggtggtccgtttgtaatgaaatcgccgtttaataatcgatggtatcaaatgggtatagtatcgtggggtgaaggttgtgatcgagatggtaaatatggtttttatacgcatgtttttcgtttaaaaaaatggatacaaaaagtaatagatcaatttggtgaa

SEQ ID NO: 8614 - DNA, 1866 bp, synthetic construct
  misc_feature 1..1866: note = source = /note="Description of Artificial Sequence: Synthetic coding sequence"
  source 1..1866: mol_type = other DNA
atggctcatgtcagaggactacagctgccaggctgcttagcgttagctgccctgtgctcactggtccactcacagcatgtcttccttgccccccaacaagctagaagcctgctccaacgggtccggcgggcaaataccttcctggaggaggtgcgcaagggtaacctggaaagggagtgtgtggaagaaacttgttcttatgaggaagctttcgaagctctggaatccagcactgcaacagacgtgttttgggcaaaatacacagcgtgtgagacagctcgcaccccgagagataaactggccgcttgtctagagggaaactgtgccgaaggcctgggcacaaattatcggggtcacgttaacataacaaggtctggcatcgagtgccagctgtggcgtagtaggtatccacacaaaccagaaatcaactccacaacccatcccggggccgatctccaagagaatttctgtcggaaccccgacagcagcacaacaggtccctggtgttatacgaccgatcctactgtgagaagacaggagtgctcgatccccgtgtgcgggcaggatcaggtgactgtcgccatgacaccgaggagtgaggggagtagcgtgaacctgtctccccccttggaacaatgtgtcccagaccgtggccaacaataccagggcagactggcagtgaccacccacggcctgccctgcctggcctgggcatctgcgcaggcgaaagcgctgtccaagcatcaggactttaatagcgctgtgcagctggtggagaacttctgtcgtaaccctgacggcgatgaggagggagtgtggtgctacgtggcaggtaagccaggtgacttcggttattgcgatttgaactattgtgaagaggccgtcgaagaagagaccggtgacggactggatgaagacagtgatcgggccattgaagggagaacggctacgagcgagtatcagactttttttaatcccaggacatttggctccggggaagccgactgtggactgcgccccctcttcgagaagaagtcattggaagacaagaccgagagagagctgcttgagtcctacattgacggccggatcgttgaggggtctgacgcagagatcggcatgagtccctggcaggtcatgctgtttagaaagtcaccacaagaactcctgtgtggagccagcctaatttcggatcgctgggtccttaccgccgcacactgtctactttaccccccatgggataagaacttcactgaaaatgatctcctagtaagaataggaaaacattcccgtactcgctacgaaagaaacatcgagaaaatatcaatgctggagaagatctatattcatcctcgctacaattggcgtgagaacctggaccgggacattgcgctgatgaaactgaagaaacctgtagccttctctgactatatccacccagtctgcctgcctgaccgggagaccgccgcaagcctcctccaggcaggctataaaggtcgggtgaccggctggggtaacctgaaggagacctggacagccaacgtgggcaaggggcagccctcagtgctgcaggtcgttaatttgcctattgtggaaagacctgtgtgtaaggattccaccagaattaggattacagacaatatgttctgtgccggctacaaaccagacgaaggtaaaaggggcgatgcatgcgagggggactctggaggcccctttgtcatgaagtcgcccttcaataataggtggtaccagatggggattgtgtcatggggcgagggctgcgacagggacggcaaatacggattctacacgcacgtcttccgactgaaaaagtggatccagaaggtgatagaccagttcggggag

SEQ ID NO: 8615 - DNA, 1866 bp, synthetic construct
  misc_feature 1..1866: note = source = /note="Description of Artificial Sequence: Synthetic coding sequence"
  source 1..1866: mol_type = other DNA
atggcccacgtgagaggactgcaactgccagggtgcctggcactggctgcactctgctccctcgtgcactcgcagcacgtgttcctggcaccgcagcaggcacggtcgctcctccagagagtgcggagggccaacacctttctggaggaagtgaggaagggaaacctggaaagagaatgcgtggaggagacttgcagctacgaagaggcgttcgaggccctggagtcgtcgacggccaccgacgttttttgggctaaatacaccgcgtgcgagactgctcgcaccccacgcgacaagctggcagcttgcctggagggcaattgcgctgaagggctcggcacgaactaccgcggtcacgtcaatatcacccggtcgggcatcgagtgtcagctgtggcgatcccggtaccctcataagccggagatcaattctacgacccacccgggcgcggatcttcaggagaacttctgccggaaccccgactcatcgaccactggaccgtggtgctacaccactgacccgacggtgcgcagacaagaatgctccatcccggtgtgcggccaggaccaggtgactgtggccatgactccaagatcagaagggtcgtccgtgaacttgtcacccccacttgaacaatgcgtgccggatcgcggacagcaatatcaaggtagactcgccgtgaccactcatggactgccgtgcctcgcttgggcgtctgcgcaagcgaaagcactgtccaagcatcaagacttcaacagcgccgtccagctggtggaaaacttttgtcgaaaccctgatggggacgaagaaggagtgtggtgctacgtggccggaaagcctggtgacttcggatactgtgacttgaactactgcgaagaggccgttgaggaggaaactggagatggactcgatgaggactcagatcgggcaatcgagggacgaaccgccacctctgagtatcaaaccttcttcaaccccaggaccttcggctccggagaagccgattgcggcttgcgccctttgttcgagaaaaagagcctcgaagataaaactgaacgcgaattgcttgaaagttacatcgacggtcgcatagtggaaggaagcgacgcagagattggcatgagcccatggcaagtcatgctcttccggaagtccccccaggagttgttgtgtggagcatcgctgatctcagacagatgggttctcaccgccgcccactgcctgctgtaccccccttgggacaagaacttcacggaaaatgatctcctggtcaggattggaaagcacagccggacccgctacgaacgaaacatcgagaagatcagcatgttggagaagatatacatacacccgcgttacaattggagggaaaatctggatcgcgatatcgccctgatgaagctgaagaagccggtggctttctcggactacatccatccggtttgcctccctgacagagaaaccgcagcgagcctccttcaagccggctacaaaggaagggtgactgggtggggtaacctcaaggaaacctggactgctaacgtgggaaagggacagccgtcggtgctccaagtggtcaatcttccaatcgtggaaagaccagtctgcaaggactcgacccgcatccgcatcactgacaatatgttctgcgccggctataagccagacgaaggaaagcgcggagatgcttgtgagggggactcaggagggccattcgtgatgaaaagcccgttcaacaatcgctggtaccagatgggtattgtgtcttggggcgaaggctgcgaccgggacggaaagtacggcttctacacccatgtgttccgcctgaagaagtggatccagaaggtgatcgatcaatttggtgaa

SEQ ID NO: 8616 - DNA, 1866 bp, synthetic construct
  misc_feature 1..1866: note = source = /note="Description of Artificial Sequence: Synthetic coding sequence"
  source 1..1866: mol_type = other DNA
atggctcatgtgcgaggactccagcttccgggatgcctcgctctggctgccttgtgcagtctcgtgcactcgcagcatgtctttctggccccacaacaggcgcgttcgctgctgcaaagggtacggcgagccaacaccttcctggaggaagtccgcaagggaaaccttgaacgggaatgcgtggaagaaacctgcagctacgaagaggcgttcgaggcccttgaatccagcactgccacggacgtgttctgggccaagtacactgcatgcgaaaccgcccggactccccgggataagttggccgcctgtctggaaggaaattgcgctgaaggtctgggaactaactatcgggggcatgtcaatatcacccgctcgggaatagaatgccagctctggagaagccggtaccctcacaagccggaaatcaatagtaccactcacccgggggcagacctgcaggagaacttctgccggaaccctgacagctcaaccactggtccatggtgctacactactgatccgaccgtgcggaggcaggaatgctcaatccccgtgtgcgggcaggaccaagtcaccgtggcgatgaccccaaggtcagaaggctcgagcgttaacctctcgcctccactggagcagtgtgtgcctgatcgcggccagcaataccagggccgcctggcggtcaccacgcacggcctcccgtgtctggcatgggcaagcgcccaagcaaaagctctttctaaacatcaagacttcaattcggcggtgcagctggtggaaaacttttgccgcaaccctgacggcgatgaagaaggtgtatggtgctatgtggccgggaagccgggcgactttggctactgcgatctcaactactgtgaggaggcagtggaagaggagactggagacggtctggacgaggacagcgatcgggcgatagagggacgcactgccacgtctgaataccagactttcttcaacccgaggaccttcggctctggtgaagcggactgtgggcttcggccgctcttcgagaaaaagtcactcgaggataaaacggagagagaactgcttgagtcctacattgacggacgcatcgtggaagggtccgacgccgaaatcggcatgtctccttggcaggtgatgctgtttcggaaatccccacaggaactgttgtgcggcgcttccctgatttcagatcgctgggtgttgacggccgcgcactgccttctgtaccctccatgggacaagaatttcactgagaacgacctgctggtccgtatcggaaagcactcaaggaccaggtacgagaggaatatcgaaaagatctcgatgctggaaaagatctacatccacccgcgctacaactggcgcgagaacttggatcgcgatatcgcactcatgaaactgaagaagccggtggcattctcggattacatccatcccgtctgtctgccagatcgagaaaccgcggcgtcgctgctccaggcaggatacaaaggccgcgtgaccggatgggggaacctgaaagagacttggacggcgaatgtcggaaagggccagccgtccgtgctgcaggtcgtcaatctccccatcgtggaacggccggtgtgcaaggattccacccggatcagaatcaccgacaacatgttttgcgcgggatacaagcctgatgagggaaagcgcggagatgcgtgtgagggagactcgggtggaccattcgtgatgaagtcccccttcaataacagatggtaccaaatgggcatcgtctcatggggagagggttgcgaccgggacggtaagtacggattttacacccacgtgtttaggttgaaaaagtggatccaaaaagttattgaccaattcggagaa

SEQ ID NO: 8617 - DNA, 1866 bp, synthetic construct; identical to SEQ ID NO: 8614
  misc_feature 1..1866: note = source = /note="Description of Artificial Sequence: Synthetic coding sequence"
  source 1..1866: mol_type = other DNA

SEQ ID NO: 8618 - DNA, 1866 bp, synthetic construct
  misc_feature 1..1866: note = source = /note="Description of Artificial Sequence: Synthetic coding sequence"
  source 1..1866: mol_type = other DNA
atggcccacgtgcggggactgcagctgccaggatgcctggcacttgccgcactgtgttccctggtgcattcacagcatgtgttcctggcacctcagcaggcaagatcgctcctgcaacgcgtgcgcagagccaacacgttcctggaggaagtgcggaagggaaatctggaacgggaatgtgtcgaggagacttgctcatacgaagaagcctttgaagcactcgaaagctccaccgccaccgacgtgttctgggctaagtacaccgcgtgcgagactgcccggacccctcgggacaaactggccgcgtgtctggagggaaactgtgcagaaggactgggtaccaattaccggggccatgtcaatatcacccggtcaggaatcgagtgtcaactttggagatctcgctacccgcacaaaccagaaatcaactcgactacccaccctggcgccgatctgcaggaaaatttctgtcgcaatccggattcctccaccaccggaccgtggtgctacacgaccgaccctactgtgcgccgccaagaatgctctatcccggtctgcggacaggatcaagtgactgtggccatgactccacggtcggagggaagctccgtcaacctgtcacctccactggaacagtgtgtgcccgaccgcggacagcagtaccaagggcgcctggctgtgaccacccacggcctcccttgtttggcctgggcgtctgctcaggctaaggctttgagcaagcaccaagacttcaactccgccgtgcagctcgtggagaacttctgccgcaatcccgatggagatgaggaaggggtgtggtgctatgtggcgggtaagccaggtgacttcggctactgcgatctcaattactgcgaagaagctgtggaggaagaaaccggcgacgggctggacgaagactcggacagagctattgaaggacggactgccacttcggaataccagactttcttcaatcctcgcaccttcggctccggagaagcggattgcggcctgcggccgctctttgaaaagaaatcactggaggataagaccgaacgggaactgcttgaatcgtatatcgacgggagaatcgtcgagggttcggacgcagagatcggcatgtcgccgtggcaggtgatgctgtttcggaaatcaccgcaggaactgctctgtggtgcgtccctcattagcgaccggtgggtgcttaccgcggcacactgcctgctttaccccccatgggacaagaacttcacggagaacgacttgctggtccgcatcggtaaacactcccgcaccaggtacgagcggaacatcgagaagatctccatgctggaaaagatatacatccatccaagatacaactggagagagaatctcgatagggacattgctcttatgaagctgaagaagccagtggccttcagcgattatatccatcccgtgtgtttgccggacagagagactgccgcgtcgctcctccaggccgggtacaagggaagagtaactggatggggaaacctgaaagaaacttggactgctaatgttggaaaagggcagccttccgtcctgcaggtggtgaatctgccgatcgtggaaagacccgtgtgcaaagactcaactcgcatcaggatcactgacaacatgttctgcgccggttacaagccggacgagggaaagaggggagacgcgtgtgaaggagacagcggtggaccattcgtgatgaaatcacctttcaataacagatggtaccaaatgggaatcgtgtcttggggagagggatgcgatagggatggaaagtacgggttttacactcatgtgttccgcctcaagaagtggattcagaaagtcatcgaccagttcggagag

SEQ ID NO: 8619 - DNA, 1866 bp, synthetic construct
  misc_feature 1..1866: note = source = /note="Description of Artificial Sequence: Synthetic coding sequence"
  source 1..1866: mol_type = other DNA
atggcacacgttagagggctgcagttgccaggatgtttagctcttgccgctctgtgctccttagtccattcccagcatgtgtttcttgcccctcagcaagccagatcattgttacaacgtgtgagaagggcaaatacctttcttgaggaagtgaggaagggaaacttggaacgggagtgtgtggaggaaacatgcagttacgaggaggccttcgaggccctggaaagctctactgccacagatgtgttttgggccaagtataccgcttgtgaaacagcacgcactccaagggacaaattggctgcctgcttggaggggaattgcgcggagggcttgggcacgaattatcgagggcacgttaatatcactcgcagcggtatcgaatgtcagctctggagatccaggtatccccataagcccgagatcaacagtaccacacaccctggggctgatctccaggaaaatttctgcagaaaccccgacagctccacaacaggaccatggtgttatactacagaccccactgttcgcagacaggagtgttctatccctgtgtgtggtcaggatcaggttactgtagctatgaccccaagatctgagggatcaagcgtcaacctgtccccgcccctggagcagtgtgtgccggaccggggacagcagtaccagggacgcctggcggttacaacccatggcctgccgtgtctggcctgggcgtcggcccaggccaaggccttaagcaagcatcaggactttaatagtgcagtccagcttgttgagaacttttgtaggaatcctgacggcgacgaggagggggtctggtgttatgttgccggaaagcctggggactttgggtactgcgacctgaactactgtgaagaagccgtcgaggaggagactggagatggtctcgatgaagactcggatcgggccatcgagggccggaccgctacttcagagtatcagactttctttaacccaaggacatttggaagtggcgaggcggactgcggacttcgccccctgtttgaaaagaaatctctggaggacaagacggagcgggagctacttgaatcatacatcgatggcaggattgtggaggggtccgatgccgaaattggaatgtctccctggcaggtgatgttgtttagaaaatccccccaggagctcctgtgcggagcctcactaatttcagatcggtgggtgcttactgccgctcactgcctgctgtatcctccatgggacaaaaactttactgaaaatgatctcctggtacggattggtaagcacagccggacccggtatgagcggaacattgagaaaatcagtatgctcgagaaaatatatattcaccctcgttacaattggagagagaacttggacagagacatagccttgatgaaattgaaaaaacccgtcgcattttccgattatatacacccagtgtgtctgcccgacagggaaacagctgcttccctgctgcaggccggatataaaggccgcgtcaccgggtggggcaacctcaaagagacatggacagccaatgtaggcaagggccagcccagtgtattacaggttgtcaatcttccaatcgtcgagagacccgtgtgcaaggatagcacccggattaggatcacagacaatatgttttgtgccggctacaagcctgatgaaggcaagaggggcgacgcgtgcgagggagactccggcggaccctttgtgatgaagagccctttcaataaccgctggtaccagatggggattgttagctggggggaaggctgtgatcgggacgggaagtacggattttatacacatgtgttcaggctcaagaaatggatacaaaaggtgattgaccaattcggtgag

SEQ ID NO: 8620 - DNA, 1866 bp, synthetic construct
  misc_feature 1..1866: note = source = /note="Description of Artificial Sequence: Synthetic coding sequence"
  source 1..1866: mol_type = other DNA
atggcccatgtgcgcggcctgcagcttcccggttgcctcgcactggccgccctctgctctctcgtacactcgcaacatgttttcctcgcaccacagcaagccaggtcgctgcttcagagggtgcgcagggccaacaccttcctagaggaggtgcggaagggcaacctggagcgggaatgcgtcgaggaaacatgtagctacgaagaggcatttgaggctctggagtctagcaccgctactgacgtattttgggctaaatataccgcgtgtgaaactgcccggacgccacgcgataagctggcggcctgcctggagggaaattgtgcggagggcctgggtacaaactatcggggacacgtcaatataacccggagcggtatagagtgccagttgtggcggagcaggtacccgcataagcctgagattaatagtactacgcacccgggggccgatttgcaggagaacttctgccgcaacccggattcgagcacaaccggcccgtggtgctacaccaccgaccccacagtacggcgccaggagtgcagcatcccggtgtgcggtcaggaccaggtgaccgttgccatgaccccccgcagcgaaggaagctcggtgaatctatccccccccctcgagcagtgtgtccctgatcgaggccagcagtatcagggacggttggcggtgactacccacggcttgccctgcctggcctgggccagcgcgcaggcaaaggccctctccaagcaccaggatttcaattcggcggtccagcttgtggagaacttctgcaggaaccccgatggagacgaggagggcgtgtggtgctacgtggcgggcaagcctggcgatttcggatattgcgatctcaactattgtgaggaagctgtggaagaggagaccggcgatggcctggatgaggattccgaccgcgcgatcgaggggcgaacagctacttccgagtaccagacgttttttaacccacgaacatttggttcaggcgaggccgactgcggattgcgccccctgtttgaaaagaagagcctggaagataaaacggagcgcgagctccttgagagctatatagatggacgaatagtggaggggtctgatgccgagatcggaatgtccccctggcaagtaatgctgttccgcaaatcaccacaagaactcctgtgcggcgcgtcgctgattagcgaccgttgggtcctcaccgcggcccactgcctactgtaccccccatgggacaagaattttacagagaatgatctgctagtgcgtataggtaaacattcgcgtacgcgatacgaacgtaatatcgagaagatttcaatgctggagaaaatctatatccatccaagatacaattggcgtgaaaatctcgacagggacatcgccctgatgaaactgaagaagcccgtcgcctttagtgattacatacatccggtctgcctaccagatcgggaaacggccgcgagcctgttgcaagccggctacaagggacgggttaccggctggggaaatctcaaagagacatggacggcgaatgtaggaaagggccagccctccgttctgcaggtagttaacctccccatagtcgaacggccggtatgcaaagatagtacgcgtatccgcatcacggataacatgttctgcgctggatacaagccagatgagggtaagcgaggcgacgcctgcgagggtgattctggtggaccattcgttatgaagagcccatttaacaaccgctggtatcagatgggcattgtgtcctggggcgagggctgtgatagagatggcaagtacggcttctacacccacgtgttccgcctgaagaagtggattcagaaggtaatagaccagtttggcgag

SEQ ID NO: 8621 - DNA, 1866 bp, synthetic construct
  misc_feature 1..1866: note = source = /note="Description of Artificial Sequence: Synthetic coding sequence"
  source 1..1866: mol_type = other DNA
atggcccatgtgaggggtttgcagctgccgggatgtctcgctcttgcagctctttgtagcctggtgcattcacagcacgtctttctggcaccgcagcaggcaaggagcctgttgcagcgggttcgcagagcaaatacctttctcgaggaagtccgcaaaggtaatctggaacgcgaatgtgtggaagagacttgttcgtacgaagaggcatttgaagccctggaatcctccacggcaaccgacgtcttttgggccaagtacaccgcgtgtgaaaccgcacggacgcctagggataagctggccgcgtgtcttgaaggaaactgtgcagagggactgggtaccaattacaggggtcatgtgaatatcactaggtcaggtattgagtgtcaactttggcgttcgcgttacccacataaacctgagattaacagcactacccatcccggggcagatctccaagagaacttttgtcggaaccctgattcaagcactaccggtccttggtgctacactaccgacccaaccgtgcgcagacaggaatgttccatccccgtgtgcggacaagatcaggtgactgtcgcaatgactcctcggagcgagggttccagcgtgaaccttagcccgcccctggaacaatgtgtgcccgatagaggacagcaataccagggccgcctcgctgtgactacccacggattgccatgtctcgcatgggcgtcggcccaagcaaaggccctgtcgaagcatcaagatttcaattccgcggtccaattggtggaaaacttttgtagaaatcccgatggagacgaagagggcgtgtggtgttacgtcgctggaaagcctggcgatttcgggtattgtgatctgaactactgtgaggaggcagtggaagaggagactggagatggattggatgaagattcggatagagcgatagagggtcgaaccgcaacctcagagtaccagacgttctttaaccctcgtacgtttggttccggcgaggcggattgtggactccggccgctttttgaaaagaagtcacttgaggataagactgagagggaactgcttgagtcctacatcgatggacggattgtggaagggtccgacgcggagatagggatgagtccttggcaagtgatgttgtttcgcaagtccccccaggaacttctttgcggagcttcgttgatttccgacagatgggtgctgactgcagcacattgtctgctctacccaccgtgggacaaaaacttcaccgagaatgaccttcttgtcagaatcgggaagcactcccggacccgatatgaaagaaacattgaaaagatctcgatgcttgaaaagatttacattcatccacgctacaattggcgcgagaacctggaccgagacatagcacttatgaagctgaaaaaacccgtggcgttttcggactacattcacccagtgtgtctccctgatcgtgaaaccgctgcatcactgctgcaagccggatacaaaggaagggtgaccggttggggaaatttgaaggaaacctggactgcaaacgtgggaaagggtcaaccgtcagtgctccaagttgtgaatctgccaatcgtggagcgcccagtgtgtaaagactcgaccagaattagaatcaccgataacatgttttgtgccggatacaagcctgacgaaggtaagaggggtgatgcatgtgaaggtgactccggtggtccattcgtcatgaagagcccttttaacaacagatggtatcaaatgggtattgtctcatggggcgagggttgcgatcgggatggcaagtacggtttttacactcatgtgttccggctcaagaagtggattcaaaaagtgatcgatcaatttggtgaa

SEQ ID NO: 8622 - DNA, 1866 bp, synthetic construct
  misc_feature 1..1866: note = source = /note="Description of Artificial Sequence: Synthetic coding sequence"
  source 1..1866: mol_type = other DNA
atggctcacgtccggggcctgcagcttcccgggtgtctcgcactcgctgcactgtgctcgctagttcattcccagcacgtttttctcgccccccagcaggcgaggtctctgctgcaacgagtccgaagggctaacacttttctagaggaagtaagaaaaggcaatcttgagcgcgaatgtgtcgaggaaacctgtagctatgaggaagcttttgaagctctggagtcgagtacggctacagatgtcttttgggccaaatacacagcctgcgagaccgcccgtaccccccgagacaagttggctgcgtgcctagaaggaaattgcgccgaggggttagggactaattatcgtggacacgtcaatatcacccgctccggtattgaatgccagctgtggagaagcagatatccgcacaaacccgagatcaactccaccacccaccccggcgcagacctccaggaaaatttttgtcgaaatccggatagttccaccacaggcccctggtgttataccaccgaccctaccgtgcgaaggcaggaatgttctattccagtctgcggacaggaccaggtaacagtcgctatgacccctaggtcagagggttcctctgttaatctctctcccccactcgaacagtgcgtgcccgatagggggcaacagtaccaggggcgcttggcagtgacaacccatgggcttccatgcctcgcctgggcatccgcccaagccaaggccttgtcaaagcatcaagacttcaactctgcagtacagcttgtggaaaacttttgcagaaatccagacggtgacgaagaaggtgtgtggtgctatgtggctggcaagccgggggatttcggatattgtgatctgaattactgcgaggaggcagtggaagaggagactggcgatggactagacgaggattcggatcgagccatagagggtcgaaccgctactagtgagtaccagacctttttcaatcctcgcacctttggctccggcgaggcagattgtgggctgaggccgctcttcgagaaaaagagcctggaggataagactgagagggaattgctggagtcctacatcgacgggcggatcgtggaaggctcagatgccgagatcggcatgtcaccctggcaggtcatgctgttcagaaaatccccccaggaacttttgtgcggtgcttccctaataagcgacaggtgggtgctgaccgcagctcactgcttgctttacccaccatgggataagaactttactgagaacgacttgctcgttcggattggtaagcatagccggacgagatatgagcggaacatcgaaaaaatcagcatgctagaaaaaatctatatccacccccgatacaactggcgagagaatctggaccgagacatcgccctcatgaaacttaaaaaacctgtggcgttttcagactatattcacccagtgtgtctccccgacagggaaaccgcagcgtctctgcttcaggcaggttacaaggggcgtgtcaccggctggggcaacttgaaggagacctggaccgcgaacgtgggtaagggtcaaccctctgtcctacaggtggtcaatctgccaattgttgaaaggcctgtctgtaaggattcaacgcgcatccgtattacagacaatatgttttgtgccggttataaacccgatgagggtaaaaggggtgacgcgtgcgaaggagactctggaggaccattcgtcatgaagagtccattcaataacaggtggtaccagatgggcatcgtctcttggggtgagggatgcgaccgtgacggaaaatatgggttctacacccatgtatttaggcttaaaaagtggatccagaaggtgatcgaccagtttggtgag

SEQ ID NO: 8623 - DNA, 1866 bp, synthetic construct
  misc_feature 1..1866: note = source = /note="Description of Artificial Sequence: Synthetic coding sequence"
  source 1..1866: mol_type = other DNA
atggctcatgtgcggggtctgcagctccctggatgtttggccctggccgcgttgtgcagccttgtgcactctcagcacgtgttcctggccccccagcaggctcggagcctgttgcagcgggttcgcagagccaacacctttttggaggaggtgaggaagggcaacctggagagggagtgcgtggaggaaacctgtagttacgaggaggctttcgaggctttggagtcgtccaccgctacggacgttttctgggctaagtatactgcttgcgagaccgcccgcaccccccgcgataagcttgcagcctgtctagaggggaactgcgcggaaggtctcgggactaactaccgcggccatgtgaatatcaccaggagcggcatcgagtgccaactttggcgctcgaggtaccctcataagccagagatcaattcaaccacccatcccggcgcggatctgcaggagaatttctgtcgaaaccctgactcatctactaccgggccctggtgctataccacggatccaacagtgcgccggcaggagtgcagtatccctgtctgcggccaggaccaggtgaccgtggccatgacccctcgatccgagggatcctcagtcaatttgtctccccctttggaacagtgtgtacccgaccgcggccaacagtatcaggggcgtctggcagtgaccactcatgggttgccatgcctagcctgggcctccgcccaggctaaggccctgtccaaacaccaagattttaactcagccgtccagctcgtggaaaatttctgtcgcaaccccgatggcgatgaggagggcgtgtggtgttacgtggctggtaaaccgggagactttggctactgtgatttgaattactgcgaggaggccgtggaggaggagacaggtgacggactagacgaggatagcgaccgggccatcgagggtcgaaccgccacatcggaatatcagacattttttaacccccgtaccttcggaagtggagaagccgactgtgggcttcgaccccttttcgaaaagaaatccctcgaagataagactgagagggagctcctcgaatcatacatcgacggcaggatagtggaaggctctgatgccgagattggtatgtctccttggcaggtgatgctgttccggaagagccctcaggagctgctctgtggcgcctctctgatttccgatagatgggtactaaccgctgcccactgcctactgtatccaccctgggacaagaactttaccgaaaatgacttgctggtgagaataggcaagcacagtcgcacgaggtatgagcgtaatatcgaaaagatcagtatgctagagaagatatacatacatcccagatataattggagggagaatctggaccgtgacattgctctcatgaagctgaagaagcccgtagccttctcggactacattcatcccgtgtgcctgccagaccgcgaaacagccgcctcgttgctgcaggccggctacaagggcagggtaacaggctgggggaacctgaaggaaacgtggacggccaatgttggaaaaggccagcctagtgtcttgcaggtggtgaatctgcccatcgtagaacgccccgtctgcaaggatagcacccggatccgcataacagacaatatgttttgcgcgggctacaagcctgacgaagggaaaaggggagacgcctgcgagggcgactctggaggccctttcgtgatgaaatcccctttcaacaacaggtggtatcagatgggcatcgtgtcctggggggagggctgtgatagggacggcaagtacgggttttatacacatgtctttcggcttaaaaaatggatccaaaaggttatagaccagttcggcgag

SEQ ID NO: 8624 - DNA, 1866 bp, synthetic construct
  misc_feature 1..1866: note = source = /note="Description of Artificial Sequence: Synthetic coding sequence"
  source 1..1866: mol_type = other DNA
atggcccacgtccgtggactgcagttacctggctgcctggctcttgcagccctatgctcactggttcatagccagcacgttttcctggcaccccaacaggccagaagtctgcttcaaagagtaaggcgcgccaatacatttttggaggaggtacgaaagggcaacctggagagggagtgcgttgaggagacctgcagctatgaggaggcgttcgaggccttagagagtagtactgctacagacgtgttttgggcaaagtacaccgcttgtgaaaccgcaaggacgcctcgcgataagctcgcagcttgtcttgagggtaactgcgcagaaggcctgggcaccaattacaggggtcacgtgaacattaccagatccggcattgaatgtcaactttggcggagcaggtacccacataagccggagataaattcaaccacacacccgggtgccgacctgcaggagaatttttgtaggaaccctgattcaagtacaactggcccttggtgctatacaacagatcctacggtgaggaggcaagagtgttccatcccagtctgtggacaagatcaggtgaccgtggcaatgacgcccaggagcgaagggagttccgtgaacctttctccccctctagagcagtgtgtaccagatcgaggccagcagtatcagggacgcttggccgtgactactcacgggcttccatgcctcgcctgggcatcggcccaggccaaggcgctatcaaagcaccaggattttaacagcgcagtccagctggtcgagaatttctgccgaaatcccgacggggacgaggagggcgtgtggtgttacgtagcgggtaagccgggtgacttcggttactgtgatttaaactattgtgaggaggccgttgaggaggaaaccggcgacggactggatgaggactccgacagggccatagagggtcgcaccgcaaccagcgagtaccaaacttttttcaaccctcgtacgtttgggtctggagaggcagattgcggtcttcgacctctgttcgaaaaaaagagcctcgaagacaaaacagagagggagcttttagagtcatacatcgacggcaggatcgttgaaggaagcgatgccgagataggcatgtccccctggcaggtcatgctgtttagaaagtcacctcaggagctactttgcggcgccagcctcatttctgaccggtgggtccttactgcggctcattgcctgttgtacccaccatgggataagaatttcactgagaacgacctcctggtgcgaatcggcaagcactcgcgaacccgatacgaacgcaacatcgaaaagatatcaatgctcgagaagatctatatccaccctaggtacaactggagagaaaacctggacagagacatcgccctgatgaagctcaagaagcccgtcgctttcagcgattacatccatccagtgtgccttccggatagggaaactgctgcgtccctgctgcaagctggatacaagggtcgggttacagggtggggcaatctgaaagaaacatggacagccaatgttggcaaagggcaaccctccgtgttacaggtcgtgaaccttcccattgtggaacgccctgtatgcaaggacagtacccggattaggatcacagataatatgttttgcgcgggttacaagcccgacgaggggaaaaggggcgacgcctgcgagggagatagcggcggccctttcgtgatgaagtcaccgttcaacaaccggtggtatcagatggggattgtgtcttggggggaaggctgtgatagggatggaaagtacggattttatacacacgtttttagactgaaaaagtggatccagaaggtaatcgaccagttcggagaa

SEQ ID NO: 8625 - DNA, 1866 bp, synthetic construct
  misc_feature 1..1866: note = source = /note="Description of Artificial Sequence: Synthetic coding sequence"
  source 1..1866: mol_type = other DNA
atggctcatgtccggggcctacaacttccagggtgcctggcactcgcagcgctatgtagtctcgtgcattcgcaacacgtctttctggcaccgcagcaggcgcggtcactgttgcagcgcgtgcgaagggcaaacacctttctagaggaggtacggaaggggaacttagagcgggagtgtgtggaagagacctgcagttatgaagaggccttcgaggccctcgagagcagtacagccaccgacgtcttttgggccaaatacacggcctgcgagaccgccagaaccccccgggataaactagcagcctgcctggagggcaattgtgctgagggacttggtaccaattacaggggccacgtcaatataacccgtagcggaattgaatgccaactgtggcggagcagataccctcacaagccagaaataaattcaacgacacatccgggggcagacctgcaagagaatttttgcaggaaccccgattcctccacgactgggccctggtgctatacaacggaccctaccgtaaggcgccaggagtgttccattcccgtgtgcggccaggaccaggttactgtcgcaatgaccccgagaagcgaaggctcatctgtgaacctttctccccccctggaacagtgtgtccccgatagggggcagcagtatcagggccgtctcgccgttaccacacacggtctcccctgccttgcctgggcgagcgctcaagccaaggccttgagtaagcaccaggacttcaacagcgctgttcagctggtagagaacttttgcaggaaccccgacggtgatgaggaaggggtgtggtgttatgtggccgggaaacctggggacttcgggtactgtgacctgaattactgcgaggaggcagtggaggaggagactggagatggactggacgaggactctgatcgagcaattgaaggtcgcacagccacgtccgagtaccaaacttttttcaatccaaggacctttggttctggagaagcagattgtggactgcgacctctgtttgagaaaaagtctctggaagacaagacagagagggagcttttggaatcatatattgatggcaggatcgtagagggctcagacgcggagatcggaatgtccccatggcaagtaatgctgttccgaaaatccccccaggagctgctgtgcggtgcatcactgatctccgaccggtgggtgctgaccgctgcacattgccttttgtaccccccctgggacaagaatttcacagagaacgacctgcttgtgaggatagggaagcacagccgcacccggtatgagcgaaatatagagaaaatttccatgctggaaaagatatacatccaccctcggtacaactggcgtgagaatctcgatagagatatcgctctgatgaagctcaagaaacctgtggccttctcagactatatccaccctgtgtgtctgccggatcgtgaaaccgccgctagcctgctgcaggctggatataaaggcagagtgactggttggggcaatctgaaagaaacctggactgctaatgtgggaaagggccagccatcagttctccaggtggtgaatctgccaatagttgaaaggccagtttgcaaagactctacacgtatccgaatcaccgacaatatgttctgtgccggttacaagccggatgaaggtaagagaggggacgcttgtgagggggactccggcggcccattcgtgatgaagtcaccctttaacaatcggtggtaccagatgggtattgtaagttggggagaaggatgcgaccgagacgggaaatatggcttctacacccatgttttccgccttaagaagtggatccagaaggtgatagaccaattcggtgag

SEQ ID NO: 8626 - DNA, 1866 bp, synthetic construct
  misc_feature 1..1866: note = source = /note="Description of Artificial Sequence: Synthetic coding sequence"
  source 1..1866: mol_type = other DNA
atggcccacgtcagaggactgcagttgcctggctgcctggcgcttgcagccctctgctcactcgtccactcccagcatgtgtttttggctccccagcaagcgcgctcactgcttcagagagtccggcgggcaaacacctttctggaagaagtccggaagggaaacctggaacgcgagtgcgtcgaagaaacgtgttcttacgaggaggcgttcgaagctcttgaaagcagtaccgccactgacgtgttctgggccaaatacaccgcctgcgagacggcgaggaccccgcgcgataagctggccgcatgcctggaaggtaattgcgccgagggcttggggaccaactatcgcggccacgttaacatcacccgaagcgggattgaatgccagctgtggaggagcagatacccacataagccggaaatcaattcgactacccacccgggggctgacctgcaggagaatttctgccgtaatccggactcgtcaactaccggaccatggtgttacactacggacccgaccgtgcgacggcaagaatgctccatccccgtgtgcggccaagatcaggtgactgtggctatgaccccgagatctgaaggatcgagcgtgaacctgtcacctccgctcgaacaatgtgtgccggaccgaggacaacaataccaggggcgcctggcggttacgactcacggacttccatgcctggcctgggcctccgcccaagcgaaagccctgtccaagcatcaagatttcaactccgctgtgcagctggtagaaaacttctgtcgcaatcccgacggcgacgaagagggagtgtggtgttacgtggcaggcaagcctggcgactttggatactgcgatctgaactattgcgaagaggcagtggaagaggagacgggcgacggactggatgaggactcggaccgcgcaatcgaaggaagaaccgccacctcggagtaccagaccttctttaacccaagaactttcggatccggagaagcggattgcggactgcggccactctttgagaaaaagtcactcgaggacaaaactgagcgggaactcctcgaaagctacatcgatggacggatcgtggaaggatccgacgctgagattggcatgagcccttggcaggtgatgctgttcaggaagagcccccaggaactcctttgtggggccagccttatcagcgatagatgggtgctcacggcggcccattgtctgttgtacccgccatgggataagaatttcactgaaaacgacctgctcgtacggatcggcaagcactcgagaactagatacgaacggaacattgaaaagatctcgatgctcgagaagatctacatccatccgcgttacaactggagagagaacctggacagggacatcgctttgatgaagctgaagaaaccggtggcattttcggattacatccacccggtgtgcctcccggacagagaaaccgcggccagcctgttgcaggcaggctacaagggacgggtgactggctggggtaacctgaaggagacttggactgccaacgtcggtaagggacaaccatcggtgttgcaagtcgtaaacctccctatcgttgagcgccccgtctgcaaggattccacccggatcagaatcactgacaatatgttctgcgccggatacaagccggatgagggcaaaagaggcgacgcctgcgaaggggactcgggcggccctttcgtcatgaagagcccgtttaacaatcgctggtaccagatgggtatcgtgtcgtggggtgagggatgcgaccgggatggaaagtacggtttctacacccacgttttcagactgaagaaatggatccagaaagtgattgaccaatttggagag

SEQ ID NO: 8627 - DNA, 1866 bp, synthetic construct
  misc_feature 1..1866: note = source = /note="Description of Artificial Sequence: Synthetic coding sequence"
  source 1..1866: mol_type = other DNA
atggcacatgtgaggggactgcaattaccaggctgcctcgctctggcagcattatgctcactggtccatagtcagcacgtgttcctggcaccccagcaggctaggtcgctgttgcaaagagttcgcagagcaaatacattcttggaagaagtgaggaagggaaacctcgagagggagtgcgtggaggagacttgcagttatgaagaagcgttcgaagctctcgagtctagcacagctactgacgtcttctgggccaagtataccgcttgtgagaccgctagaactcctagggacaaactggcagcttgccttgaaggtaactgcgctgaaggtctgggcaccaactaccgcggtcacgtaaatattacgcgtagcgggatcgagtgtcaactgtggaggtctaggtatccccacaaacccgagatcaactccactactcatcctggcgccgacctccaggaaaacttttgtcggaacccggactccagcactacggggccgtggtgttacaccacggaccctacagtaaggcgccaggaatgtagcattcctgtgtgcgggcaggaccaggtcacagttgccatgaccccaagaagtgaaggttcctctgtcaatctttcccctcctctggaacagtgcgttcctgaccgtggtcaacaataccaggggcggctggcagtaactacccacggactgccatgcctggcctgggcttccgctcaagccaaggccctgagcaagcaccaggattttaactcagctgttcagttggttgagaatttctgtcggaatccggatggcgacgaggagggagtgtggtgctacgtggctggcaagcctggagattttggctactgcgacctgaactattgcgaggaggcagttgaggaagaaaccggcgatggactagacgaggactccgacagggcgatagaaggacggaccgccacaagtgagtatcagactttcttcaacccgaggacattcggctccggcgaggctgattgcgggctgagacccctatttgaaaaaaagtcactggaagacaaaaccgagcgggaactgctggagagctacattgacgggcgcatagtggagggatcagacgcggaaatcggtatgtctccttggcaggtcatgttgtttcgaaagtcaccccaggagctcttgtgcggcgccagcttaatttccgatcgctgggtcctgaccgccgcccactgtctgctgtaccctccttgggataaaaatttcaccgagaatgacttgctggtgaggataggtaagcacagccgaacaagatatgagagaaacatcgaaaagatttccatgctggaaaaaatttatattcacccccgctataattggcgggagaatctcgaccgcgacattgcattaatgaagcttaagaagcctgtcgccttctcggactacatacacccagtctgcctccctgatagggagacggccgcttccctactgcaggctggatacaagggccgagtcacaggatggggcaacctcaaggaaacatggaccgccaacgtagggaaggggcagccttccgtgctgcaagtagtgaacctgccaattgtggaacggccagtctgtaaagactcgacccggatcaggatcacagacaatatgttctgcgccggatacaagccggacgaaggcaagaggggtgacgcttgtgaaggagattccggcggcccctttgtgatgaagtcacccttcaataacagatggtatcagatggggattgtgtcttggggtgaggggtgtgaccgggacggaaagtacggattctatacccacgtcttccgtcttaaaaaatggatccaaaaagttattgatcagtttggcgag

SEQ ID NO: 8628 - DNA, 1866 bp, synthetic construct
  misc_feature 1..1866: note = source = /note="Description of Artificial Sequence: Synthetic coding sequence"
  source 1..1866: mol_type = other DNA
atggcacacgtgcggggcctccagctgcccggatgtctcgccctggccgcactgtgttcccttgtccatagccagcacgtctttctggcaccgcaacaggcgcgctcgctgcttcagcgagtgcgaagagcaaacacttttcttgaagaggtgcggaaagggaatctggagcgggaatgcgttgaagaaacttgtagctacgaggaagccttcgaagcactggaatcgtccactgcaaccgatgttttttgggcaaagtacaccgcatgtgaaaccgcccggacgccgcgcgacaagctggctgcatgccttgaagggaactgcgcagaaggcttgggaaccaactaccgcggtcatgtgaatatcacccgatccgggatcgagtgccagctgtggcggtccagatatccacacaagcccgaaatcaattcgactacccatcctggagcagatctccaagaaaacttctgtagaaacccagattcgtccaccactggaccttggtgttataccactgatccaacggtgcggcgacaagagtgctcgatcccagtgtgtggtcaggatcaggtcactgtggctatgaccccgagaagcgaaggctcaagcgtgaatctgtcaccaccgcttgagcagtgcgtgccagatcgtggacagcaataccaaggtcgcttggcagtgactacgcatggcctgccttgtcttgcatgggcgtcagcacaagctaaagcccttagcaaacatcaggatttcaattctgcagtgcaactcgtggagaatttctgtcgcaaccctgacggcgacgaagagggagtctggtgttacgtggcaggcaagcccggtgattttgggtactgtgatctgaattactgtgaggaggcagtggaagaagaaacgggcgacggtcttgatgaagattcagatagggcaatcgaaggtcgcactgcaacctctgaataccaaaccttctttaaccctcgtactttcggatccggagaggcggactgtggacttaggcctctttttgaaaagaagtctctggaggacaagaccgaaagagaactgctcgagagctacattgacgggcgaatagttgaaggctcagatgccgaaataggtatgagcccttggcaagtgatgcttttcagaaaaagcccgcaagagttgctctgtggagcgtccctcattagcgacagatgggtgctgaccgcggctcattgtttgctgtaccccccttgggataagaacttcactgagaacgacttgcttgtccgcatcggtaaacactccagaactagatacgaacgtaacatcgagaagatctccatgctcgaaaagatttacatccatccaagatacaattggcgcgaaaacctggatagggatatagcactgatgaaacttaagaagcctgtggcatttagcgactacatccatcctgtgtgcttgcccgatagagagactgcggcctcgcttctccaagcaggctacaagggacgtgtcaccgggtggggtaatctgaaggagacttggacggcaaatgtcggaaagggacaaccttctgtccttcaagtcgtgaacctcccgattgtcgaaaggccagtgtgcaaagacagcacccgcataaggattaccgataacatgttttgcgcggggtataaaccagacgagggaaagcggggggacgcgtgcgagggtgactccggtggaccgtttgtgatgaagagcccatttaacaaccgatggtaccaaatgggaatagtgagctggggggaaggttgtgatcgagacggtaaatacggtttttacactcatgtctttcgtctgaagaagtggattcagaaggtcattgatcaatttggagaa

SEQ ID NO: 8629 - DNA, 1866 bp, synthetic construct
  misc_feature 1..1866: note = source = /note="Description of Artificial Sequence: Synthetic coding sequence"
  source 1..1866: mol_type = other DNA
atggcacacgttcggggcttgcagttgccaggatgcctcgctctcgccgccctttgttctttggttcactcacagcatgtgtttctcgcgccacagcaggcgcgaagtttactccagcgcgtccgtagagctaacacttttctcgaggaagtgagaaaagggaacttagaacgcgagtgtgtcgaggagacgtgttcctacgaagaagctttcgaagcactcgagtcttctaccgcaaccgatgttttctgggctaaatacaccgcatgcgaaacagcgcgcacgcctagagataagctcgcagcctgtctggaagggaattgtgcggaaggactggggactaattatcgcggccacgtcaatatcacacgttcgggcatcgaatgtcagctctggaggtcacgatacccccataaaccagaaatcaatagtacaacgcatcccggcgccgatcttcaggagaacttttgtcgtaatcccgactcatcaaccactggaccttggtgttacaccacagacccaaccgtacgaagacaagaatgttcaatccccgtgtgcggacaggatcaggtgaccgtcgccatgactcccaggtcagaaggcagttccgtgaatctctcaccgccgctcgaacagtgcgtgcccgatcggggacagcaataccaaggaagactcgccgtaacaacacacggacttccctgtttggcttgggcatccgcgcaggccaaggcgctttccaaacatcaagatttcaactcagccgttcagctggtcgaaaacttttgtcggaaccccgatggcgatgaggaaggcgtgtggtgctacgtggctgggaaacctggagatttcgggtactgcgatcttaattactgcgaggaggcagtcgaggaagaaacaggagacggactggacgaggattctgatagagccattgaaggccgtacggccacgtcggagtaccaaacattctttaatccgaggaccttcggctcaggggaagcagactgcgggctgcgcccactcttcgagaaaaaatcactggaggataaaaccgaaagggagctgctggagtcctacatcgacggcagaattgtcgaaggatctgatgcagagatcggaatgtctccctggcaggtcatgttatttcggaagtctccccaggaactactgtgcggcgccagtcttatttcggatagatgggtgcttacagccgcccactgtctactctatccgccctgggataagaactttacggaaaacgatctcttagttagaatcggcaagcacagcagaacgaggtatgaaaggaatatagagaaaatctccatgcttgagaagatctacatacatcctcgttataattggagggagaacctggatagagacatagccttgatgaaactcaagaagcccgtcgccttttccgattatatacatcccgtgtgcctgcctgaccgggaaactgcagcaagtctgctgcaggctggttataaaggaagagtaactggttggggcaacctgaaggaaacttggactgctaatgtgggtaaaggtcagccctcagtcctccaggtggtgaatctgcctatcgttgagagaccggtttgtaaggatagcacacgcatccgaattaccgataatatgttctgtgccgggtataagccagacgagggcaaacgcggcgatgcgtgcgaaggggattcaggaggcccctttgtgatgaaatccccctttaataacaggtggtaccagatgggtattgtctcttggggggaggggtgtgacagagatggcaagtacgggttctacacccacgtgtttagactgaaaaaatggatccagaaggtgatcgatcaattcggtgaa

SEQ ID NO: 8630 - DNA, 1866 bp, synthetic construct
  misc_feature 1..1866: note = source = /note="Description of Artificial Sequence: Synthetic coding sequence"
  source 1..1866: mol_type = other DNA
atggcccatgttcggggactccagttaccaggatgcctcgcgttggctgcattatgctctctggttcattcccaacatgtgtttcttgcaccacaacaagcgcggtcattacttcagcgtgtcagacgcgctaacacttttttggaagaagtgcgaaaaggcaatctggaacgggaatgtgttgaagaaacttgttcgtacgaagaggctttcgaggctctcgaaagtagtacagctacggacgttttttgggctaagtacacagcatgcgagacggcgagaaccccacgagataaactcgcagcatgcctggaaggaaattgcgccgagggattagggaccaattaccgtgggcatgtgaatatcacaagaagtggaattgagtgtcaactttggagatctcgctatcctcataaaccagaaattaatagtactactcatccaggtgctgatttgcaggaaaacttttgtcgaaatccagattcgtcaaccacaggtccttggtgttataccactgatccaacagttagaaggcaggagtgtagcatcccggtctgtggacaagaccaagtgactgtcgctatgaccccacgctcagaaggatcgagtgtgaatctaagcccaccccttgagcaatgtgttccagaccgtggacaacaatatcaaggaagactcgcagtcacaactcacggccttccctgccttgcctgggcctccgcacaggcgaaagcattatcgaagcatcaagatttcaattctgctgtgcagctcgttgaaaatttctgtcgcaacccagatggtgacgaagaaggagtttggtgttacgttgctggaaagccaggagatttcggatattgcgatttgaactactgtgaagaggctgttgaggaggaaaccggagatggacttgatgaggatagtgatagagctattgaaggacgaactgctacttctgagtaccaaacttttttcaatccgcgtacattcggttctggagaagcggattgcggcctaaggccgcttttcgagaaaaaaagcctagaagataagactgagagagagttgctagaatcatacattgatgggcgtatcgtagaaggttctgatgctgaaataggaatgtccccatggcaagtcatgctcttccgtaaaagtccacaagagttgttgtgcggagcttctctgatttcagaccgatgggtgttaacggctgcgcattgcttactttacccaccatgggataaaaattttactgaaaacgatcttcttgttcggattgggaagcactctcggacgaggtatgagagaaatatagaaaaaatttcaatgctagaaaagatttacatacatccacgatataattggcgtgaaaacttggacagagacattgccttgatgaaattgaaaaagcccgttgctttttctgattacattcacccagtctgcctcccagatcgagaaactgctgccagcttactacaggcaggttacaaaggacgtgtaacaggttggggaaatctaaaagaaacttggacagctaatgtgggtaaaggacagccatctgtccttcaggttgtcaatttaccaatagtcgagcgaccagtctgtaaagattccactcgaatccgaattacagataatatgttttgcgctggttataagcctgacgaaggaaagcgcggagatgcatgtgaaggggactctgggggaccatttgtaatgaagtcgccattcaataatcgctggtaccaaatgggaatagtgtcatggggagaaggttgcgatagagatggaaaatatggtttctacactcacgtgttccgtcttaagaagtggatacaaaaagtaattgatcaatttggagag

SEQ ID NO: 8631 - DNA, 1866 bp, synthetic construct
  misc_feature 1..1866: note = source = /note="Description of Artificial Sequence: Synthetic coding sequence"
  source 1..1866: mol_type = other DNA
atggcgcatgttcgcggtctgcagctccccggctgcctcgccttagcagccctgtgttctcttgttcattcccagcacgtattcttagcgcctcagcaggcccggtcactgcttcagagggttaggcgcgcaaatacattcctggaggaagtgcgaaagggcaacctcgaaagagagtgtgtcgaggagacgtgtagctatgaggaagcgtttgaagctctcgagtcaagtaccgcaacagacgtattctgggccaaatacactgcttgtgaaacagctaggactcctagagataaactggccgcctgcttagagggtaattgcgctgagggtctcgggacaaactacaggggccatgtgaatatcaccaggagtggcatcgagtgccagctttggaggagtagataccctcacaagccagagattaatagtaccacccaccctggcgccgaccttcaagagaatttctgtagaaacccggactccagtactactggaccttggtgctacacaaccgacccgaccgtacggagacaggagtgctccattcccgtgtgcggacaggaccaggtgaccgtggcgatgaccccaaggtccgagggtagttctgtcaacttgagcccccccctggagcagtgcgtgccagacaggggacagcagtatcaggggcggctggccgttactactcacgggctcccttgcctggcttgggccagcgcccaggcgaaggccctcagcaagcaccaggactttaatagcgccgtccagctggttgagaatttctgtcggaaccctgacggagatgaggaaggggtatggtgctatgtcgcaggaaagccaggcgactttgggtattgtgatctaaattactgcgaagaggccgtagaagaagaaactggggatgggttggatgaggattctgatagggcgatcgagggcaggaccgcgacttcagagtaccaaactttttttaacccacgcacctttggaagcggcgaagccgactgcggcctaagaccacttttcgagaaaaaatccctggaagataagaccgaacgcgaactgctggagagttatatcgatggacgcattgtggagggatccgatgccgagatcggcatgagtccctggcaggttatgctcttcaggaagagtcctcaggagctactttgtggcgctagcttgatttctgacaggtgggtcctgacagctgcccactgtctgctttaccccccttgggacaagaactttacagagaacgacctgctagtccgtatcggaaagcactccagaacacgttacgagaggaatatagagaagattagcatgctggaaaagatctacatccaccccagatacaattggagggaaaacctggatagggatattgcgctgatgaaactcaagaagcctgtggcgtttagtgattacattcaccctgtgtgcctgcccgaccgcgaaacagcagctagcttgttgcaggctgggtataagggacgcgtaaccggttggggtaaccttaaggagacctggactgctaacgtcgggaaaggacagccgagcgttctccaggtggtgaatttaccgattgttgaaagacctgtctgtaaagatagcactagaatacgcataacagataatatgttttgcgctggctacaaacccgatgaaggcaagaggggagatgcctgcgaaggggatagtggcggcccctttgtcatgaagtcccccttcaataacaggtggtatcagatgggcatcgtgtcttggggagaggggtgcgatagggatggcaagtacgggttctacactcatgtgtttcggcttaagaaatggatccagaaggttatcgaccagttcggcgag

SEQ ID NO: 8632 - DNA, 1866 bp, synthetic construct
  misc_feature 1..1866: note = source = /note="Description of Artificial Sequence: Synthetic coding sequence"
  source 1..1866: mol_type = other DNA
atggctcatgttcgtggattgcaattacctgggtgtttggctttggctgccctgtgttcccttgtacatagccaacatgtgttcttggctccccagcaggcaaggtctttacttcagcgagtccgtcgggctaacactttcttggaagaagtaagaaaagggaatttggagcgcgaatgcgttgaagaaacttgttcttatgaggaggcattcgaggccttggagtcttcaacagctaccgatgtattctgggctaagtacacggcttgtgagacagcaagaacgcccagagataaactggccgcttgcctggaaggaaattgtgctgaagggctaggcactaattaccgaggacatgttaatatcacaagaagcggaattgagtgtcagttgtggcggtcacgttatccacataaaccggaaatcaattccaccactcaccctggggccgacctccaagagaatttttgtagaaatcccgacagttcaacaacagggccatggtgctacaccaccgatcctacagtgagacgacaagagtgttcgatacctgtttgcggtcaagaccaggtaacagtggctatgactcctcggagcgagggcagctccgtcaatcttagccctcctcttgagcaatgtgtccccgatcgtggtcagcaatatcaggggagattggcagtgacgactcatggtcttccttgtctcgcatgggctagtgcacaagctaaggctctctcaaaacatcaagatttcaattcagccgttcaattggtagaaaatttctgccgcaaccctgatggagatgaagaaggtgtgtggtgctacgtcgccggtaagcctggtgactttggctattgcgacttgaactattgtgaggaagcagtggaagaggaaaccggcgacggactggatgaagatagcgatcgtgcaattgaaggtcgcactgctacctcggagtatcaaacattttttaacccaagaacattcggcagcggtgaggctgattgtggacttcgtcctcttttcgaaaagaagagtctcgaagataaaaccgaacgtgaactcctagagtcatatatagacgggcgaattgttgaaggaagtgacgctgaaatcggtatgagcccttggcaagttatgctcttccgtaagagtccccaagaacttttgtgcggcgctagcttgatttctgaccggtgggtgctgactgctgcgcattgtttgctttatcctccatgggacaaaaatttcaccgaaaatgacctgctcgttcgcataggaaagcattctagaactcgatatgaacgtaatattgagaagatttctatgttggagaaaatctacatccatcctaggtacaattggagagagaacctggatagagatattgcattgatgaagctcaaaaaaccggttgccttctctgactatatacacccagtttgccttcctgatagagaaactgccgcttcactcctgcaagctggatataaggggagagttacaggttggggcaacctcaaagaaacctggacagccaatgtcggtaaggggcagccttcggtacttcaagtggtgaatctgcccattgtcgagcgtcccgtatgcaaggattcaactaggattcgtattacagataacatgttctgtgccggttataagcctgatgaaggaaagagaggagatgcgtgcgagggggatagcgggggtccttttgttatgaaatctccattcaacaatcgttggtatcaaatgggaatcgtgagttggggggagggttgcgacagggatggtaagtacggattctatacacacgtgttccgtttgaaaaagtggatacagaaggtgattgaccaatttggggaa

SEQ ID NO: 8633 - DNA, 1866 bp, synthetic construct
  misc_feature 1..1866: note = source = /note="Description of Artificial Sequence: Synthetic coding sequence"
  source 1..1866: mol_type = other DNA
atggcacatgtgcggggcctgcagctccctggttgcctggccttggctgctctgtgttcgttagtgcattctcagcatgtgtttttggcgccacaacaggcgagaagcctgttgcagcgagtgcggagagccaacacatttttagaggaggtgcgcaaagggaatttggaacgagagtgtgttgaagagacatgctcatatgaggaggctttcgaggccctggagtcttccaccgccactgacgtgttctgggccaaatacaccgcctgcgagacagcacgcacgccacgggacaagcttgcggcgtgcctggaaggtaattgtgccgaggggctgggcactaattatcgaggtcacgtgaatatcaccaggagtggtatcgagtgtcagctctggcgctcacggtatccacacaagcctgagatcaatagcacaactcaccctggtgctgacctgcaggagaacttctgtcgtaatcccgacagctccaccacaggtccgtggtgttacactactgacccaaccgttcgccgtcaggaatgttctattcctgtctgcggccaggatcaagtgaccgtcgcgatgacaccccgttccgaaggatcctccgtcaacctcagcccccctctcgagcaatgcgtgccagataggggacagcagtatcagggccggctggctgttacaacccacggactgccatgtctggcttgggcctccgctcaagcgaaggctctctcgaaacaccaggacttcaactcagccgttcagctggtggaaaacttctgccgaaacccagatggcgatgaggaaggcgtgtggtgttatgtcgctggaaagccaggagatttcggctactgcgacctgaattactgcgaggaggccgtagaggaagaaactggcgacggtctggacgaggattcagaccgggctatcgaaggacggaccgccaccagcgaataccaaaccttttttaacccacgcacattcggaagcggcgaggccgactgcggtctcagacccctgtttgagaaaaaatccctggaggataaaaccgaaagagaattgctcgagtcttacattgacgggagaattgtggaaggctccgatgctgaaattggcatgtccccttggcaggtgatgctcttccgcaagtctcctcaggagctgttgtgcggcgcaagtctcattagtgaccggtgggttctcaccgctgcccattgtcttttgtaccctccatgggataagaatttcacagaaaacgatcttctggtgcgaatagggaagcacagtcggactaggtatgagcgaaatatagaaaaaatctctatgcttgagaagatttatatccatccgcggtataactggcgggagaatctggaccgtgatattgcgttaatgaaattgaagaagcctgttgcgttctctgactatattcaccctgtgtgtttgccggatagagagaccgcagcatctctgttgcaggctggatacaagggaagggtgaccggctggggaaacctaaaagaaacttggactgcgaatgttggcaaggggcaacctagtgtgctgcaggtagtgaacctacccatcgtagagcgtccagtatgtaaggactctactcgcatcagaataaccgacaatatgttttgcgctggctacaaacctgatgagggcaaaaggggcgatgcctgcgaaggcgactcaggcggcccattcgtcatgaaatctcctttcaacaataggtggtaccagatgggtatcgtatcgtggggagagggctgcgaccgcgatggcaagtacggattctatacccatgtttttcgccttaagaagtggatccagaaagtcatagatcagtttggtgag

SEQ ID NO: 8634 - DNA, 1866 bp, synthetic construct
  misc_feature 1..1866: note = source = /note="Description of Artificial Sequence: Synthetic coding sequence"
  source 1..1866: mol_type = other DNA
atggctcatgttagaggattacaattaccaggttgtcttgctttagcagctctttgtagcttagttcattcacaacatgtttttcttgctccacaacaagctagatcattacttcaacgtgttcgtagagcaaacacattcttagaagaagttagaaaagggaatttagaaagagaatgtgttgaagagacttgttcatatgaggaagcttttgaagcacttgaatcttcaacagctactgatgttttctgggcaaaatatacagcatgtgagacagcaaggacacctagagacaaattagcagcttgtttagaaggaaattgtgctgaaggtttaggaacaaattatagaggacatgttaatattactagaagtggaattgaatgtcaattatggagatcacgatatccacataaaccagaaattaattcaacaacacatccaggagcagatttacaagaaaatttttgtagaaatcctgacagttcaactactgggccatggtgttacactactgatccaacagttagaaggcaggaatgctctataccagtttgtggacaagatcaagttactgttgcaatgactccaagatcagaaggatcttcagttaatttatctccacctttagaacaatgtgttcctgatagaggacaacaatatcaaggtcgtcttgctgttacaacacatggactaccttgtttagcttgggcaagtgcacaagcaaaagctctttctaaacaccaagattttaatagtgcagttcaattagttgaaaatttttgtagaaatccagatggtgatgaagaaggagtgtggtgttatgttgctggaaaaccaggggatttcggttattgtgatcttaattattgtgaagaagctgttgaagaagaaactggagatggattagatgaagatagtgatagagcaattgagggaagaacagcaactagtgaatatcaaacttttttcaatccacgaacatttggttcaggagaagctgattgtggtttaagaccactttttgaaaaaaaaagtttagaagataagacagaaagagaacttttagaatcatatattgatgggagaattgttgaaggatcagatgctgaaattggtatgagtccatggcaagttatgctattcagaaaaagtccacaagaacttttatgtggagcaagtcttattagtgatagatgggtattgactgcagctcactgtttactttatccaccatgggataagaattttactgaaaacgatttacttgttagaattggtaaacattcaagaactagatatgaacgtaatattgaaaaaatttctatgttagaaaagatttatattcatccaagatataattggagggaaaacttggatagagatattgctcttatgaaacttaaaaaacctgtagctttttctgattacattcatccagtatgtttaccagacagagaaactgcagcaagtttattacaagctggatataaaggaagagtaactggatggggtaatttaaaggaaacttggactgcaaatgtcggaaagggtcaaccaagtgttttacaagtagttaatcttccaattgtagaaagacctgtttgcaaagatagtacaagaattagaattactgataatatgttttgtgctggatataaaccagatgaaggaaaaagaggtgatgcatgtgaaggagattctggaggaccattcgttatgaaatcaccatttaataatagatggtatcaaatgggtattgtttcatggggtgaaggatgtgacagagatggaaaatatggattctatactcatgtatttcgtttaaaaaaatggattcaaaaagttattgatcaattcggtgaa

SEQ ID NO: 8635 - DNA, 1866 bp, synthetic construct
  misc_feature 1..1866: note = source = /note="Description of Artificial Sequence: Synthetic coding sequence"
  source 1..1866: mol_type = other DNA
atggcgcacgtacgcgggttgcagttaccggggtgcctagcgctggcagctctgtgcagtctcgtccatagtcagcacgtttttttagctccgcagcaagcaaggagcttgcttcagcgggtgcggcgtgcaaatacgttcctggaagaagtacgtaaaggcaatcttgagagagaatgtgttgaagaaacatgctcatatgaagaagcgtttgaagcgcttgaatcaagcacagcaaccgatgttttctgggccaagtacacagcgtgcgagactgctcggactccgagagacaaattggccgcctgcctagagggaaattgcgcggaagggcttggcacaaactatcgcgggcatgtaaacattaccaggtctggaatcgagtgtcagctctggcggagcaggtatcctcataaacctgagataaactcaacaacgcacccgggggcagatctgcaagaaaatttttgcagaaatccggattcaagcacaacaggcccttggtgctatacgacggatcccacagtgaggcgccaagaatgttcaattccggtgtgtgggcaggatcaagtcacagtcgcgatgacaccgcgttccgaaggctcgagcgtgaatctttcgcctcctcttgaacaatgcgtgcccgatcgtggccagcagtatcaaggaagactggccgttacaactcatggacttccgtgcctggcctgggcttctgctcaggcaaaagcattaagtaaacatcaggacttcaattcagcagtccagctcgttgaaaatttctgccgtaatccagacggggacgaagaaggggtttggtgctatgtggcagggaaaccgggcgattttggttactgcgatctcaactactgcgaagaggctgttgaggaggaaacaggagatggattagatgaggattctgatcgtgcgattgaaggccgcacggctacaagcgaatatcaaacgttttttaatccgagaacgttcggctctggcgaagccgactgcggccttcggcctctttttgaaaaaaaatcacttgaagataaaacagagcgcgagttgttggaatcatacatcgacgggcggattgtagaagggtctgacgcagaaattggaatgtcgccatggcaagtcatgttgttccggaagtcaccacaagagcttctgtgcggagcttcactgattagcgaccgctgggtgctgacggcagcacactgtttgttgtatccaccgtgggacaagaacttcacagagaatgaccttcttgtgcgtatcggcaaacattctaggacaagatacgaacgtaatatcgagaaaatttcaatgctggaaaaaatctatattcaccctcgctacaactggcgtgaaaacttagacagagacattgctcttatgaaactgaaaaagccagtcgccttttccgattacatccatccggtgtgtttaccagatagggaaacggcagcatcactactgcaagccggttataaaggcagagtaacaggctggggtaatctcaaggaaacatggaccgccaatgtgggaaaaggacagccttccgtcttacaagtggtaaaccttccgatagtagaacgtcctgtctgcaaggattccacgagaattcggataactgataatatgttctgcgctggttataaaccagatgagggcaaacggggtgatgcatgtgagggtgacagcgggggaccgtttgtaatgaaatcaccttttaacaacaggtggtaccagatggggatcgtatcttggggtgaagggtgtgaccgcgatggaaaatatggattttatacgcacgtgtttagattgaagaaatggattcagaaagtgattgatcagtttggggaa

SEQ ID NO: 8636 - DNA, 1866 bp, synthetic construct
  misc_feature 1..1866: note = source = /note="Description of Artificial Sequence: Synthetic coding sequence"
  source 1..1866: mol_type = other DNA
atggcacatgtgcggggcttgcagcttcctggctgtctggcgctggcagccctgtgttccctggtgcacagccaacacgtgtttctcgccccccagcaagcaagatcactccttcagagagtgagacgggccaacacttttctcgaagaggtccgcaagggaaatcttgaaagagaatgtgtcgaagaaacctgctcctacgaggaagcatttgaagcactggaatcgtcgactgctacggacgtgttctgggcaaagtacaccgcatgtgaaaccgcaagaactccgagagataagctcgcagcctgcctggaaggtaactgtgctgaaggactggggaccaactacagaggacatgttaacatcactcgatcaggtatagagtgtcaactctggcgaagccgatacccccataaaccagaaatcaactccacgactcaccctggcgcagatctgcaagaaaacttctgccggaaccctgattcgtccacgaccggaccgtggtgttacaccaccgatcccactgtccgtaggcaggagtgctcaattcctgtgtgtggacaggaccaggtgactgtggcaatgacccctcgatcggagggatcatcggtcaacttgtcgcctccccttgaacaatgtgtgcctgaccggggacagcaataccagggtaggctcgcagtgaccactcatggacttccttgtctggcatgggcctccgcgcaagcgaaggcccttagcaagcatcaagatttcaatagcgcagtgcaactggtggaaaacttttgtagaaaccccgatggagatgaggaaggagtctggtgttacgtggcaggcaagccaggagacttcggttactgtgacctgaactattgcgaggaagcagtggaagaagaaaccggcgacgggctggacgaagattcggatcgcgctattgagggccgtactgcgacttcagaataccaaactttctttaaccccagaaccttcggttcgggggaggcagactgtggactccggccactctttgagaaaaagtcccttgaggacaagaccgagcgcgagctcctcgaatcctacatagatggacggattgtggaaggctcggatgcagaaatcggcatgtcaccctggcaggtcatgctgttcagaaagtccccacaagaacttctgtgcggggcgtcactgatttcggataggtgggtgcttaccgcggcacattgtctcttgtaccctccttgggataagaactttaccgaaaacgacttgcttgtccggatcgggaagcattccagaactcgatacgagagaaacattgaaaagatctcgatgcttgagaagatttacattcatccaagatataactggcgtgaaaatcttgatcgagatattgcccttatgaaactgaagaagccggtggccttctcggactatatccaccctgtctgtctcccagaccgagaaaccgctgcgtcactgcttcaggccggatacaagggacgtgtgaccggctgggggaacctcaaggaaacctggaccgccaacgtgggtaaggggcaaccgtcagtcctccaagtggtgaatctgcctatagtggaaagacctgtgtgtaaggattccactagaatacgcattaccgataacatgttttgcgccggttacaagcctgatgaaggtaaacgcggagatgcgtgtgaaggtgactctggaggacctttcgtgatgaaatctccattcaataaccgctggtaccagatgggaatcgtgtcatggggagagggttgcgatagagacggaaagtatggtttttacacccacgtgttccggctgaagaagtggattcaaaaagtgatagatcagttcggagag

SEQ ID NO: 8637 - DNA, 1866 bp, synthetic construct
  misc_feature 1..1866: note = source = /note="Description of Artificial Sequence: Synthetic coding sequence"
  source 1..1866: mol_type = other DNA
atggcccatgtgcgtggcttgcagctccctgggtgtttagctctggctgccctgtgttccctggtacattcccagcacgtgtttctggcccctcagcaggcacggagcctgctgcagagggtcaggcgtgcaaacacgtttctcgaagaagtgagaaaggggaatcttgagagggagtgtgtggaggagacttgctcctacgaggaagcgttcgaagccttggaatcctctacggccacagacgtgttctgggccaagtatactgcctgtgagaccgctcgcacgcccagggataaactagctgcatgcctggagggaaactgtgccgaagggctagggacaaattatcgcgggcacgttaacatcactagatctggaatagaatgccagctctggcggagtaggtatccacacaagcctgagattaactccaccactcacccaggagccgatctgcaggaaaatttttgtagaaaccctgacagctcaactacaggcccctggtgctatacaacagatccaactgtgcgacgtcaggaatgtagcatacccgtgtgtgggcaggaccaggtaaccgtcgctatgacgccccgcagcgaaggctcaagtgtgaacctctccccgccacttgaacagtgcgtgccagatcggggacagcagtaccagggacgcctcgccgtgactactcatggactgccttgtctcgcctgggcatccgcacaagctaaggctttatctaaacatcaggacttcaactcagcagtacagctggtagagaatttctgcaggaatccagatggggacgaggagggagtttggtgctacgtggctgggaaaccaggggactttggctactgcgacctcaactactgcgaagaagccgttgaagaagagactggtgacggtctcgatgaagattcagaccgcgcgatcgaaggcagaaccgcaacatctgaataccagacttttttcaaccctagaacttttggatccggcgaagcagattgtggtctaaggcctctgtttgaaaagaaatccctcgaggataagaccgagcgagaactcctggagagctacatcgatggaagaatcgtagagggaagtgatgctgagatcgggatgtcaccctggcaagttatgctgtttcggaagtccccacaagagctcctctgcggagcctctcttattagcgaccgatgggttctaaccgctgcacattgtttgctgtatccaccgtgggacaaaaacttcacggagaacgacttactcgtgcggatcggcaagcattccaggacccgatatgagcggaatatagagaagatctcaatgctcgaaaaaatttacattcaccctcgctacaattggcgagaaaacctcgacagggatatcgcgctgatgaagctcaaaaaaccagtggccttttcggattacattcatccggtttgtcttccagacagagagaccgcggcgtctctgttgcaggcggggtacaaggggagagtgacgggatggggaaacttgaaggaaacctggaccgctaacgtcggcaaaggccagccaagtgtacttcaggttgttaatttgccaattgtggagcgccccgtctgtaaagacagcacaaggatccggatcacggataatatgttttgtgccgggtataagcctgacgaggggaaacggggagacgcatgtgagggggactcaggcgggccctttgtgatgaagtctccctttaacaatcgttggtatcagatggggatagtgtcctggggagaggggtgcgatcgggatggtaaatatggcttctacacacacgtctttagattaaaaaagtggattcagaaggtgatcgaccagtttggcgag

SEQ ID NO: 8638 - DNA, 1866 bp, synthetic construct
  misc_feature 1..1866: note = source = /note="Description of Artificial Sequence: Synthetic coding sequence"
  source 1..1866: mol_type = other DNA
atggcgcacgtgaggggtttgcagctgcccggatgcctggccctggcagcgttgtgctcgctcgtgcattcccagcacgtgttcctcgcgccccagcaggcgaggtctttgctgcagcgcgtgagacgcgccaatactttcctggaagaggtccggaaaggcaaccttgaaagagaatgcgtcgaagaaacctgctcgtacgaagaagcatttgaggctcttgagtctagcacggccactgacgtgttctgggcgaagtacactgcctgcgagactgctcgcactccacgcgacaaactggcggcctgcctcgagggaaactgtgccgaaggcctggggaccaactaccgcgggcatgtcaacatcactcgctccggcattgaatgccagctgtggagatctcgttacccgcataagccagagatcaatagcaccactcacccgggcgccgacctgcaagaaaacttctgcaggaaccctgactcgtcaaccacgggtccctggtgctacactactgatcccacggtgcgccggcaagaatgctccatcccagtttgcggccaagaccaggtcacggtcgcaatgacgccccgcagcgaaggatcctcagtcaatctgagccctccactcgaacaatgtgtgcctgatcggggccagcagtatcagggcagactggcggtgacgacccatggactcccgtgcctggcctgggcctcggcccaggctaaagccctgtcaaagcatcaggacttcaacagcgcagtgcaactggtggagaacttttgtaggaaccccgacggagacgaagagggggtgtggtgctacgtcgctggcaagccgggggactttggatactgcgatctgaactactgcgaggaagccgtggaagaagaaactggagacgggctggatgaagatagcgacagagccatcgagggtcgcaccgcgacgtcggaataccaaactttcttcaacccaagaacctttggctccggagaggcggactgtggactccggccgctgttcgaaaagaagtcgttggaagataagaccgaacgcgaactcctcgaatcgtacattgatggacgcatcgtggagggctctgatgcagaaatcggaatgtcaccttggcaagtcatgttgttcagaaagtcaccgcaagaactgctgtgcggagcctcgctgatctcagaccggtgggtgttgaccgctgctcactgcctgctctaccctccatgggacaagaatttcactgaaaacgacctcctggtgcgcatcgggaagcacagccggactcggtacgagcgtaacatcgaaaagattagcatgcttgaaaagatctacatccatcccaggtacaactggcgcgaaaatctcgaccgggatatcgccctcatgaagctcaaaaagccggtggctttctctgactacatccaccctgtctgccttccggatcgcgaaaccgcggcgtcgctgctccaggcgggatacaagggtcgggtgactggttggggaaacctcaaagaaacctggaccgccaatgtcggcaaggggcagccttccgttctgcaggtggtcaacctgccaatcgtggagcggccggtgtgcaaggattcgactcgaatcaggatcaccgacaacatgttctgcgcgggctacaaaccagacgaaggaaagcgcggagacgcgtgtgaaggagactcaggcggaccattcgtgatgaaatcacccttcaacaaccggtggtaccaaatgggaatcgtctcatggggggagggctgcgatcgcgatggcaagtacggattttacacccacgtgttcaggctgaaaaagtggattcagaaggtgatcgaccaatttggagag

SEQ ID NO: 8639 - DNA, 1866 bp, synthetic construct
  misc_feature 1..1866: note = source = /note="Description of Artificial Sequence: Synthetic coding sequence"
  source 1..1866: mol_type = other DNA
atggctcacgtcagaggacttcaacttcctggatgtctcgcactggctgcactgtgctccctggtccacagccaacacgtctttctggcaccgcaacaggcgcggtcccttcttcaaagagtgcgaagggctaatactttccttgaagaagtgcgaaaaggaaatcttgaacgggagtgcgtcgaggagacttgtagctacgaggaagcatttgaagcactcgagtcctccaccgcaactgacgtgttctgggcaaagtacaccgcttgtgaaaccgcacgcactcctagggacaaactcgcggcatgcctggaagggaactgcgcagaaggactgggaactaattacaggggacacgtgaatatcactagatccggtattgaatgccagctctggcgctccagatacccccataaaccggaaatcaactcaactactcaccccggcgcagatctgcaagaaaacttttgtcgtaatccagattcctccaccaccgggccatggtgctacaccactgaccctaccgtgcgcagacaggaatgttcgataccggtgtgtggtcaagaccaggtcactgtcgcaatgactccccgatccgagggctcttcagtcaacctctcacctcctctggaacagtgtgttccagatcgcggccagcagtaccaaggacgacttgccgtgaccacccatggattgccttgtctggcatgggcatctgcccaagctaaggcattgagcaagcatcaggacttcaatagcgccgtccagctggttgaaaacttttgcaggaaccccgacggggacgaagaaggtgtgtggtgctacgtggcgggaaagccaggtgactttgggtactgtgatctgaactactgtgaagaagcggtggaagaagagactggagacgggcttgatgaggactccgatcgcgcaatagagggacgcacggccacctccgaataccagacctttttcaacccgagaaccttcggatcgggtgaggctgactgtggcctcagacctctgttcgaaaagaagtcacttgaggacaagaccgagagggagctgcttgagagctatattgatggtcgcattgtggagggtagcgatgcagaaatcggtatgtcaccctggcaagtaatgctgttcagaaagagccctcaagaactgctttgcggagcctcattgattagcgatagatgggtccttactgcagcacattgccttctttaccctccttgggacaagaactttaccgaaaacgacctgctggtgagaatcggtaagcattcacgaactagatacgagaggaatattgagaaaatctccatgctggaaaagatttacatacaccctcggtacaactggcgggagaacctggacagagacattgcgcttatgaaactgaagaaacccgtggcattcagcgattacattcaccctgtctgccttcctgaccgagaaaccgccgcgtcacttctgcaagcaggatacaaaggacgcgtcactggatggggcaacctgaaagaaacgtggaccgcaaacgtgggaaaaggacagccgtcagtgcttcaggtggtgaatttgccaatcgtcgaacgccctgtgtgcaaggatagcacgcgtatccgcattactgataacatgttttgcgcaggttacaagcccgatgaagggaagagaggggatgcctgtgagggagattcgggaggaccttttgtgatgaagtcaccatttaacaaccgttggtatcaaatgggaattgtgtcgtggggtgaaggatgcgatagagatggtaagtatggattttacacccatgtctttcgcctgaagaaatggattcagaaggtgattgatcaattcggagaa

SEQ ID NO: 8640 - DNA, 1866 bp, synthetic construct
  misc_feature 1..1866: note = source = /note="Description of Artificial Sequence: Synthetic coding sequence"
  source 1..1866: mol_type = other DNA
atggcccacgtgagaggcctacagctaccgggctgtctggccctcgctgccctttgcagcctggtgcatagccagcacgtgtttctggcaccacaacaggctaggagtcttctgcagagggtgcgtcgggctaacacattcttggaagaggtacgaaaaggaaacctggaaagagagtgcgtcgaagagacctgcagttacgaagaagcctttgaggcccttgaatcttccaccgccaccgacgtgttttgggctaagtatacggcatgcgaaaccgcccgaactccaagggacaagctagctgcgtgcctggaagggaattgtgccgagggcctgggtacaaactaccgcggacatgtgaatatcaccagatctggcatagaatgtcagttatggagatcccggtatccccacaagcccgaaattaactctaccacacaccctggtgcggatctacaggaaaatttctgccggaacccagactccagcaccactgggccttggtgttacactactgatcccacagttcgccgacaggaatgttcaattccagtgtgtggtcaggatcaagtgaccgtggccatgacaccaaggtccgagggtagctctgtgaatctgtccccaccgctcgaacagtgtgttcctgacagagggcagcagtatcaggggaggcttgccgttaccacccacggtctgccatgtctggcatgggcttcggcccaggctaaagcactgagtaagcatcaggacttcaatagcgccgtacagctcgtggagaatttttgcagaaatcccgacggcgatgaggagggcgtgtggtgctacgtcgctgggaaacctggagatttcggttactgtgaccttaactactgcgaagaagctgtcgaggaggagaccggagatggcctggatgaggactctgatagagccatcgagggccgaactgcaacatccgaataccaaactttttttaatccaagaacgtttggtagcggcgaagccgactgtggactcagaccactgtttgagaaaaaatccttggaagataaaacagagagggaattgttggagagttatatcgacggcaggattgtggaagggagcgacgcggagataggaatgtccccatggcaggttatgctgttccgaaaaagcccccaggaacttctctgcggtgcaagccttatcagcgacagatgggttctaacagccgcacactgcttactgtatcccccttgggacaaaaacttcaccgaaaacgatcttctcgtcagaattggcaaacacagtaggacccgatacgaaagaaatatcgagaagatctcaatgctggaaaagatttacatacatccccgatataactggcgagaaaacctggaccgagacatcgcactcatgaagctgaagaagccagttgctttcagtgattacattcaccctgtctgtctacccgacagggagactgctgcgtctctgcttcaagctggctacaaaggcagggttactggatggggtaaccttaaggaaacttggacagcaaatgtgggcaagggccagccctctgtgctgcaggttgttaaccttccaattgtggaaagaccagtttgtaaggactcaacgaggatccgcatcactgataatatgttctgtgctgggtacaagccagatgagggtaaaagaggcgatgcatgtgaaggtgacagcggcggccctttcgtaatgaaatcgcccttcaacaacagatggtaccagatggggatagtcagttggggtgaaggttgcgaccgagacgggaagtatgggttttacacgcacgtgttcagattgaagaagtggatccagaaagtcatagatcagttcggagaa

SEQ ID NO: 8641 - DNA, 1866 bp, synthetic construct
  misc_feature 1..1866: note = source = /note="Description of Artificial Sequence: Synthetic coding sequence"
  source 1..1866: mol_type = other DNA
atggcccatgtccgtggcctccagctgccgggatgcctcgccttggccgcgctttgctccctggtgcactcccagcatgtgttcctggcgccacagcaggcgcgaagcctgcttcagagagtccgacgcgctaacacttttctggaggaggtccggaaaggaaacctcgagagagagtgcgtggaagaaacgtgctcgtacgaggaggcgtttgaagcactggaatcctccactgccactgatgtgttctgggccaagtacaccgcctgtgaaactgcccgaaccccgcgggacaagttggcggcatgccttgaaggcaattgcgccgaaggcctgggaactaactaccgcggacatgtgaacatcacccggtccggaatcgaatgccaactgtggcgctccagatacccccacaaacccgaaatcaacagcaccacccatcctggcgccgacttgcaagagaacttctgcagaaaccctgacagctccactaccggaccgtggtgctacactaccgaccccaccgtccgcaggcaagagtgttcgatccccgtgtgcggacaggaccaagtgacggtggccatgaccccgcgctccgaaggcagctccgttaacctgtctccaccgctcgagcaatgcgtgccggaccgggggcagcagtaccagggacgcttggcggtcactacccacggacttccgtgcctggcatgggcctcggcacaggccaaggcactgtcgaagcaccaggatttcaattccgctgtgcagttggtggagaacttctgtcggaacccggacggagacgaagagggcgtctggtgctacgtcgctggaaaaccaggtgatttcggatactgcgacctgaattactgcgaagaagctgtggaagaagagactggagatgggctcgacgaagattccgaccgcgccatcgagggcagaacggcgacctcggagtaccaaacttttttcaatccgcgcaccttcggatcaggtgaggcggactgcgggctcaggcctctgttcgagaagaagtcgctggaggacaagactgaaagagaactcctggagtcatacatcgacggccggatcgtggaaggctccgatgcggaaatcggtatgtccccgtggcaagttatgcttttccggaaatcgccgcaggagctgctctgtggcgcatcgctgatctcggatcgctgggtgttgacggcagcacactgtttgctctatcctccatgggacaaaaacttcactgagaatgatctgctcgtgagaatcgggaagcactcccgcacccggtacgaaagaaacattgaaaagatctccatgctcgaaaagatctatatccaccccagatataactggcgggaaaacctcgaccgcgatatcgctctgatgaaactgaaaaagcccgtggcattctccgattacatccatcccgtctgccttccagaccgggaaaccgcggcgtccctgctgcaggcgggatataaggggagggtgaccgggtggggaaatctcaaagagacttggacggccaacgtgggaaaggggcagccttcggtcctccaggtggtgaatctgccaattgtggaacgccctgtgtgtaaggactcgactagaattcgcatcaccgataacatgttctgtgccggctacaagcctgacgaaggcaagcgcggcgatgcatgcgaaggagacagcgggggacccttcgttatgaagtcccctttcaataaccggtggtaccagatgggaatcgtctcctggggtgaaggatgtgaccgggacggcaaatacggattttacacccatgtgttcagactcaagaagtggatccagaaggtgatcgaccagtttggagag

SEQ ID NO: 8642 - DNA, 1866 bp, synthetic construct
  misc_feature 1..1866: note = source = /note="Description of Artificial Sequence: Synthetic coding sequence"
  source 1..1866: mol_type = other DNA
atggcacacgtcagaggccttcagctccctggatgtctcgccctagctgccctgtgttctctcgtccactcgcagcacgtctttttggcgcctcagcaggcccgctcactactgcagagagttcgcagggccaacacatttctggaggaggtccggaaggggaacctggaacgggagtgtgtcgaagagacttgttcgtatgaagaggctttcgaagcgttggagagctcaacagccaccgacgtgttttgggcaaagtacacagcatgtgagaccgccagaactccgagggacaagctggctgcctgcctggagggcaactgtgcggagggcctgggaaccaattatagaggtcacgtcaatatcactcggagtgggattgaatgccaattatggaggagtcggtatccccacaaaccagaaatcaactcaaccacgcatcctggcgccgaccttcaagaaaatttctgccgaaatcccgattcatctaccaccgggccttggtgttataccaccgatccaaccgtcagacggcaggaatgctccatcccggtgtgcggacaggaccaggtgacagtggcaatgacacctcgtagtgaaggcagctctgtgaatctgagtcctcctctggaacaatgcgtcccggaccgcggacagcagtatcagggacgacttgctgtgacaacccatggactgccatgcctggcatgggcttccgcccaagccaaggcactgagcaagcaccaggacttcaattccgccgtacagttggtcgaaaacttctgcaggaaccctgacggagacgaggaaggcgtgtggtgttatgtggccggcaaacctggtgattttggttactgtgacctgaactattgtgaagaggctgtagaagaggaaacaggagacggattggatgaggacagcgatagggccattgaggggaggacggcaaccagcgagtatcagacattcttcaaccccaggacatttgggtccggtgaggccgattgcggtttacggcctctgtttgagaagaaatccctggaggataagacagagcgagagctgttggagtcctacatcgatggtcgcatagtggaggggagtgatgcggagattggtatgagtccatggcaggttatgctctttcggaaatctccccaagagctactttgcggcgcttcattgatttcagatagatgggtgctaacagctgctcactgtctcctgtaccctccttgggacaagaattttacggaaaatgatctcctagtgcggatcgggaaacactcccgtactaggtatgaacgaaatatcgagaaaataagcatgctcgagaagatatatatacatccacgctacaattggcgggagaatttggacagagacattgccctgatgaagcttaagaagccggtcgcattctctgactatatacatcctgtgtgtctgcctgacagggagacagccgcctcgctattgcaggcaggctacaagggtcgggtcactggatggggtaatttgaaggagacctggacagctaacgtggggaagggccagccaagcgtgctccaggtggtgaacctacccatcgtggaaaggccagtgtgcaaggactccacaaggatcaggattactgacaacatgttttgcgcaggctacaagcccgatgaaggcaagagaggcgatgcttgtgaaggtgattctggcggcccctttgtgatgaaatcaccatttaataatcggtggtaccagatgggtatagtcagctggggagagggatgtgatagagatggcaagtacggcttctacacacacgtctttcggcttaagaaatggatccaaaaggtaatcgatcagttcggcgag

SEQ ID NO: 8643 - DNA, 1866 bp, synthetic construct
  misc_feature 1..1866: note = source = /note="Description of Artificial Sequence: Synthetic coding sequence"
  source 1..1866: mol_type = other DNA
atggcacacgtccgcggcctgcaacttccagggtgtctggctcttgcagcactttgttcacttgtgcattcacagcatgtgtttttggcgccacagcaagcacggtcgctgcttcaaagagtccgccgggcaaacaccttcctggaagaagtgaggaagggaaaccttgagagagaatgcgtggaggaaacctgctcgtacgaggaagccttcgaggcactcgaatccagtacggccacggatgtgttttgggcgaaatacactgcatgtgagactgcccggaccccccgagataagctggcagcatgcctcgaaggaaactgtgctgagggcttggggactaattaccgcgggcatgtgaacattacccgctccggaatcgagtgccaactttggcggagccgataccctcacaaaccagagataaactccacgacgcatccgggcgctgacctgcaagaaaacttctgtaggaatcctgatagcagcaccaccggtccttggtgttacaccacggaccctactgtgcgcagacaggagtgctccatccctgtgtgtggtcaggatcaggtgactgtcgcaatgaccccgcgcagcgagggatcgtcggtgaacctttctccaccactggagcaatgtgtgcccgatcgggggcagcagtaccagggtcgcctggccgtgactacccacggactgccctgtctcgcgtgggcctcggcacaggcgaaggcccttagcaagcaccaggactttaacagcgccgtgcaactggtggaaaacttctgcagaaacccagacggtgatgaagaaggggtgtggtgctatgttgctggcaaacctggcgactttggctactgcgacctcaactactgcgaggaagcagtcgaagaagaaactggtgacggactcgatgaagattcggatcgagctattgagggaagaactgcgacttcagagtatcagactttcttcaatccccggaccttcgggtctggagaagcagattgtggacttcgtccattgttcgaaaagaagtcacttgaggataagactgaacgtgaattgctcgaaagctacatagatggacggattgtggaaggttcagacgcagaaatcgggatgtcaccttggcaagtcatgctgtttagaaagtcgcctcaggagcttctttgtggggcgtcacttatttccgaccggtgggtgctgaccgcggcacattgtctgctgtaccctccatgggacaagaactttaccgagaatgatctgcttgtcagaattggcaaacattcgagaaccagatacgaaagaaatatcgagaagataagtatgctggaaaagatttacattcaccccaggtacaactggagagagaaccttgacagggatatcgcactgatgaagctgaagaaacctgtggcattttccgattacattcatcctgtgtgcctgcccgacagagaaactgcggctagcctcctgcaagcggggtacaagggacgggtgacgggatggggaaacctcaaggagacttggactgcgaacgtgggcaaaggacagccatcagtgcttcaagtggtgaatttgccgattgtcgaaaggccagtgtgtaaggattcgactagaattagaataaccgataacatgttttgtgcaggttacaagccagatgaaggaaagcgcggcgacgcgtgtgaaggagatagtggaggacccttcgtgatgaaatcaccctttaacaacagatggtaccaaatgggaattgtctcatggggagaaggttgtgatcgcgatggaaagtacggattttacacccatgtgttcagattgaagaagtggattcaaaaggtcatcgatcagtttggagaa

SEQ ID NO: 8644 - DNA, 1866 bp, synthetic construct
  misc_feature 1..1866: note = source = /note="Description of Artificial Sequence: Synthetic coding sequence"
  source 1..1866: mol_type = other DNA
atggcacatgtcagaggtttgcaacttccagggtgtctcgctctggcagcactttgttcattggtccacagccagcacgtctttctggctccccaacaggcaaggtccctcctgcagagggtgaggcgagcaaatacctttctggaagaagtgagaaagggcaacctggaacgtgagtgcgtggaagaaacctgctcgtacgaggaggcctttgaggctcttgagtcctccacggcaaccgatgtgttctgggccaaatacaccgcatgcgaaaccgcaagaacccctcgcgacaagctcgccgcatgcctggaggggaattgcgcagaaggactgggaactaactacagaggacatgtcaacattactcgcagtggaatcgagtgtcaactttggcggtcgagatacccccacaagccagaaatcaacagcaccactcacccaggagcagatctgcaagagaacttttgtaggaacccagattcgtccaccactgggccttggtgttacactactgaccctactgtcagacgtcaggaatgttcgattcccgtctgtggccaagatcaagtgaccgtggcaatgactccaagaagcgaaggaagctcagtgaacctttcccctccactggaacaatgtgttccggatcgcggtcagcaataccaagggcgtctcgccgtgactactcatggtttgccttgccttgcatgggcttccgcccaggccaaggcattgagcaagcaccaagacttcaattcagcggtgcaacttgtcgaaaacttttgcaggaaccctgacggggacgaagaaggagtgtggtgttacgtcgcaggcaagcccggagattttggttactgtgacctgaattactgtgaagaagccgtggaagaagaaactggggatggattggatgaggactcggatcgcgcaattgaaggacgaaccgccacttctgagtatcagacctttttcaatccaagaacctttgggagcggagaggcagattgtggccttaggcccctttttgagaagaaatccctggaagataagaccgaacgtgaattgttggagtcatacatagatggtcggattgtggaaggatcggatgcagagattggcatgtccccgtggcaagtgatgctttttagaaagtcacctcaagagcttctctgtggtgcttccttgatttccgatcgctgggtcctcaccgcagcacattgcctgctgtatccaccatgggacaaaaactttactgagaacgacctgctcgtgaggatcgggaagcactcacggacccgatacgagcgcaacatcgaaaagattagcatgctggagaaaatctacattcatcctagatacaattggcgggagaacctggaccgtgacattgcacttatgaaacttaagaagcccgtggccttttcggattacattcatccagtctgtctgccagatagagaaaccgcagcctcgctccttcaagcagggtacaaaggtagagtgactggatggggaaatcttaaggagacgtggaccgctaatgtggggaagggccagccctcggtgctgcaggtcgtgaaccttcctattgtggaaagacctgtgtgtaaggatagcactcgcatcaggatcactgacaacatgttctgtgcgggatacaagcccgacgaaggaaaacggggagacgcgtgtgaaggggactcgggtggtccttttgtgatgaaatccccgtttaacaacagatggtaccagatgggcattgtgtcatggggcgagggatgtgatagagatggtaagtacggattttacacccatgtgttcaggcttaagaagtggatccaaaaggttattgatcaatttggagaa

SEQ ID NO: 8645 - DNA, 1866 bp, synthetic construct
  misc_feature 1..1866: note = source = /note="Description of Artificial Sequence: Synthetic coding sequence"
  source 1..1866: mol_type = other DNA
atggcccatgtaaggggtctgcagctgcccggatgtttggccctggccgctctctgttccttggttcattcacagcatgtgtttctggcacctcagcaggcccgcagtctgttgcagagggtgagaagagccaatacattcctggaggaagtgaggaaggggaatctggagagagagtgcgtggaggagacctgtagttatgaagaagcatttgaggcacttgagtcctccactgcgacagacgtattttgggccaaatataccgcttgtgaaaccgctagaaccccaagggataagctggccgcgtgtttggagggcaactgtgcagagggactcggcaccaactaccgggggcacgtcaatattactcggagtggaatcgagtgtcagctgtggagatctaggtatcctcacaaacccgagatcaattcaacaacacatcccggggctgaccttcaggagaatttctgccgaaaccccgacagctctacaactggcccatggtgctacaccactgatcccacagtccgaagacaggagtgtagtattccagtgtgcggacaggaccaggtgacagtagcaatgaccccacggtctgaggggtcaagtgttaacctgtccccacctctcgagcaatgtgtgcccgatagaggtcagcagtatcaggggagactggccgtcacaacgcacgggctcccctgcttggcttgggcgtcagcacaagccaaagccctttccaaacatcaagatttcaattccgctgtgcagttggtggagaatttttgccggaaccccgatggggacgaggaaggtgtgtggtgctacgtagccggcaagccgggagactttggatactgcgacctcaactattgcgaggaagcagtggaagaggagaccggcgatggattggacgaagattctgatagggccattgaaggaaggaccgccacctccgaatatcaaacctttttcaatccaagaaccttcggctctggcgaggctgattgtgggctgcgcccactgttcgaaaaaaaatccctggaagacaaaactgagcgggagctgctggaatcctacattgacggaagaatcgtggagggatcagacgcagagattgggatgtccccatggcaagtgatgctttttcgcaaaagccctcaggaacttctgtgcggtgccagcctcatcagcgacaggtgggtgctcaccgctgctcactgcctgctctatccaccttgggataagaacttcaccgagaacgacctgctcgttcggataggtaagcacagccggacgaggtacgaacgcaatatcgaaaagatctccatgctcgagaaaatttacatccaccccaggtacaattggagagaaaacctggatagagacatagccctgatgaagttgaagaaaccagtcgccttcagtgactatatccaccccgtttgcttgcctgacagggaaactgcagctagtctccttcaggctggctacaaggggcgggtgactggatggggcaatctcaaggaaacctggacggccaatgtgggcaagggacagccttcagtgctgcaagttgtcaacctccctatcgttgaaaggccggtgtgcaaggactcaactcgcattagaataacggataacatgttctgcgccgggtataaacctgatgagggcaaaagaggggacgcgtgcgagggagactccggggggccctttgtgatgaagtctccgtttaacaaccggtggtaccagatgggtattgtaagttggggtgaaggctgtgatagagacgggaagtatggattttacactcacgtgttccggcttaagaagtggattcagaaggtcattgatcaattcggtgag

SEQ ID NO: 8646 - DNA, 1866 bp, synthetic construct
  misc_feature 1..1866: note = source = /note="Description of Artificial Sequence: Synthetic coding sequence"
  source 1..1866: mol_type = other DNA
atggcgcacgtacgaggcttgcagctcccgggatgtctggcactggcggcgctctgctccctcgtccactcccagcacgtgtttctcgccccccagcaggctagatcactgttgcagagagtgcggagggccaataccttccttgaggaagtccggaaaggaaacctggagcgcgagtgcgttgaggagacttgctcgtacgaggaagcattcgaggctctggagtcgtcgaccgccactgatgtcttttgggccaaatacactgcctgtgagactgcacgtaccccacgcgacaagctggcagcctgtctcgagggcaactgcgctgagggtcttggaaccaactaccgcggccacgtgaacattactcggtcgggaatcgagtgccaactctggagaagcaggtaccctcacaagccggaaatcaactccacgactcacccaggagcagatctccaagagaatttctgccggaaccccgacagctcgactactggaccgtggtgctacactaccgatcctactgtgcggaggcaagaatgctcgatcccagtctgtggtcaggaccaagtgactgtggccatgacgccgcgcagcgagggctccagtgtgaatctgagccctccactcgaacagtgcgtcccggatcgggggcaacagtaccaggggcgcctggcggtcacgactcatggactgccgtgcctggcgtgggcctccgcccaagccaaagctctctcgaagcatcaagacttcaactcggcggtgcagctcgtcgaaaacttctgtcgcaacccagacggagacgaagagggcgtctggtgctacgttgccggaaagccgggagattttggctactgcgacctcaattactgcgaggaagccgtcgaagaggagactggagacggactcgacgaggattctgacagagcaatcgagggacggaccgcgacctccgaataccagacgttcttcaacccgcggactttcggctcgggcgaggccgattgcggcttgcgcccgctgttcgaaaagaagtcattggaggacaagactgaaagagagttgctggagtcctacatcgatggtagaatcgtggaaggctcagacgccgaaatcggtatgagcccgtggcaagtcatgctcttccgcaaaagccctcaggaactgctctgtggtgcctcgctgatctcagacaggtgggtcctgactgccgcacattgcctgttgtacccaccctgggacaagaatttcactgagaatgatctgctggtgcgcattgggaagcacagccggacgagatacgagcggaacatcgagaagatctccatgctggaaaagatctacatccacccgcggtacaactggagagaaaacctggacagagatatcgctctgatgaagctgaaaaagccagtcgcgttctcagattacattcacccagtgtgcctgcccgatcgcgagacggccgcctcgctgttgcaagctgggtataaaggacgggtaacgggatggggaaacctgaaagaaacttggactgcaaacgtgggaaaaggccagccaagcgtgctgcaggtggtcaacctgccgattgtggaaagaccggtgtgcaaggactccaccagaattcgcatcactgacaacatgttctgtgcgggttacaagccagacgaggggaaacggggggacgcgtgcgaaggagattcaggtggcccgttcgtcatgaaatctccttttaacaatcggtggtaccaaatgggtatcgtgtcatggggagaaggatgcgaccgggatggcaagtacggattctacacccacgtgttccggttgaagaaatggatccaaaaggtgattgaccagtttggcgag

SEQ ID NO: 8647 - DNA, 1866 bp, synthetic construct
  misc_feature 1..1866: note = source = /note="Description of Artificial Sequence: Synthetic coding sequence"
  source 1..1866: mol_type = other DNA
atggcacacgtacggggtttgcagctcccgggctgtctggctctcgcagctctgtgctcgctggtgcacagtcagcacgtatttctcgccccgcaacaggccagatccttactgcagagggtaaggcgagctaacacctttctcgaagaagtgcggaaggggaatctggagcgagagtgtgtggaggaaacgtgctcctacgaggaggcgttcgaggccctggaatcctcaacagctaccgacgtgttctgggcaaaatacaccgcttgcgaaacggctcgtacaccgcgggataagctcgcagcttgtctcgaggggaactgcgctgaaggactggggactaattatcgtgggcacgtgaatataaccagatctggcattgaatgtcaactgtggcgctcgcgctacccccacaagcccgagatcaattcgacaacacatcctggagcggatttacaggaaaacttttgtcgtaaccccgattccagcacaacagggccatggtgttataccacagaccctaccgtcaggagacaggaatgcagcatacctgtctgcggacaggatcaagtcactgtggccatgacacctcgtagcgaaggctcaagcgtaaatttgtctcccccactcgaacagtgtgtgccggataggggccagcagtatcagggccggctagctgtgacaacccacggcctgccttgtctggcctgggctagtgctcaggcaaaagcactgtctaagcaccaagactttaactcagcagtacagttagttgagaatttttgccgtaatcctgatggagatgaggagggcgtatggtgctacgtggccggaaaacccggtgatttcggttactgtgatctgaactattgcgaagaggctgttgaagaggaaaccggggacggcctggatgaggattccgaccgcgcaatcgaagggcggactgcaacctccgaataccagaccttttttaatccccggacttttggatccggggaggcggattgcggcctgagacctctgtttgagaagaagagcctggaggataaaaccgaacgggaactattggaatcatatatcgacggccgtatcgtcgaaggttctgacgccgaaattggaatgtcaccatggcaggttatgctttttaggaaaagccctcaggaactcttgtgcggcgcatcactcatctctgatcggtgggtactcactgccgctcattgcctgctctatcccccttgggacaaaaacttcacagagaacgacctgctggtgcggattggtaagcatagcaggaccagatacgaacggaatatcgagaaaattagtatgctggaaaaaatctatatacaccctcggtacaactggagagagaaccttgatcgggacatcgctctgatgaagctcaagaagccagtggccttctctgactacatccatcccgtttgcttaccggatcgtgagacagcagcttccctgctccaagctggctataaggggagagttactggatggggaaacctcaaggaaacctggacggcaaatgtgggcaaaggtcaaccttcagtgttacaggtggtgaatctgcccatcgttgagagaccagtgtgtaaagattccacacgtatacgtatcacggacaatatgttttgcgcgggctataagcccgatgaggggaaacgaggcgatgcctgcgaaggagactctggaggtccctttgtgatgaagtcgcccttcaacaaccggtggtatcagatggggatcgtttcctggggggaagggtgcgaccgggatgggaagtacggcttctatacacacgtctttagactgaaaaaatggatacaaaaggtcatagaccagttcggtgag

SEQ ID NO: 8648 - DNA, 1866 bp, synthetic construct
  misc_feature 1..1866: note = source = /note="Description of Artificial Sequence: Synthetic coding sequence"
  source 1..1866: mol_type = other DNA
atggcacatgtgaggggccttcagctgcctgggtgtcttgcactggcggccctctgctccctggtgcattcgcaacatgtgtttctcgctccacaacaagcgcggtccctgcttcagagagtgagaagagccaataccttcttggaggaagtcaggaagggaaacttggaacgggagtgtgtcgaagaaacctgttcgtacgaagaagcattcgaggcactggaaagctccactgccaccgatgtgttctgggctaaatacactgcatgtgaaactgcccgtaccccaagagataagctggcagcatgtttggaaggcaactgcgccgaaggattgggtaccaactacaggggacatgtcaacattactcgatcaggaatcgaatgccaactgtggagatcgcgttaccctcataagcctgagataaactccaccacccatcctggcgcagatctccaggagaacttttgcagaaatccagactcgtccactaccggaccatggtgttacactaccgatcctactgtgagaaggcaggaatgctccatccctgtgtgtgggcaggatcaagtcactgtggcaatgacccctagatcggagggttcatcggtgaatctgagcccaccactggaacaatgtgtgcctgatcgaggccaacaataccaaggacgcttggcagttactacccatggactgccatgtctcgcttgggcctcagcacaggcaaaagcactctcgaagcatcaggatttcaatagcgcagtccaacttgtggaaaacttttgtaggaatccagatggtgatgaggaaggggtgtggtgctacgtggccggaaaacctggtgactttggctactgtgatctcaattactgtgaagaggctgtggaggaagaaaccggggacggcctggacgaggattcggatcgggcaatagaaggtcgaaccgcaacttcggagtaccaaacgttcttcaatccacggacgtttggatccggtgaagccgattgcggtctgcggccattgtttgagaagaagagcctggaagataagacggaaagagaacttctggaatcttacattgacgggcgaattgtggagggttcggatgcggagatcggaatgtcaccatggcaggttatgcttttcagaaagtccccccaggaactgctgtgtggagcgtcacttatctctgacaggtgggtgcttactgctgcgcattgccttctgtacccgccgtgggacaaaaacttcactgaaaacgatctgctcgtgcggattggtaagcattcaaggactcggtacgagagaaacatcgaaaagatttcaatgctggaaaagatctatatacatcctcgctacaattggagagagaaccttgaccgcgacatagcgctgatgaagttgaaaaagccggtggcattttcagattacatccatcctgtctgtctgccagatagggaaaccgcagcgagccttttgcaggcaggatataagggcagagtgactggctggggtaatctcaaggagacgtggaccgccaacgtcggtaaaggtcagcctagcgtacttcaggtggtgaatctgccgattgtggagcggcccgtgtgcaaggattcgactcggatcagaatcactgacaacatgttttgtgccggctacaagcctgatgaaggtaagaggggagacgcatgtgagggggactcaggtggaccattcgtgatgaaatccccattcaacaatcgttggtaccaaatgggcattgtcagctggggcgaaggatgcgatcgagacggaaaatacggattttacacccacgttttcaggctgaagaagtggatccaaaaggttattgaccaattcggggaa

SEQ ID NO: 8649 - DNA, 1866 bp, synthetic construct
  misc_feature 1..1866: note = source = /note="Description of Artificial Sequence: Synthetic coding sequence"
  source 1..1866: mol_type = other DNA
atggctcatgttaggggacttcagctgcctggctgcctggccctggctgcgctatgctccctagtgcactcacagcacgtgttcttagcaccacagcaggcgcggtccctcctacagcgagtgcgcagagctaacacatttctggaagaagtacggaaaggtaatctcgagcgggagtgcgtcgaggagacatgctcctatgaagaggcattcgaggccctcgagagcagcactgccacagatgtgttttgggccaaatacacagcctgcgagacagcccggaccccaagagataagctggccgcgtgcttggaaggtaattgtgcggaaggtctgggcacaaactaccgaggccatgtaaacattacgcggtctgggatcgagtgtcagttgtggcgtagccgctatccccacaagcccgaaattaattctaccactcatcccggtgccgatttgcaggaaaatttctgccgtaatccggattcctccaccacagggccttggtgttataccaccgacccgaccgtgaggcgacaggaatgctcaataccagtctgtggtcaggaccaggttacggtggccatgactccaagaagcgagggaagttcggtcaacctgtcacccccactggaacagtgcgtgcctgaccggggacagcagtaccagggacgcctcgccgtgacaacccatgggctgccgtgcctggcttgggctagcgcccaggctaaggcactttccaaacatcaagattttaatagtgccgtgcagctggtggagaacttctgccggaacccggatggcgatgaggagggggtttggtgctacgtagcagggaagcctggagatttcggttattgtgatctgaactattgcgaggaagccgttgaagaggagacgggggacggtctggacgaggattcagatagagcaatagaaggtcggacagctacttccgaatatcagactttttttaaccctcgcactttcggtagtggcgaagccgactgtggccttcgtccattgttcgagaaaaaaagcctggaagataaaacagagcgtgaactgctggagagctacatcgacgggaggatcgtcgagggcagcgacgccgagatcggaatgtccccctggcaggtcatgctgtttagaaaaagcccgcaggaattactgtgtggggccagtttgatttcagatagatgggtcctgacggccgcccattgcctgctttaccctccttgggacaagaactttactgaaaacgacctgctcgttagaataggcaagcacagtcgcactcggtatgagcgaaatatagaaaagatttcaatgcttgagaaaatttacatccacccgaggtacaattggcgggagaacttggacagggatatcgccttgatgaagctcaaaaaaccggtagcattttcagattatatccacccggtatgcctccccgaccgggaaactgcagctagcctacttcaggcggggtacaaaggaagagtcacaggttggggcaaccttaaggaaacttggaccgccaatgtcggcaagggtcagccaagtgtcttgcaggtggtgaaccttcctatcgtcgagcggccagtgtgtaaagactcaactagaattcgaatcaccgacaacatgttttgtgctgggtacaaacccgacgagggcaagcgaggcgacgcgtgcgaaggtgattccggcggaccatttgtgatgaagtcaccattcaacaacagatggtatcagatgggtatcgtgagttggggagagggctgtgaccgtgacggtaagtatggcttttacacccacgtgttccgactcaagaagtggattcagaaagttattgatcagttcggagag

SEQ ID NO: 8650 - DNA, 1866 bp, synthetic construct
  misc_feature 1..1866: note = source = /note="Description of Artificial Sequence: Synthetic coding sequence"
  source 1..1866: mol_type = other DNA
atggcacatgtcaggggcttacagctaccaggctgccttgcgctggctgctctgtgcagcttagtgcattctcaacatgtgtttctggctcctcaacaggccaggtcactcctgcagcgtgtgcggcgagccaatacctttttggaagaagtcagaaaaggcaacttagagagagagtgcgtggaggagacttgttcctatgaggaagcatttgaagcactcgaatcctctacagctacagacgttttctgggctaagtacaccgcttgcgagaccgccagaacaccgcgggataaactggccgcttgtctagaggggaattgtgccgagggactaggcacaaattaccgcggccatgtcaatatcaccagaagcggaatcgagtgtcagctgtggcgctcgaggtatccacacaaaccggaaatcaattcaaccacgcatccaggtgcagatctgcaagagaacttttgtcgaaaccccgatagctccactaccggtccctggtgctatacgaccgaccctactgtcaggcggcaggaatgttctatacccgtgtgcgggcaggaccaggtgacggttgctatgacccctaggtcagagggctcaagtgtgaatcttagtccacctctcgaacagtgcgtcccagatcgagggcaacagtaccaagggagactggcagtgaccacacatgggttgccatgcctagcatgggcctcggctcaggctaaagctctttcaaaacaccaagacttcaacagcgccgttcaactggtagaaaatttctgtaggaacccagatggcgatgaagagggagtgtggtgctacgttgcgggaaaacctggtgactttggctattgcgatctgaactactgtgaggaagccgtagaggaggaaactggtgacggtttagatgaggactctgaccgcgcaattgaaggccggactgctaccagcgaatatcaaacgttttttaatcctagaacgtttggcagcggtgaggcagattgcggcctcagacccctgttcgagaagaaaagtcttgaggataaaacagaaagggagctgctcgagtcctatatcgacgggcgtatagttgaaggtagcgatgccgagataggaatgtctccctggcaggtcatgctcttccggaagtccccacaggagctgctctgtggagcgtcactgattagcgaccgctgggtcttgacggcagcgcactgtttgctgtatcccccctgggataagaatttcactgagaatgacctcttggtacgaatcggcaagcattcgagaacccggtatgagaggaacattgagaagattagtatgctcgagaagatctatatccatccgagatacaactggcgggaaaaccttgatcgcgatattgctcttatgaaactaaaaaaacccgtggcattctctgactacattcaccctgtgtgcctgcctgaccgggaaaccgcggcctcactacttcaggcggggtacaaggggcgcgtcacaggctggggaaatttgaaagaaacatggactgctaacgtcgggaagggccaaccttcagtgctgcaggtggtgaatctcccaatcgtggagagacccgtttgtaaagattcaacgaggattaggatcaccgacaatatgttctgtgccgggtataagcctgacgagggcaaacgaggagatgcatgcgaaggtgattcagggggcccattcgtgatgaaaagtcctttcaacaacagatggtatcagatgggcatcgtgtcctggggcgagggttgcgaccgagacggaaagtacggcttctacacccacgtgtttcggctgaagaaatggatccagaaagtgatcgatcagtttggcgag

SEQ ID NO: 8651 - DNA, 1866 bp, synthetic construct
  misc_feature 1..1866: note = source = /note="Description of Artificial Sequence: Synthetic coding sequence"
  source 1..1866: mol_type = other DNA
atggcgcacgtgagaggccttcagctgcctggctgtctggccctcgcggcactgtgttccctggtgcactcacaacatgtgtttctggcacctcagcaggcacgatcacttcttcaacgtgtcaggagagccaatacctttttggaagaggtgcgtaaggggaatttggaaagagaatgtgtggaagaaacttgttcatatgaagaggcctttgaagcactcgaatcgtcgactgcaaccgatgtgttctgggccaagtacaccgcgtgcgaaaccgcacggactcccagagataagctcgcggcctgtctggaaggcaactgtgccgaaggcctcgggaccaattatcgagggcatgtgaacataacgcgctcgggtatcgaatgccaattgtggcgaagcagatacccgcataaaccggagatcaacagtacgactcatcccggcgcagacttgcaggaaaacttctgcagaaacccagactcctccaccactggaccttggtgttacacgaccgacccgactgtccgccggcaagaatgttcgatacctgtgtgcggacaagaccaagtgactgtggcgatgaccccgcgctccgaaggtagcagtgtcaacttgtcaccaccgctggagcagtgtgtgccagatagagggcagcaataccagggtcgattggcggtgaccacccacggtctgccttgcttggcatgggcctcggcgcaggccaaagcacttagcaagcatcaggacttcaacagcgctgtgcagcttgttgagaacttttgccgcaatcctgatggcgatgaagaaggagtgtggtgttatgtcgcaggcaagccgggagattttggttactgcgacctgaattactgtgaggaggcggttgaggaggagactggtgacggcctggatgaggactcggaccgagcaatcgaaggtcgcactgcaacgtcagaataccagaccttctttaatccgaggacttttgggagcggagaggccgattgcggactgaggcctctctttgaaaagaagtcccttgaagataagaccgaacgggagcttctggaatcctacattgacggacggattgtcgagggatctgacgctgagattggtatgtctccatggcaagtaatgctttttcgcaagtcgcctcaagaacttctgtgcggagcatcgcttatttccgacaggtgggtgctcaccgctgcacactgtctcttgtaccccccatgggataagaatttcacggagaacgatcttttggtgcgcattggtaaacactctcggactcgttacgaacggaacattgagaaaatctcgatgcttgaaaagatttacattcatcctcgctacaattggagagagaacctcgatagggatatcgccctgatgaaacttaagaagcctgtcgcattttccgattacatacatcctgtctgtctgcctgacagagaaaccgccgcatcgcttctgcaagcaggctacaaaggtagggtgactggctggggaaatctgaaggaaacgtggactgcaaatgtcggtaaaggacaacccagcgtcttgcaagtggttaacctccctatcgtcgaacggccagtgtgcaaggatagcaccagaattcggataactgacaacatgttttgtgcaggatacaagccagatgagggaaaacgaggcgatgcatgtgagggagactcaggaggacccttcgtgatgaaatcgccctttaacaaccggtggtaccaaatggggattgtctcctggggggaagggtgtgatcgcgatggaaagtacggattttacactcatgttttccgactcaagaagtggatccagaaggtaattgaccagttcggcgaa

SEQ ID NO: 8652 - DNA, 1866 bp, synthetic construct
  misc_feature 1..1866: note = source = /note="Description of Artificial Sequence: Synthetic coding sequence"
  source 1..1866: mol_type = other DNA
atggcccatgtgcgcgggctgcaacttccagggtgtcttgccttggcggcactctgctccctggttcactctcagcatgtattcctcgctccgcaacaagcaaggtctctcctccagcgtgtccgacgggccaacaccttcctggaggaggtgagaaaggggaatctggagagggaatgcgtggaagagacgtgttcttatgaggaggctttcgaggccctggagtccagtaccgccaccgatgtattttgggcgaagtacaccgcctgtgagacagcccggaccccccgtgacaaactggcagcctgcctggaaggtaattgtgcagaaggactggggactaactaccgcgggcatgtcaatatcacgcgctcaggcatcgaatgtcagttgtggcgctcacgctacccccacaagccggagatcaactccactactcatcctggggccgatctgcaggaaaatttttgccgcaacccagactcttcaacaactgggccatggtgttacacgacagatcccacggtccgtaggcaggaatgttcaatccccgtttgtggtcaggatcaagtgacggtggcaatgaccccccgtagtgagggcagttcagtcaacctgtctccccctttggagcagtgtgtgccagataggggccagcaatatcaagggaggctcgctgtgaccactcatgggttgccttgtctggcttgggcctccgcccaggccaaggcattaagcaagcaccaagattttaattctgccgtccagttagtggaaaatttttgtcggaatcccgatggagatgaagaaggagtctggtgctacgtggcagggaagccaggtgactttggatactgcgacctcaattattgtgaggaggcagtcgaagaagaaacgggggatggcctggacgaggactcggaccgagctatagaggggcgaacggctacatcggagtaccagaccttcttcaatcctcgtacattcggatcaggtgaagctgactgcggcctgagaccgctattcgaaaaaaaatccctggaagacaagacagagcgggagttgctggagtcatacattgatggccggatagtcgaaggaagtgacgccgaaatagggatgtctccctggcaggtcatgctgttcagaaagtcgccccaagagctgctgtgtggggcctcgctgattagtgataggtgggtccttactgccgcccactgcctcctttaccctccgtgggataagaatttcacagagaacgacctactggtgcgcatcggtaaacactcacgcacccgttacgaaagaaacatcgagaaaatttccatgctggaaaaaatctacatccacccccgttataactggcgggagaatctggaccgagatatcgctctgatgaaactgaagaagccggtcgcgtttagtgattacattcaccctgtgtgcctcccggaccgtgagaccgcagccagtcttctgcaagccggctacaaaggcagggtgacaggatggggcaatctgaaagaaacctggacggccaacgtggggaaggggcagccatctgtgctgcaggttgtcaacctcccaattgtagagcgccccgtttgtaaggatagtacgagaattcgcatcaccgataatatgttctgtgccggttacaagcctgacgagggaaaacggggggacgcatgtgagggagatagtggtggcccctttgtgatgaaaagcccgttcaataacagatggtatcaaatggggatcgtaagttggggggaggggtgtgatcgggacgggaaatacggtttttacacccacgtctttcgcctaaaaaagtggattcagaaagttatagaccaatttggggaa

SEQ ID NO: 8653 - DNA, 1866 bp, synthetic construct
  misc_feature 1..1866: note = source = /note="Description of Artificial Sequence: Synthetic coding sequence"
  source 1..1866: mol_type = other DNA
atggcccacgtaaggggtctgcagctcccagggtgcctggctctggctgccctgtgttctctcgtgcattcccagcatgtctttctggcaccacaacaggcacgttcgctgctccagcgggtgcgcagggccaacacattccttgaggaggtccggaaaggcaacctggagagagagtgtgtcgaagagacttgcagctacgaagaggccttcgaggccctggaatcttccaccgcaacggatgtattctgggccaaatacaccgcttgtgagactgcaagaaccccacgcgataagctggccgcatgtttagagggaaattgcgccgaagggctgggcacaaattaccgagggcatgtgaacatcactaggtcaggcatcgaatgccagctgtggcggtccagatatcctcacaagcctgagatcaacagcacaactcatccgggtgcagatctgcaggagaatttttgcaggaaccccgactctagcacgacagggccctggtgctacacaacagatcccacggttaggcgacaagagtgtagcatccccgtgtgtggacaggatcaggtcaccgtcgccatgacacctcgtagtgaaggaagttctgtcaacttgagtccaccattggagcaatgtgtccctgaccgtggccaacagtaccagggaagactggctgtgaccacccacggcttgccttgcctcgcctgggctagcgcgcaggctaaggcgctttcaaaacaccaagacttcaatagtgcggtgcagcttgttgagaacttttgtcggaaccccgatggggatgaggaaggggtgtggtgttatgtggccggaaaacctggagacttcgggtattgtgacctcaactactgcgaggaagctgttgaagaagaaaccggggatggattagacgaggactctgatagggccatcgaagggaggaccgccaccagtgaataccagacattttttaatcccagaaccttcgggagcggcgaggccgattgcggactgaggccactgttcgagaagaaaagtctggaggacaaaactgaacgggagctgctggagtcttacatcgacggcagaattgtagagggatcagatgcagagatcggaatgagcccctggcaggttatgctctttcgcaaaagcccacaggagttgttgtgcggtgcaagcttgatcagtgatagatgggtgctcactgcagcccactgcctcctgtaccccccctgggacaaaaacttcaccgaaaatgatctgctggtacgaatcggcaaacattccagaacgcgctacgagcgcaacatcgagaagatctccatgttagagaagatatatattcatcctcgctacaactggcgagagaacctggatcgggatatagccttgatgaagctcaagaaacccgtcgccttttctgactacatccatccagtgtgcctccccgatcgcgagaccgccgctagcctgctgcaggctggctacaaaggacgtgttaccggttggggcaatctcaaagagacatggactgctaatgtggggaaaggacaaccatctgtgttgcaagtggttaacctgcccattgtcgagcgcccagtttgtaaagattctacaaggatcaggatcaccgacaacatgttttgtgctgggtacaagcccgatgaagggaaaaggggcgatgcttgcgagggagattccggtgggccgttcgtgatgaagtccccctttaacaatcgatggtaccaaatgggcatcgtaagttggggggagggctgcgaccgggatgggaaatatggtttttacactcacgtgttcagactcaaaaaatggattcagaaggtgatagaccagtttggagaa

SEQ ID NO: 8654 - DNA, 1866 bp, synthetic construct
  misc_feature 1..1866: note = source = /note="Description of Artificial Sequence: Synthetic coding sequence"
  source 1..1866: mol_type = other DNA
atggcacacgtcagggggctgcaattgccaggatgccttgccttagccgctctctgctccctggtacattctcagcatgtgtttctagccccgcagcaggcgcgctctcttctgcagagggtgcgacgagccaatacctttttggaggaggttcgcaaaggtaacctagagagggagtgcgtggaggagacctgcagttacgaggaggcttttgaagctctcgagtcatcaaccgccacagacgttttctgggccaagtacacagcctgtgagacagctaggactcccagggataaattggcggcctgtctcgagggcaattgtgccgagggcctgggaaccaattacagggggcacgtgaatatcacccgttccggcatcgagtgtcagctctggcggtcccgctacccccataagccagagattaactcaacaactcacccaggagccgatctgcaggaaaacttctgtagaaaccctgactcgtccaccacagggccatggtgctataccaccgacccaaccgtgaggcggcaagaatgttccattcccgtgtgtggacaggatcaggttacggtcgccatgaccccacgttcagagggctcctcggtgaacctgagcccaccactggaacagtgcgtgccagatcggggacagcagtatcagggtcggctggctgtaactacacatggtcttccttgtctggcctgggcatcagcccaagcaaaagctttgagcaaacatcaggatttcaactccgcagtacagttagtcgaaaatttctgtagaaatcccgatggcgatgaggagggggtttggtgttacgtggcaggaaagccaggcgacttcggatactgcgacctgaattactgcgaagaggctgtcgaagaggagacaggagatgggctggatgaggattctgaccgtgccatcgagggaagaaccgccacgtcggaataccagaccttctttaaccctcgaacattcgggtctggtgaggccgactgcggccttcgacccctgttcgaaaaaaaaagcctcgaggacaaaaccgaaagagagctgctggagtcttacatagatgggaggatagttgagggatccgatgccgagattggcatgtccccctggcaggtgatgctatttcgcaaatcaccccaagagctcttgtgtggcgcttccttgatcagcgatagatgggttctcaccgccgcgcactgcctgctgtacccaccatgggacaagaactttacagagaatgatttgttggtgcggatcgggaagcacagtcggacccgatatgagcgcaacatcgagaagatctcaatgctggaaaaaatatacatccacccgcgatataactggcgggaaaaccttgacagagatattgcactcatgaagctgaaaaagcctgttgccttttccgattacatacatccggtatgcttaccggaccgcgaaactgcagctagtctactgcaggctggctacaagggcagagtgaccggctggggtaacctaaaagaaacctggactgctaacgtcggcaaaggacaacccagcgtactccaagtggtgaacctacctattgtcgagaggcccgtgtgcaaggattctactaggataaggatcaccgacaatatgttttgcgcaggatacaaacccgacgaggggaagaggggggatgcctgtgagggggactcaggtgggccttttgtcatgaagtccccttttaataaccgatggtaccagatggggattgtcagttggggtgaagggtgcgaccgggatgggaagtatgggttttatacccatgtcttcagattgaagaaatggattcaaaaagtgatagatcagtttggagag

SEQ ID NO: 8655 - DNA, 1866 bp, synthetic construct
  misc_feature 1..1866: note = source = /note="Description of Artificial Sequence: Synthetic coding sequence"
  source 1..1866: mol_type = other DNA
atggctcacgtgagaggattgcagctgcctggctgccttgccctggctgcactgtgctccctggtgcactctcagcacgttttcttggcacctcagcaagcacgttccctgctccaacgtgttcgcagagcaaatacattcctggaagaggtccgtaaaggtaatctcgagagagagtgtgtggaggaaacttgcagctacgaggaagccttcgaagccctggagagctccaccgccaccgatgtcttctgggctaagtacacagcttgtgagactgcccgcacaccacgcgataaactggctgcctgcctcgaaggtaattgtgccgaaggactcggtaccaactacaggggacatgtgaacattaccaggtccggaatcgaatgccagttgtggaggtcaaggtatcctcataagcccgagatcaactctaccactcacccaggcgcagatttgcaggagaatttctgtaggaacccagatagcagtacaactggaccctggtgttatactacagacccaactgtcagacgtcaggaatgctctatacctgtgtgtggacaggatcaggtaacagtggccatgacacctcgctccgagggatctagtgtcaacctctctcctccccttgaacaatgtgtccccgaccgtggccagcaataccagggaagactcgctgtcaccactcacggtctgccctgcctcgcatgggcttctgcccaagctaaggccctgagtaaacaccaggattttaattctgccgttcaactggtggaaaatttctgcagaaaccctgacggcgatgaggagggtgtctggtgttacgtagccggaaagcccggcgacttcggttattgcgacctcaactactgtgaggaagctgtggaggaggagactggcgacggcctggacgaggattctgatagagcaattgagggcagaaccgccacctccgagtaccaaactttctttaacccccgcacttttggatctggtgaagccgactgcggactgcgtcccctgtttgagaagaagtctctcgaagataaaaccgagagggagttgctcgagtcctacatcgacggaaggatagtggaaggatccgatgctgagataggcatgagtccctggcaggttatgctgttccgcaagtctccacaagagctcctgtgcggagcctcactcatcagcgaccgttgggtgctcaccgcagcccactgtctgctgtatccaccttgggacaagaactttactgagaacgacttgttggtacgcattggcaagcactctagaacaaggtacgagcgcaatattgagaagatttccatgttggagaaaatctacatccatcctcgttacaattggagggagaacctggacagggatatcgcactgatgaagctgaagaagccagtcgcattctcagactacatccaccccgtgtgtctgcctgatcgcgagaccgccgccagcctcctgcaggccggttacaagggaagggttactggttggggaaatttgaaagagacctggaccgctaatgtgggtaagggacagccatccgtcctgcaagtggtgaatctccccattgtggagcgcccagtctgcaaggatagcacaagaatcaggatcactgataacatgttctgcgcaggctataagcctgatgaaggaaaacgcggtgacgcatgcgaaggagattctggaggaccctttgtgatgaagtcccctttcaacaacagatggtatcaaatgggtattgttagttggggtgagggttgtgatagagatggaaaatatggcttttatacccatgtgttccgcctgaagaagtggatacagaaagtgattgatcagtttggagaa

SEQ ID NO: 8656 - DNA, 1866 bp, synthetic construct
  misc_feature 1..1866: note = source = /note="Description of Artificial Sequence: Synthetic coding sequence"
  source 1..1866: mol_type = other DNA
atggcccatgtccgagggctgcaactcccaggttgtttggcactggccgcgctctgttccctggtgcattcgcagcacgtctttcttgcaccccagcaggcccgtagcttgctgcagcgtgtgaggcgagccaacacttttctggaagaggtgcgcaaaggtaacctggaacgggaatgtgtggaggaaacctgcagctacgaagaagcgttcgaagcactggaaagctcaaccgcaactgatgtattctgggcaaagtacaccgcatgtgagactgcccgcacccctagagataaactggcagcatgtcttgaggggaattgtgccgaagggttgggaaccaattacagaggtcacgttaacatcactaggtcagggattgagtgccaactgtggcgttcgcggtacccacacaaaccagaaatcaacagcactactcatcctggtgcagatcttcaggaaaacttttgccgcaaccccgactcctccacgacgggcccatggtgttacactaccgatcccaccgtgcgccggcaagagtgctcgattccggtgtgtgggcaagatcaagtgacggtagctatgaccccaagatcagaaggttcgagcgtgaatctcagtccaccccttgagcaatgtgtccctgaccggggccagcagtaccagggacgtctcgcggtgaccacccatggtttgccttgcctcgcgtgggcaagcgctcaagcaaaggcactgagcaaacatcaggatttcaattccgctgtccaactggtggagaacttttgtcgtaacccggatggcgatgaggaaggagtctggtgctacgtggccggaaaaccgggcgactttggttactgcgatcttaactactgtgaagaagcggtggaggaagaaactggggatggtcttgatgaggattccgacagagcaattgaaggacggactgcaacttccgaataccagacctttttcaaccctagaaccttcggcagcggcgaggcagattgtggtcttaggcctctgtttgagaagaagtctcttgaagataagactgaaagagagctcttggaatcctacattgacgggaggattgtggaaggatcggatgcggagattggtatgagcccatggcaagttatgctgtttagaaagagcccacaagagctgctttgcggagcgtcgcttatatcagaccgttgggtgctgaccgctgctcactgtctgttgtaccctccctgggacaagaactttaccgagaatgaccttctcgtcaggatcggtaaacatagcagaacgagatacgaacgcaacatcgaaaagatatcaatgctggaaaagatctatatacaccctagatacaattggagagagaacctggatagggatatcgccctgatgaaactcaaaaagcccgtggcattttctgattacatccatcctgtgtgtctcccagaccgtgagactgcagcctcactccttcaagcaggatacaagggtagggtgactggctggggaaaccttaaagaaacttggactgcgaatgttggaaaggggcaaccgtccgtgttgcaagtcgtgaacttgcctattgtcgaacgtccagtctgcaaggattcgacgagaatacgcattactgacaacatgttttgtgcaggttacaaacctgacgagggaaagcggggagacgcctgtgaaggggactccgggggcccctttgtcatgaagtcacctttcaataatcgatggtatcagatgggcatcgtatcatggggagaaggctgcgatcgagatgggaagtatggattttacacccatgtgttccgtcttaagaagtggatccaaaaggtcattgaccagtttggagag

SEQ ID NO: 8657 - DNA, 1866 bp, synthetic construct
  misc_feature 1..1866: note = source = /note="Description of Artificial Sequence: Synthetic coding sequence"
  source 1..1866: mol_type = other DNA
atggcacatgtgcgtggtctgcaactgccaggatgtcttgcattggcagcgctgtgctcacttgttcactcccagcatgtctttctggcaccacagcaggcaagatccctcctgcaaagagtgaggcgggcaaataccttcctggaggaagtgcgcaagggaaacctggagagagaatgtgttgaagaaacctgttcctatgaagaggcgtttgaggcccttgaatcgtctaccgcaactgatgtgttttgggcaaagtacactgcttgcgagactgctagaacgcccagggacaagttggccgcatgccttgagggtaattgtgctgagggactcggaactaattaccggggtcacgtgaacatcactagaagcggaatagaatgtcagctttggagatcgcgctaccctcataagccagagataaacagcactactcatccaggagcagatctccaagaaaacttctgtagaaacccagactcctcaaccaccggcccttggtgctacaccaccgaccccacggtgcgcagacaagaatgttctataccagtgtgcggtcaggatcaagtcaccgtggcaatgactcctagatctgaaggatcctcagtgaacctctcgcctccgctcgaacaatgcgtgccggatagagggcagcaataccaaggccgcctggcggtgactacgcacggcctgccctgcctcgcatgggcatcggcacaagcaaaagccctctcgaaacatcaggatttcaactccgcagtgcagctcgtggaaaacttttgccgaaatccggacggggacgaagaaggcgtgtggtgttacgtggctggaaagccaggagactttggatactgtgatcttaactattgtgaagaagcagtggaggaagagactggagacggactggacgaagattccgaccgagcgatcgaagggagaactgctacctccgaatatcagaccttcttcaatccacgcacctttgggtcaggagaagcagattgtggactgcggcctctcttcgaaaagaaaagccttgaggacaagactgagcgggaacttcttgagtcgtacatcgatgggcgcattgtggagggatccgacgcagaaatcggtatgtccccatggcaagtgatgcttttcaggaagtccccacaagaactcctgtgtggggcatcactgatctccgatcgctgggtccttaccgctgcacattgtctgttgtaccctccgtgggataagaacttcaccgagaatgatctcctggtcagaatcggaaagcactcccggactagatacgaacgcaacatcgagaagattagcatgcttgagaagatctacatccatccaaggtacaattggcgggagaatcttgacagagatattgcactcatgaaacttaagaagcctgtcgccttctcagattacattcacccagtctgcctgccggacagagaaaccgcagcctcgcttctgcaagccggctacaagggaagagtgactggctggggaaatctgaaggaaacttggaccgcaaacgtgggcaaggggcagccctcagtccttcaggtggtgaatctgccaattgtggaacggcctgtgtgtaaggattcgactaggatccgcatcactgataacatgttttgtgcaggatacaagcctgatgagggcaaacgcggtgacgcatgtgagggggattcgggtggaccatttgtcatgaagagtccgttcaacaatagatggtaccagatggggattgtaagctggggcgaagggtgtgatcgggatggcaagtacggattctacactcacgtctttcgacttaagaaatggatccagaaagtgatcgaccaatttggagag

SEQ ID NO: 8658 - DNA, 1866 bp, synthetic construct
  misc_feature 1..1866: note = source = /note="Description of Artificial Sequence: Synthetic coding sequence"
  source 1..1866: mol_type = other DNA
atggcacatgtgcggggcctccagcttcccggttgcctcgccctggcggctctttgttcacttgtgcattcgcaacatgtgtttctggcccctcaacaagcacgctccctgctccagagagtgcgccgggcaaataccttcctggaggaagtcagaaagggaaacctggagagggagtgtgtggaagaaacgtgctcgtacgaagaagcgtttgaggcccttgagagctcgactgccaccgacgttttttgggccaaatacaccgcatgtgaaactgcacgcacccctagagacaagctggccgcttgccttgagggtaactgcgcagaaggcttgggaacgaattacaggggtcatgtgaacatcacccgtagcggaattgaatgccagctttggaggagcagataccctcataagccagaaatcaactcaacgactcaccctggagcagacctgcaagaaaacttctgcagaaatcccgattcctccactaccggaccctggtgttacaccaccgaccctaccgtccgcaggcaagagtgttccataccggtgtgtggacaggatcaagtgactgtggccatgactccacgctcagaaggctcatcggtgaacttgtccccgcctctggaacagtgtgtgcctgatcgtggtcaacagtaccaaggacgtcttgccgtcaccactcatggtctgccatgcctcgcttgggcctcggctcaagcaaaggcacttagcaagcatcaggactttaactcagccgtgcaactggtggagaacttctgtcgcaacccagatggagatgaagagggcgtctggtgttacgtggcaggaaaacctggagattttggatactgcgatttgaattactgtgaggaggccgtggaggaggagactggtgatggactggatgaagattcggatcgcgcgattgaggggcgcaccgcaaccagcgaatatcagaccttctttaaccctcgtacgttcggatcgggtgaggcagattgcggtctgcgacctctgtttgaaaagaaatcactggaagataagaccgaacgggagcttctggaatcatacattgacgggaggattgtggaaggatccgatgcagagattggtatgtcgccatggcaagttatgctgtttcggaagtcgcctcaggagcttctctgcggtgcatcactgatctcggatagatgggtgcttacggcggcacattgcctgttgtaccctccttgggacaagaactttaccgaaaacgatttgctggtcaggatcggtaagcattcccggacccgttacgaaagaaacattgagaagattagtatgcttgaaaagatctacattcatccgcgatacaactggcgcgagaacttggaccgcgatattgcactcatgaaacttaagaagccagtggccttttcagactacatccatccagtgtgtctgcccgatagagaaactgcagcttcgcttctgcaggccggttataagggacgggtcacgggctgggggaacctcaaggaaacctggactgctaacgtgggaaaaggacagccaagcgtgctgcaagtggtgaacctccccatcgtggaacgtccagtctgcaaggacagcaccagaattaggattactgacaacatgttctgcgcaggatacaagccagacgaaggaaagaggggtgacgcatgcgagggcgactcgggcgggccctttgtgatgaagtcgccttttaacaatcgctggtaccagatgggcatcgtgtcctggggcgaaggttgtgatcgggatggtaagtacggcttctacacccacgtgtttagacttaagaagtggattcagaaggtgatcgatcaattcggagag

SEQ ID NO: 8659 - DNA, 1866 bp, synthetic construct
  misc_feature 1..1866: note = source = /note="Description of Artificial Sequence: Synthetic coding sequence"
  source 1..1866: mol_type = other DNA
atggcccatgtgcgaggcctccagttgcctggctgtctcgcgctggcggcgctttgcagcctggtccactcccaacatgtctttctggcgccacagcaggcacggtccctcctgcaacgcgtgcggcgggccaacactttcttggaagaagtgagaaagggaaacctggagcgggagtgcgtggaggaaacctgctcgtacgaagaggccttcgaggccctcgaatcgtctactgcgaccgacgtgttttgggccaaatacaccgcgtgcgaaactgcgagaacgccgcgagataagctggcagcttgtctggagggcaattgcgctgagggactgggcactaactaccgcgggcacgtgaacattaccaggtccggaatcgagtgccaactttggcggtcccggtaccctcacaagccagagatcaactcgaccacccacccaggtgccgacttgcaagaaaacttctgccggaacccggactccagcactaccggaccgtggtgctataccaccgatccgactgtgcgcagacaggaatgttccatccctgtctgcgggcaagatcaagttaccgttgcgatgactccgaggtccgaaggatcatcagtcaatctgtcaccgcccctcgagcagtgcgtcccggacagaggccagcagtaccaggggcggctggccgtgacgactcatggactcccatgtctggcctgggcatccgctcaagccaaagcgctgtcaaagcatcaagacttcaacagcgccgtccagctggtcgagaacttctgccgcaacccagatggggatgaggaaggagtgtggtgttatgtggctggaaaacctggtgacttcggttactgtgatctcaattactgcgaagaagcggtcgaagaagagacgggggatggattggacgaggactcagatcgtgcgattgagggccggacggcgacttcggaataccagaccttcttcaatccgcgcacgttcggcagcggcgaggctgattgcggcctgcggccgctcttcgagaaaaagtcattggaggacaagaccgaaagagagctcctggaatcctacattgacggtcgcatcgtggagggttcagacgcagagatcggaatgtcaccgtggcaagtgatgctgttccgcaaatcaccacaggaactgctgtgcggagccagccttatctcggaccggtgggttcttaccgcggcgcactgcctgctgtacccaccctgggacaaaaactttactgaaaatgatctcctggtgcgcatcgggaagcactccagaactagatacgagcgcaatatcgaaaagatatcaatgcttgaaaagatctacattcatcctcgctacaactggcgcgaaaacctggacagagacatcgcgttgatgaaactgaaaaagcctgtcgccttctccgactatatccatcccgtctgcctgcccgatcgggaaactgctgcctcattgctgcaggcgggctacaaaggacgggtgaccggctgggggaacctcaaggaaacctggaccgcgaatgtgggcaagggccagccatcggtgcttcaggtggtgaacctgcccatcgtggagcgacctgtctgtaaggacagcactaggatcagaatcaccgataacatgttttgcgccggctacaaacctgacgaaggtaagagaggagacgcttgtgagggcgatagcggaggaccgttcgtgatgaagagccccttcaataacagatggtaccagatgggaatcgtgtcgtggggagaggggtgcgatagagatggaaagtatggcttttacacccacgtgttccggctcaagaagtggatccagaaggttatcgatcaatttggagag

SEQ ID NO: 8660 - DNA, 1866 bp, synthetic construct
  misc_feature 1..1866: note = source = /note="Description of Artificial Sequence: Synthetic coding sequence"
  source 1..1866: mol_type = other DNA
atggcccacgttagagggttgcagttacctggctgtttagccctggccgccctgtgtagcctggtccactcacaacacgtctttctggcccctcagcaggcccgttcgctgcttcagcgagttagaagagccaatacgttcctagaagaggttagaaagggcaatttagagcgagaatgtgtagaggaaacatgtagttacgaggaggccttcgaggcactcgaatcttctacagctacagacgtgttttgggcgaaatatactgcttgcgagaccgcccgaactccaagggataaactcgccgcctgtctcgagggcaactgcgccgaaggcctgggcactaattaccgtgggcacgtgaatataactcgcagcgggatcgagtgccagctatggcgcagcaggtacccacataaacccgagattaacagcactactcaccctggcgcggatctgcaggaaaatttctgcaggaatccagattcaagtactaccgggccttggtgctatactacagatcccaccgtgcggcgacaggagtgctctatccctgtgtgcggacaggaccaggtgactgtcgccatgacaccccggtcggagggcagttcagtgaacttgagcccccctttggaacagtgtgtcccggacagggggcaacagtaccaagggcggctggccgtcaccacgcatggactgccatgcctagcttgggcgagtgctcaggccaaagctttaagtaagcatcaggacttcaatagcgcggtacaactagtcgagaacttttgccgcaacccagatggggacgaagagggcgtgtggtgttacgtggctgggaagcccggcgactttggctattgtgacctgaattattgcgaagaagctgttgaagaagaaacaggagatggtctggatgaggatagcgatagagctatcgaggggcgcaccgccaccagtgagtaccagacctttttcaacccgaggacgttcggcagcggggaggccgactgtggactcaggccccttttcgagaagaagtcactcgaggacaaaacggaaagagaactgctcgagagttatatcgacggccggattgttgagggctctgatgccgaaataggcatgagtccgtggcaggtgatgctgtttcggaagtccccgcaggaactgttgtgcggtgccagcctaatttcggatcggtgggtcctgaccgccgcacactgccttctttacccgccctgggacaaaaatttcacagaaaatgacctgctagttagaataggcaaacacagcagaacccggtacgagcgcaatatcgaaaaaatttcaatgctggagaaaatctatatccatcctagatacaactggcgcgaaaatctagacagagatatcgctctgatgaaactcaaaaaacctgtcgctttctccgattacattcaccctgtttgcctgcccgaccgggaaaccgcggccagtctcctgcaggcgggatacaaaggaagagtgacaggttgggggaacctgaaagaaacgtggactgctaatgtgggcaagggacaaccttctgtgttgcaggtggtgaatctacccatcgtggagagacctgtttgcaaggactctacaaggattcggatcacggacaacatgttttgcgccggctataaacccgacgaagggaagcgcggtgatgcatgtgagggggacagcggcggaccttttgttatgaagtccccatttaacaacagatggtatcaaatgggtatcgtaagttggggcgagggatgcgatcgggatggcaaatacggattctacacgcatgtgttccgacttaagaaatggattcagaaagtgatcgaccagttcggagaa

SEQ ID NO: 8661 - DNA, 1866 bp, synthetic construct
  misc_feature 1..1866: note = source = /note="Description of Artificial Sequence: Synthetic coding sequence"
  source 1..1866: mol_type = other DNA
atggcgcatgtccgcggactccaactgcccggatgcctggcactggccgcgctgtgctccctcgtgcactcgcaacacgtgttcttggcgccgcagcaggcccggagcctgctccaaagagtgagacgcgccaacactttcctggaagaagtccgtaagggaaacctggaacgggagtgtgtcgaggagacttgctcgtacgaagaggctttcgaagctctcgaatcgtcaactgcgacggatgtgttctgggcaaaatacaccgcctgcgagactgcccggaccccgagggacaagctcgcagcatgcctcgaaggaaactgtgccgaaggactgggcaccaattacagggggcacgtgaacattactcggtccggtattgaatgtcagctgtggcgctcgaggtacccacacaagcctgagattaactcaaccacccatccgggagccgacctgcaggaaaacttttgtaggaaccctgactcgtcaactaccggcccgtggtgttacacgacggatccaaccgtgcggcggcaggaatgctcgatcccggtgtgtggtcaggatcaagtcaccgtggcgatgactccgagatcggagggttcatccgtgaatctgagccccccactcgagcagtgtgtcccagacagaggccagcagtaccagggacggctcgcagtgaccacgcatggtctgccttgcctcgcgtgggcgtccgctcaggccaaagcactctcgaagcaccaggacttcaactccgcggtgcagcttgtggagaacttttgccgcaacccagatggcgacgaggaaggagtgtggtgctacgtcgccggaaagccaggcgacttcggatactgtgacctgaattactgcgaagaagcagtggaggaagagactggggatggactggacgaagattcggacagagctatcgagggacgaaccgcaacgtcggagtaccaaacttttttcaacccccgcacctttggaagcggtgaagcagattgcggcctgcgcccactgttcgagaagaagtccctcgaggacaagaccgagcgcgagctcctcgaatcatacattgatggtcggattgtcgaaggatcggacgcggagatcgggatgtcgccttggcaggtcatgctgttccggaagtcgccccaggagctcctttgcggtgcgtcgcttatcagcgaccggtgggtcctgaccgctgcgcactgcctgctctacccgccctgggacaagaactttactgaaaacgacctgctggtcagaatcggcaagcactcgcgcactcggtacgaaagaaacatcgaaaagattagcatgctggaaaagatatacattcacccacgatacaactggcgggaaaacctggatagggatatagcactgatgaaactgaaaaagccggttgccttcagcgactacatccaccctgtgtgcctcccggacagagagacggctgcgtccctgctgcaagccggatacaagggacgcgtcaccggttggggaaatttgaaagagacgtggactgccaacgtgggtaagggccagccgtcggtccttcaggtggtgaatctgccgatcgtggaacggccagtgtgcaaggatagtactagaatccgcatcactgacaatatgttctgcgctgggtacaagcctgacgaagggaaaagaggagacgcatgtgagggagactcaggcggccctttcgtgatgaagtcgccgttcaataatcgctggtaccaaatgggcatcgtgtcctggggagagggctgcgatcgcgacgggaaatacggattctatacccacgtgttccggctgaagaagtggatccagaaggtcattgatcagttcggagaa

SEQ ID NO: 8662 - DNA, 1866 bp, synthetic construct
  misc_feature 1..1866: note = source = /note="Description of Artificial Sequence: Synthetic coding sequence"
  source 1..1866: mol_type = other DNA
atggcgcacgtgaggggcctgcagcttcctggatgccttgcccttgccgcactgtgctcactggtgcattcgcaacacgtgtttttggcgccacagcaagcccgctcgctcctgcaacgggtcaggcgagccaatactttcttggaagaggtgaggaagggaaacctcgaacgcgaatgcgtcgaagaaacctgctcctacgaggaagccttcgaggctttggagtcatcgaccgcgactgacgtgttctgggccaaatacaccgcgtgtgaaaccgccagaactccgagagataagctggcggcgtgtctggaggggaactgtgcggaaggactggggactaactatcgcgggcatgtgaacatcaccaggtcgggcattgagtgccagttgtggcggtcgaggtacccccacaagccagagatcaactccactacccatccgggggctgacctgcaggagaacttctgccgcaacccggattcaagcaccacggggccgtggtgctacaccactgaccccaccgtccgcaggcaggagtgctccatcccagtgtgcggacaagatcaggtgaccgtcgcaatgaccccaagatccgaaggaagcagcgtcaatttgagcccgccgctcgaacagtgcgtgcctgacagaggacagcaataccaggggcgcctcgctgtgacgacccacggactgccatgcctcgcctgggcgtctgcccaagcgaaggccctgtccaaacaccaggacttcaactccgccgtgcagctcgtcgaaaacttttgccgaaacccagatggtgatgaggagggagtatggtgctacgtggcaggtaaaccaggagacttcggatactgtgacctcaattactgcgaggaggcggtcgaagaggaaaccggtgatggcctggacgaggattctgaccgggccatcgaaggacgaacggccacttcggaataccagactttcttcaaccctcgtaccttcggatcgggggaggcagactgtggactgcggcccttgtttgagaagaagtctcttgaggataagactgaacgggaactgctggagtcttacatcgatggaaggatagtggaaggaagcgacgcagagatcggcatgtccccgtggcaggtgatgctcttccggaaaagtcctcaggaactgctgtgtggcgcttccctgatctccgacaggtgggtgctgactgcagcccactgccttctgtaccctccgtgggacaagaatttcaccgagaacgaccttctcgtaaggatcggaaaacattctcgtactagatacgaacgcaatatcgagaagattagcatgcttgaaaagatctacatccatccacggtacaattggcgcgaaaatctggaccgggatatcgcactgatgaagctgaagaagcctgtcgcattctcggattacatccaccctgtctgtctgcccgaccgtgaaaccgcggcttcgctccttcaagcgggctacaaaggacgggtgacgggctgggggaatcttaaggaaacttggactgctaacgtcggaaaaggccagccatcagttctccaggtcgtcaacctgccgatcgtggaaagacctgtgtgcaaggactcgaccagaatccgcattaccgataacatgttttgcgctgggtataagcccgacgaaggaaagcgcggggacgcatgcgaaggtgactccggaggaccgtttgtgatgaaatcgccgttcaacaatcggtggtaccaaatgggcatcgtgtcctggggagagggctgcgaccgcgacggtaagtatggattttacactcacgtgttcagactgaagaaatggattcaaaaggtcattgaccagttcggtgag

SEQ ID NO: 8663 - DNA, 1866 bp, synthetic construct
  misc_feature 1..1866: note = source = /note="Description of Artificial Sequence: Synthetic coding sequence"
  source 1..1866: mol_type = other DNA
atggcccatgtccggggcctccagcttccgggatgcctcgccctcgccgctctgtgtagcctggtccactcgcagcacgtgtttctggctccgcagcaggcgcgctccctcctgcagcgggtgagaagagctaataccttcctggaagaagtgagaaagggaaacttggaaagggagtgcgtggaggaaacctgcagctacgaggaggcgttcgaagcattggaaagttccaccgcgacggatgtcttttgggctaaatacaccgcctgcgagactgcccgcactccgcgggataaactcgctgcgtgcctggaaggaaactgtgccgaaggtctgggtaccaattacagagggcatgtgaacataacgcggtcaggaatcgaatgtcagctgtggaggtcacgctacccacacaaaccagagatcaactcaaccacccatccgggtgcagacctccaggagaatttctgccggaacccagattcgtccactactggcccatggtgctacacgaccgatcccaccgtcagacgccaggaatgttccatcccagtgtgcggccaggatcaggtgaccgtggcgatgaccccaagatcggaagggagctcagtcaacctgagcccgccactggagcagtgcgtcccagatcgcggacagcaataccagggccgcctcgcggtgaccactcatggcctgccgtgcctggcctgggcttcggctcaagcgaaagccctgtccaagcaccaagacttcaactccgcggtgcaactggtggagaacttctgcagaaaccccgatggagacgaggaaggcgtgtggtgctacgtggctggaaagccaggagacttcggatactgtgatctcaactactgcgaagaagctgtggaagaggaaactggagacggactggatgaggactccgatagagcgatcgaaggaagaaccgcaacgagcgaatatcagaccttctttaaccctagaaccttcggaagcggtgaggccgactgcggactcagacctctcttcgaaaagaagtcattggaggacaagactgaaagagaattgctggagtcgtacatcgacgggcggatcgtggagggatcagatgcggaaatcgggatgagcccttggcaggtcatgctgttccggaagtcgccgcaggaacttctgtgtggagcctccctgatctctgaccgctgggtgctcactgccgcacactgcttgctgtacccgccttgggacaagaacttcaccgagaatgatctgctggtgcggatcggaaaacactcccggactcgctacgaacggaacatagaaaagattagcatgcttgagaaaatctacatccacccgcggtataactggcgcgagaatctggaccgcgatatcgcactgatgaaactcaaaaagcctgtggccttttccgactacatccatccggtgtgccttcctgatagggaaactgcagcttcgctcctccaggccggatacaagggaagagtgactggctggggaaaccttaaggagacttggaccgcgaatgttggtaagggacagccatcagtgctgcaggtggtgaatctgccaattgtcgagcggccggtgtgcaaggactcaactagaatccgcatcaccgataacatgttttgcgcgggctacaagccggacgaagggaagagaggggatgcatgcgaaggggacagcggtggtccatttgtgatgaagagccccttcaacaaccggtggtatcaaatgggaatcgtgtcatggggcgagggatgcgatagggatggcaagtacggcttctacacccacgtgttccgactgaagaagtggattcagaaagtgattgaccagttcggtgaa

SEQ ID NO: 8664 - DNA, 1866 bp, synthetic construct
  misc_feature 1..1866: note = source = /note="Description of Artificial Sequence: Synthetic coding sequence"
  source 1..1866: mol_type = other DNA
atggctcacgtgaggggcctgcagctgccaggttgcctcgccttggctgcattgtgtagcctggtgcatagtcagcatgttttcttagctccacagcaggcgaggagtctactgcagcgggtccgtcgtgccaatacgtttctagaagaagtgcgcaagggcaaccttgaaagagaatgtgtagaagaaacatgtagctatgaagaggctttcgaggcccttgagagtagcaccgctacagacgtgttttgggcgaaatacaccgcatgtgagacagccaggactcctagagacaagctcgcggcatgccttgagggcaattgcgccgaagggctgggcaccaactatcgaggacatgtgaacattaccaggagcggcattgagtgccagctttggaggtcaaggtacccccacaaacctgagatcaattcaactacgcatcctggggccgaccttcaggagaatttttgcagaaacccggacagtagcaccactggcccgtggtgctacacgactgaccccacagttcggagacaggagtgctccattccagtttgcggacaggatcaggttacagtggcaatgactcctaggtccgaaggttcaagcgtgaacctgtcccctcctttggagcagtgtgtccccgatcgcgggcagcagtatcagggcaggttggccgtgacgacccacggcttgccttgcctggcctgggccagcgcacaggcaaaggccctctccaagcaccaggatttcaactccgccgtccaattggtggagaatttttgcaggaaccctgatggggatgaagaaggagtgtggtgctacgtggccggtaagcccggtgatttcgggtattgtgacctgaattactgcgaagaggccgtcgaggaggagacaggagatggtctcgacgaagacagcgaccgagccattgaagggcgtactgctactagcgaataccaaacattttttaacccacgaaccttcggaagcggtgaggcagactgtggactgcgacccctatttgaaaagaagtccctagaggataagacggaaagagagttgctggagtcatacattgatgggcgcattgtggaggggtcagatgccgaaatcgggatgagtccttggcaggtgatgctgttccgcaagtctccccaggaactgctgtgcggcgcttccctgatcagtgatagatgggtgctcaccgcagcccactgccttctgtatccaccctgggacaagaatttcaccgagaatgacctcctcgtgcgcataggtaaacactctcgcactcgctacgagaggaatatcgaaaagatcagtatgctggagaagatttatattcacccccggtataactggcgtgagaatcttgacagggatattgccttaatgaagctcaagaagcctgtggccttctcagattacattcatccggtttgcctgcccgatagagagactgccgcgtcactgctgcaggcagggtataaggggagggtgactgggtggggcaatctgaaggaaacttggaccgccaacgtcggaaaaggccagccaagcgttttacaggtggtgaatctgcctatcgtggagcggcctgtgtgcaaggatagcactcgaataagaattacagacaacatgttttgtgctggatataaaccggacgaagggaagagaggagacgcctgtgagggtgattccggtggtcctttcgtgatgaagagtccattcaataaccgctggtaccagatggggatcgtgtcttggggggagggatgtgaccgagatggtaagtatggcttttatacgcatgttttccgcctgaaaaaatggatacaaaaagtaatcgatcaattcggagag

SEQ ID NO: 8665 - DNA, 1866 bp, synthetic construct
  misc_feature 1..1866: note = source = /note="Description of Artificial Sequence: Synthetic coding sequence"
  source 1..1866: mol_type = other DNA
atggcacatgtgcgcgggctgcaactccctggctgcttggcactcgctgctctgtgcagtctcgtccactcacagcacgtgttcttagccccacagcaggctcgctcattattgcagagagtcaggcgggccaatacttttctcgaggaagtacggaagggcaacctagagcgcgaatgcgttgaggagacatgttcctacgaggaggcttttgaagctctcgagtcatctaccgctacagacgtcttctgggcaaaatacacagcttgcgagaccgctagaactcctcgggataagcttgccgcttgtttggaggggaattgtgcggagggtcttggcacaaactaccgaggacacgtcaatattacacggtccggcatcgagtgtcagttatggcgctccagatatccccataaaccggagatcaattcaacgacccatcccggagcagatcttcaggagaacttctgcaggaaccctgattctagtactaccgggccttggtgctacacaacagatcccaccgtaagacggcaggaatgtagcattcctgtgtgcggccaggaccaggtgaccgtagccatgacgcctagatcagagggatcgtccgtgaatctgagtccccctttggagcagtgtgtgcccgatcgcgggcaacaataccagggacgattagctgtaaccactcacggtctaccctgtctggcctgggcatctgctcaagcaaaggcgctaagcaagcaccaggacttcaactccgcagtccaactggtggagaacttctgcagaaatcctgacggcgacgaggaaggcgtctggtgttacgtggcagggaaaccgggcgactttgggtactgtgatctgaactactgcgaggaggccgtggaagaggaaaccggagatggcctggatgaagactcagaccgtgccatagagggacgaaccgcaaccagtgagtatcagaccttttttaacccgcgcaccttcggctctggagaagccgactgcggtctgaggccactcttcgagaaaaaaagcctcgaagataagacggagagggagctactcgaaagttacatcgatggcagaatcgttgagggctctgacgcagagatcggtatgtctccctggcaggtgatgctcttccgcaaatctcctcaggagctgctgtgcggagcgagccttatctctgataggtgggttctgaccgcagcccattgcctgttatatccaccctgggataaaaactttaccgagaatgatctattggtgcgcattgggaaacacagcaggacccggtatgaaagaaacatcgaaaagatttccatgctcgaaaagatatatattcatcccaggtataattggagggaaaacctcgacagggacattgcgctcatgaagctgaaaaagccagttgccttctccgattatatacacccagtctgcctaccggacagggagaccgcagcatcgctactacaggcggggtacaaggggcgagttacaggctgggggaaccttaaagagacatggactgcaaatgttggcaaggggcagccgagtgtgctgcaagtggtcaacctgccaatagtagagaggcctgtttgtaaagacagcacaagaatcaggatcaccgataatatgttctgtgctggttataagccagacgaaggaaagagaggagatgcgtgcgaaggagattcggggggaccctttgttatgaaatctcctttcaataacagatggtaccagatgggcatcgtaagctggggggaagggtgtgatagggacgggaaatacggcttctatacccacgtgtttcgcctgaaaaagtggatccagaaggtaatcgatcagtttggggag

SEQ ID NO: 8666 - DNA, 1866 bp, synthetic construct
  misc_feature 1..1866: note = source = /note="Description of Artificial Sequence: Synthetic coding sequence"
  source 1..1866: mol_type = other DNA
atggcccatgtcaggggcctgcaactccctgggtgcctcgcgctggcagccctgtgctctctcgtgcattcacagcacgtttttctcgccccccagcaggccagaagcctgctgcagagggttaggagagccaacacatttcttgaggaagtccgcaaaggtaaccttgagcgtgaatgtgtggaggagacctgttcctacgaagaagccttcgaggccctggagtcgtccactgccaccgatgtgttttgggccaaatatacagcttgtgaaaccgctagaacaccgcgcgataaactggctgcttgtctcgagggtaattgcgcagaggggctggggaccaattaccgtggccacgtgaatattaccagatcaggaatcgagtgccagctctggcgatcccgttaccctcacaagcccgagattaatagcaccacacaccctggggcggacctgcaagaaaatttttgcagaaacccagactcttctacgaccggaccatggtgctatactacggatccgaccgtgcgccggcaggagtgttctatcccggtgtgtggacaagatcaggtgactgtcgctatgactccaaggtcagaagggtcatctgtgaacctgtcccccccgctggagcagtgtgtgcccgatcgcgggcaacagtaccagggccggttagcagtcaccacccatggcctcccctgcctcgcctgggcgtctgcgcaggccaaagctctgtctaaacaccaggacttcaacagcgccgtgcagctcgtggaaaacttctgtaggaacccagatggagacgaggagggagtctggtgttacgtggccggaaagcccggcgatttcggctattgtgacctcaactactgtgaagaggccgtggaggaagaaacaggagatggactcgatgaggactctgaccgagcaatcgagggacggaccgctaccagcgaatatcagaccttcttcaatcctagaacttttggaagtggagaggcagactgcgggctgcgaccattgtttgagaagaaatccctggaagacaaaactgagcgtgagctactcgagtcctatattgatggccgcatcgtagagggaagtgatgcggaaattggtatgtctccctggcaggtcatgctgtttagaaaatcgccacaggagcttctgtgcggagcctctctcatcagcgacaggtgggtgctcaccgctgcgcactgcctactgtaccccccatgggataagaacttcaccgaaaacgaccttctggtgaggatcggcaagcattccagaacacggtatgagcgcaacatcgaaaaaatatcaatgttggagaagatatatattcatcccagatacaactggcgggaaaacttggaccgggacatcgctctgatgaagctgaaaaagcccgttgccttctccgactatattcacccagtgtgccttccagacagagaaacagctgcgtccctgctacaggcaggctacaaaggccgggtgaccgggtggggaaacctgaaggagacctggactgctaatgtgggaaaaggccaaccgtctgtgttgcaggtggtcaacctccccatcgtggagcggcccgtatgcaaggacagcaccagaattcggattaccgacaatatgttctgtgctggatacaagcctgacgaagggaaacgtggtgacgcttgcgagggcgattcaggaggccctttcgtgatgaagagcccttttaacaacaggtggtaccagatggggatcgttagctggggagagggctgcgaccgggacgggaaatatggtttttacacacatgtgtttagattgaagaaatggatccagaaagtgatcgaccagttcggagag

SEQ ID NO: 8667 - DNA, 1866 bp, synthetic construct
  misc_feature 1..1866: note = source = /note="Description of Artificial Sequence: Synthetic coding sequence"
  source 1..1866: mol_type = other DNA
atggctcacgtgaggggattgcaactacctggatgtttagcccttgccgccttatgctcgctggttcacagtcagcatgtgttcctggccccccaacaagctagatctttgctgcagcgcgtgcgcagggcgaatactttcctggaagaagttcgcaagggaaacctcgagagggagtgtgtggaagagacgtgctcctatgaagaagcatttgaagcactcgaatcttctacagcaacggacgtgttttgggctaagtatacggcctgcgagaccgcacgcaccccgagagacaaattagctgcttgtcttgaagggaactgtgccgaggggcttggaaccaattaccgcgggcatgtcaacataacaaggtcaggcattgagtgtcagctctggaggagcagatacccacacaagcctgagatcaatagcaccacgcacccaggggccgacctgcaggaaaacttctgccgtaatcccgactccagcaccaccggcccttggtgttacaccactgacccgaccgttcgacgtcaggagtgcagtatccccgtgtgtggtcaagatcaagtgaccgtggccatgacccccagatcagaagggtctagcgtaaatttatcgcctccattagagcagtgcgtgcccgatagaggacaacaataccagggacggcttgcagttacgacccacggactgccctgcttggcctgggccagcgcccaggctaaggctctgtcaaagcatcaggacttcaatagcgctgtgcagctggtggagaatttctgcaggaatcccgacggcgacgaggagggggtatggtgctacgttgccggtaagcctggcgattttgggtattgcgacttgaattattgcgaggaggccgtggaggaagagactggtgatggcctggacgaagacagtgatcgcgctattgaaggcaggaccgctacctcggagtatcagactttcttcaacccacgcacatttggtagcggggaagccgactgcggccttcggccactgttcgaaaaaaaaagtctagaggacaagactgagagagaattgttggagtcttacatagacgggagaattgtggaggggagtgatgcagagattgggatgagtccttggcaggtcatgctgtttcgcaagtcgccacaagaactcctctgtggggcctcactgattagtgatcgatgggtactcacagccgcgcactgtttactctaccccccctgggataaaaacttcaccgagaatgatttgctcgtcaggataggaaagcactcgagaacgcgatatgaaagaaacatcgaaaagatatctatgcttgaaaagatatatatacacccccggtataattggcgcgagaatctagacagggatatcgctctgatgaaattaaaaaagccagtggcattcagcgactatatccaccccgtgtgcctacccgatagggagacggcggcatcactcttacaggcgggctataaaggaagagttacagggtggggtaatctcaaagagacctggactgctaatgtgggcaagggccagccatcagttctgcaggtggtgaatttgccaatcgtcgaacgacctgtatgcaaagacagcactcgtataagaattacagataacatgttctgtgctggctataagcccgatgaggggaagagaggcgacgcgtgcgagggggattccgggggccctttcgtgatgaagagcccatttaacaaccgctggtatcagatggggattgtgtcctggggagaggggtgcgacagggacggcaagtatgggttttacacgcatgttttccgcctgaaaaaatggattcaaaaagttattgaccagtttggtgag

SEQ ID NO: 8668 - DNA, 1866 bp, synthetic construct
  misc_feature 1..1866: note = source = /note="Description of Artificial Sequence: Synthetic coding sequence"
  source 1..1866: mol_type = other DNA
atggctcacgtgcgcggactccagctgcccggatgtctcgccctcgctgctctgtgcagcctggtccactcacagcacgtgttcctcgctcctcagcaggcgagatccctgctccagcgcgtgagaagagccaacactttcctcgaagaagtcaggaagggcaatctggaacgcgaatgtgtggaagaaacctgctcctacgaagaggctttcgaggccttggagagcagcaccgccacggacgtgttctgggccaaatacacggcatgcgaaacagcccgcaccccgagggacaagctggctgcctgcttggagggcaattgcgctgagggtttgggtactaactatagaggtcatgttaacatcactagatccggtatcgaatgccagttgtggagatctaggtacccccacaagcctgagatcaacagcaccactcacccgggcgcagatttgcaggagaacttctgcaggaatcccgactctagtaccaccggcccatggtgctacacaaccgacccaaccgtaaggcgccaagagtgcagtatccctgtatgtggtcaagaccaggtgaccgttgcaatgaccccaagatccgaaggttcatcagtgaatctctcccctcctctggaacagtgtgtgcctgaccgcggccagcagtaccagggacgcctggcagtcaccacccacggcctgccatgtctggcttgggcctccgcacaggctaaagccctgtccaaacaccaggatttcaacagcgccgtgcaactggtggaaaacttttgcaggaaccctgacggagatgaggagggtgtttggtgctacgtagccggcaagcccggtgactttggatactgcgacctgaactattgtgaagaggcagtggaggaagagacaggcgatggtctcgatgaggacagtgacagagctatcgagggacgcactgccacttccgagtaccagaccttcttcaatccgaggaccttcggttctggtgaggcagactgcggtctgagaccactgttcgagaagaagtccctggaagacaaaacagaacgcgaactgttggaatcctacatagacggtcgcatcgtagagggatctgacgctgagattggcatgtctccatggcaggtgatgctctttaggaagagtccccaggagctgctgtgtggtgcttccctgatttccgacaggtgggtgctgacagccgcccactgcttgttgtaccccccctgggacaaaaacttcactgagaacgatctgttggtgaggattggcaagcactcacgcacacgctatgagagaaatatcgaaaagatttccatgctcgaaaagatctacattcatcccagatataactggcgcgaaaacctggaccgcgatatagcattgatgaagctgaaaaagcccgtggctttctcagattacattcatcccgtgtgtctccccgacagggaaactgccgcttctctgttgcaggctggttataagggtcgcgtgacgggctggggtaatctgaaggaaacttggaccgctaacgtgggaaaaggacagcctagcgtcctccaagtggtaaacctgcctatcgtggaaaggcccgtctgcaaagactctaccagaatacgcattacagacaacatgttttgcgccggctacaaaccagacgagggtaagcgcggcgatgcctgtgagggcgactctggaggcccattcgttatgaagtccccatttaacaataggtggtaccagatgggtatcgtgagctggggtgaaggttgcgacagagatggaaagtatggattctacacacacgtgttcagactcaagaagtggattcagaaagtgatcgatcagtttggcgag

SEQ ID NO: 8669 - DNA, 885 bp, synthetic construct
  misc_feature 1..885: note = source = /note="Description of Artificial Sequence: Synthetic coding sequence"
  source 1..885: mol_type = other DNA
atggagactcctgcatggccaagagttccgcgtcctgaaacagctgttgcacgaactcttcttctaggatgggtgttcgctcaggttgctggagcttcgggtactacgaatacagtagcagcctacaatttgacatggaagtctacaaattttaaaacaatcctggaatgggaacctaaaccagttaaccaagtctatacagttcaaattagcactaaaagtggtgattggaaaagtaaatgtttttacacaacagataccgaatgtgaccttaccgatgaaatcgtgaaagatgttaaacaaacttatcttgctcgtgtgttctcatacccagcaggcaatgttgaatcgacaggaagtgctggagaaccgttgtacgagaattcaccagagtttacgccatatcttgaaaccaaccttggtcaacctactattcagtcatttgagcaagtaggaactaaagtcaacgtaactgtggaagacgaaagaacactggtgcgaagaaataatacttttttatcacttagagacgtttttggaaaagatcttatctacacattgtactattggaaatcgtctagttctggaaaaaagactgccaagacgaatactaatgaattccttattgatgtagataaaggcgaaaattattgtttttcagttcaggcagttattccatctagaactgttaaccgaaaatctacagattcaccagtggaatgtatgggacaggagaaaggagaattccgagaaatcttttatataatcggtgctgttgttttcgttgtcatcatccttgtcattatactggccatttcgttgcataaatgtagaaaggcgggagtgggtcaaagctggaaagaaaactcaccactgaacgtttca

SEQ ID NO: 8670 - DNA, 885 bp, synthetic construct
  misc_feature 1..885: note = source = /note="Description of Artificial Sequence: Synthetic coding sequence"
  source 1..885: mol_type = other DNA
atggagacccccgcctggcccagggtgccacgccctgagacagcagtggccaggactttgctgctcggatgggtttttgctcaagttgccggagcttctggtaccaccaatacggtcgctgcatacaatctgacttggaagagcacaaacttcaagaccatcctggaatgggagccgaaaccggtgaaccaggtgtacacggtccagatcagcacgaagagcggagactggaagagtaagtgcttctacaccacggataccgaatgcgatctgaccgatgagattgtcaaggacgtcaagcaaacttacctcgcccgcgtcttcagttaccccgcaggaaatgtggaatcaacaggaagtgctggagagcccctttatgaaaattccccagagtttaccccttacctggagaccaatctgggccaaccaaccatccagagctttgaacaggtaggcaccaaagtaaacgtcacggtggaagatgagaggacacttgtgaggagaaacaatacctttttgtcactgagggatgtattcggaaaggacctgatatatactctgtattactggaagtcaagctcttccggtaagaaaaccgctaaaactaacactaacgaattcctcatcgatgtagacaagggcgaaaattactgcttctccgtgcaagcggtaatcccctctagaactgtcaacagaaagagcacagattctccagtagagtgtatgggacaggaaaagggcgagttccgcgagatcttctacattataggagctgttgtgtttgtcgtcatcatcctggtgatcatcctggccatatccctccacaagtgtcgcaaggccggagtgggacagagttggaaggaaaattcccctcttaatgtgtcc

SEQ ID NO: 8671 - DNA, 885 bp, synthetic construct
  misc_feature 1..885: note = source = /note="Description of Artificial Sequence: Synthetic coding sequence"
  source 1..885: mol_type = other DNA
atggaaactcctgcctggcctcgcgtgcctcggcccgaaaccgcggtcgcaaggaccctgcttctgggctgggtgtttgctcaggtggcgggcgcctccggaactaccaatactgtggcggcttacaacctgacttggaagtcaaccaatttcaaaaccatcctggagtgggaacctaagccagtcaaccaggtgtacaccgtgcaaatctccaccaagtccggagattggaagtcgaaatgcttctacaccactgacaccgaatgcgacctgacggacgaaatcgtgaaggacgtgaaacagacctacctggcccgcgtgttcagctacccagcaggaaacgtggagtccacgggatcagcgggagaaccactgtacgagaactcgccggaattcaccccttacctggagacgaacttgggacagccaactatccagtcctttgaacaggtgggaaccaaggtcaatgtcaccgtggaggatgagcggactcttgtgcgcagaaataacactttcctttcactcagagacgtgttcgggaaggacctcatctacaccctttactactggaagagctcctcgagcggtaagaaaactgccaaaaccaacactaacgaattcctgatcgatgtggacaagggagaaaactattgcttctcggtgcaggctgtgatcccgtcccggaccgtcaaccgcaagtcgaccgacagtcccgtggaatgcatgggccaggagaagggcgaattccgggagatcttttacatcatcggcgcggtggtgtttgtggtcatcatcctggtcattattcttgcgatctctctgcacaagtgtcggaaagccggcgtgggacaatcttggaaggaaaactctcccctcaacgtctcc

SEQ ID NO: 8672 - DNA, 885 bp, synthetic construct
  misc_feature 1..885: note = source = /note="Description of Artificial Sequence: Synthetic coding sequence"
  source 1..885: mol_type = other DNA
atggagactccagcatggccacgcgtgccaagaccagagactgccgtggccaggaccttgcttctcggatgggtgttcgcccaagtggcaggcgctagcgggaccaccaataccgtggccgcttacaacctgacttggaaatcaactaatttcaagactatcttggagtgggaaccgaaacccgtgaaccaggtgtacacggtgcagatctccacgaagtcgggcgactggaagtcgaagtgcttctacaccaccgacaccgagtgcgacttgactgacgagatcgtgaaggacgtcaagcagacctacctggccagggtgttctcgtatccggcggggaacgtggaatccactgggtccgcgggagagccgctgtacgaaaactcccctgaatttaccccttatctggagactaacctggggcagccgaccattcagtcctttgaacaagtgggaacgaaggtgaatgtgactgtcgaagatgagcggacgctcgtccggcgcaacaacaccttcctgtccctccgggacgtgttcggaaaagatctgatttacaccctgtactactggaaatcaagctcgtcaggaaaaaagaccgcaaagacgaacaccaacgaatttctcatcgatgtggataaaggagagaattactgtttttcagtccaagctgtgataccctcccgcacggtgaacaggaagtcgaccgacagcccggtggaatgcatgggacaggaaaagggagaattccgggagattttctacatcatcggcgccgtcgtgtttgtggtgatcatcctggtgatcattctcgctatctccctccacaagtgcagaaaggcgggagtgggtcagtcgtggaaggaaaacagcccgctcaacgtctcc

SEQ ID NO: 8673 - DNA, 885 bp, synthetic construct
  misc_feature 1..885: note = source = /note="Description of Artificial Sequence: Synthetic coding sequence"
  source 1..885: mol_type = other DNA
atggaaaccccagcgtggccacgggtgccacggccggagactgccgtggcaaggaccctgctgcttggttgggttttcgcgcaggtggctggcgcatccggcactaccaatacggtggctgcttacaacttgacgtggaaatccaccaactttaagactatcttggaatgggaaccgaaaccagtcaaccaggtgtacactgtgcagatctctactaagtcaggagactggaagtcaaaatgcttttacacgaccgacaccgaatgtgacctgaccgatgaaatcgtgaaggacgtcaaacaaacctacctcgcacgcgtgttctcgtatccggctgggaatgtggaaagcactgggtcagcgggggagccactgtacgaaaattcgccggagtttactccgtatctcgagactaatctgggtcaaccaacgatccagtcgttcgagcaggtgggtaccaaggtcaatgtgaccgttgaggacgaacggaccctggttagacggaacaacacttttctcagcctgcgggacgtctttggaaaggatctgatctacactctgtactactggaagtcgagctcctcgggcaagaagaccgccaagaccaacactaacgaattcctcatcgatgtggataagggcgagaattactgtttttcggtccaggcagtgattcctagccgcactgtcaatcggaagagcactgactcgccagttgagtgcatgggacaagaaaagggtgaatttagggaaatcttctacattatcggtgcagtggtgttcgtcgtgatcatcctcgtcatcatccttgccatatccctgcacaagtgccgaaaggcgggagtcggacagagctggaaagaaaattccccgctcaacgtttcc

SEQ ID NO: 8674 - DNA, 885 bp, synthetic construct
  misc_feature 1..885: note = source = /note="Description of Artificial Sequence: Synthetic coding sequence"
  source 1..885: mol_type = other DNA
atggaaacccccgcttggccacgggtgcctcgccctgagacagccgttgcacgtacgctcttgctcggttgggtgttcgcccaggtggccggggcctccggcacgacaaacactgtagctgcttataatctgacctggaaatccaccaattttaaaacaatcttggagtgggaaccgaaaccagtgaatcaagtctataccgtacagattagcaccaagagcggagattggaaatccaagtgtttttacacgaccgacactgaatgtgatttgactgacgagattgtgaaggacgtgaaacagacgtacctggcccgggtgttttcctatccggctggtaacgtggagagcactggatctgctggggagcccctatacgaaaactcaccggaatttacaccatatctagaaaccaatcttggccaacccaccatccagtcttttgaacaagtcgggaccaaggttaatgtcaccgtcgaggatgagaggacactcgtacgcaggaataacactttcttaagcttgcgtgacgtcttcggcaaagacctgatttacaccttgtattattggaagtcttccagtagtggcaagaagactgcaaaaacaaacacaaatgaattcttgatcgacgtggacaagggtgagaattattgctttagcgttcaggcagttattcctagtcggactgtgaaccgcaagtccactgattcacccgtcgaatgtatgggtcaggagaagggtgagttcagagaaattttttatatcattggcgccgtggtctttgtggtgattatcctggtgatcatcctggcaatatctctccacaagtgtcgaaaggcgggggtgggacagtcatggaaggagaatagcccactaaacgtgtcc

SEQ ID NO: 8675 - DNA, 885 bp, synthetic construct
  misc_feature 1..885: note = source = /note="Description of Artificial Sequence: Synthetic coding sequence"
  source 1..885: mol_type = other DNA
atggagactccagcctggccaagagtcccccggcccgaaaccgcggtggcacgcacccttctgctcgggtgggtgttcgcccaagttgcaggagcatcagggaccactaacaccgtggctgcatacaaccttacttggaagagcactaatttcaagaccattcttgaatgggaaccgaagccggtgaaccaggtgtatacggtccagatctcaaccaagtcaggcgactggaagtcgaagtgtttttacactaccgatacggaatgcgacttgaccgacgagatagtgaaagatgtcaagcaaacttacctcgctagggtgttttcctacccagcagggaacgtggagtccacgggaagcgccggcgaaccactgtacgaaaactccccagagtttaccccttacctcgaaactaatctgggacaacctaccattcagtcgttcgaacaggtgggtaccaaggtgaatgtcactgtggaagatgaaagaacgcttgtccggcgtaacaatactttcctttccttgagagatgtgtttggaaaggatttgatatacacgctctactattggaaaagctcgtcgtcgggaaaaaagaccgcaaagactaatacgaacgagttcctgattgacgtcgataaaggggaaaactactgttttagcgtgcaagccgttattccatccagaacggtcaatagaaagagcacggatagccccgtcgaatgtatgggacaggagaaaggagaattcagagagatcttttacattatcggagcggtcgtgtttgtggtgattatcctggtcataattctggcgatttcgctgcataagtgtagaaaagcaggtgtgggacaatcttggaaggagaacagccctcttaacgtctcc

SEQ ID NO: 8676 - DNA, 885 bp, synthetic construct
  misc_feature 1..885: note = source = /note="Description of Artificial Sequence: Synthetic coding sequence"
  source 1..885: mol_type = other DNA
atggaaactccagcgtggcctcgcgtccctcgtccggagactgcggtcgccagaactctgctgcttggttgggtctttgcacaggtggccggggcctccggcactactaatactgtggctgcatacaacctgacctggaagtctaccaatttcaagaccatccttgagtgggagccgaagccggtgaatcaggtgtacaccgtgcaaatcagcacgaagtctggagattggaaatcgaagtgtttctacactaccgataccgaatgtgacctgaccgacgaaattgtcaaggacgtgaagcaaacttacctcgcgcgggtgttcagttacccagcgggaaacgtggagtcaaccgggtctgccggcgaacctctctacgagaactcccccgaattcaccccatacttggaaactaaccttggacagccgacgatccaatccttcgaacaagtgggtaccaaggtcaatgtgaccgtcgaggacgagaggaccctggtcaggcggaacaatacttttctgagcctcagagatgtgtttggtaaggacctgatctacaccctctactactggaaatcctcctcatccggaaaaaagacggcgaaaacgaacactaacgaattcctgatcgacgtggacaagggagagaactactgcttttcggtacaggctgtaattccgtcgcggactgtcaatcggaagtcgaccgattcgcccgtggaatgcatgggccaggagaaaggagaattccgggaaatcttctatatcatcggagcagttgttttcgtcgtcattatcctggtgataatcttggccatctccttgcacaagtgcagaaaagccggcgtgggccagagctggaaggaaaattcgccgctgaacgtgagc

SEQ ID NO: 8677 - DNA, 885 bp, synthetic construct
  misc_feature 1..885: note = source = /note="Description of Artificial Sequence: Synthetic coding sequence"
  source 1..885: mol_type = other DNA
atggagacgcctgcgtggccccgagtgccgcgacccgagactgccgtcgccagaacattgctgttgggctgggtcttcgctcaggtggccggtgcctccggaaccaccaatacagtggcagcttataaccttacttggaaaagcaccaatttcaagacgatcctggagtgggagcctaagcctgtgaatcaggtgtatactgtgcagatcagcacaaagtccggggactggaaaagtaaatgcttctacacaacagataccgagtgtgatttgacggacgaaatagttaaagacgttaaacagacttacttggcaagagtgtttagctatcctgcaggcaatgtcgaatcaacaggatccgctggggaaccactgtatgagaattctcccgagttcacaccatatttggagacaaatctgggacaaccgactattcagtcattcgagcaagtgggaaccaaggtgaatgttactgtcgaagatgaacgaactctcgtgcgaagaaataacactttcctaagcctcagggacgtgttcgggaaggacttgatctataccctgtactactggaagtcaagtagcagtggcaagaagacagctaagactaataccaatgagtttctgatcgatgtggataagggcgagaattactgtttcagcgtacaggctgttatcccctcgaggacggtaaatcgcaagtccacagactccccagttgaatgcatggggcaggagaagggggaattcagggagattttttatatcattggcgccgtggtttttgtggtgatcatccttgttattatcctggccatatctctccataaatgtagaaaagccggggtgggacaatcttggaaagagaactctccactgaacgtgtcc

SEQ ID NO: 8678 - DNA, 885 bp, synthetic construct
  misc_feature 1..885: note = source = /note="Description of Artificial Sequence: Synthetic coding sequence"
  source 1..885: mol_type = other DNA
atggaaacccctgcatggcctagagtgccacggcctgagactgcagtggcacggactctgcttctgggatgggtctttgcacaggtggctggtgcatcagggaccaccaacaccgtggcagcgtacaaccttacctggaagtctactaacttcaaaactattctcgaatgggaacctaagcccgtgaaccaggtgtataccgtgcaaatttccacgaagagcggagattggaagtccaagtgtttttacaccactgataccgaatgcgacttgaccgatgaaatcgtgaaagacgtcaagcaaacttatcttgcaagggtgttttcctacccggcggggaatgtcgagtcgaccggttcggcaggagaaccactttacgagaactcacccgagttcaccccgtacctcgaaaccaatctgggacaaccaaccatccaatcatttgaacaagtgggaaccaaagtgaacgtgaccgtggaggacgaaagaacgctcgtccgtcgcaacaacaccttcctgtcgctcagggacgtgttcggtaaggatttgatttacaccctctactactggaaaagctcgtcaagtgggaaaaagacggcaaagactaacacgaacgaattcctgattgatgtggacaaaggggagaactactgttttagcgtgcaagcagtgattccctcacggaccgtgaataggaagtccaccgattcaccagtggaatgtatgggacaggaaaagggcgagttccgcgagatattctacattataggtgcggtggtctttgtagtgatcatcctggtgattatacttgccatctcgcttcacaagtgcaggaaggctggggtgggacaaagctggaaggagaactcaccacttaacgtgtcc

SEQ ID NO: 8679 - DNA, 885 bp, synthetic construct
  misc_feature 1..885: note = source = /note="Description of Artificial Sequence: Synthetic coding sequence"
  source 1..885: mol_type = other DNA
atggagacgcccgcttggccacgtgtaccacgacccgaaaccgccgttgcccggaccttactcctgggttgggtgtttgcccaagtggccggggcttccggcacaaccaacaccgtagctgcatataatctgacttggaagagcacaaactttaagacaatcctcgagtgggaaccaaagccagtcaatcaggtgtacaccgtccagatctctacgaagtccggcgattggaaatctaaatgtttttacaccactgacacagaatgcgatctgactgatgagatcgtgaaggacgtcaaacaaacctatcttgcacgcgtattctcatatccagctggcaacgtggaatccacgggttccgcaggggagcccctgtacgagaactcaccagaatttacaccctacctggagacaaaccttgggcagcccacaattcagtcattcgagcaggtgggtacaaaggtcaacgtgacagtggaagatgagcgaaccttagtgaggcggaacaacacattcctttccctgagggatgtctttggcaaggacctgatttacacattgtattactggaaatctagcagttccggaaaaaaaacagctaagaccaataccaatgagttcctcatcgatgttgataagggtgagaactactgtttcagtgtccaggcagtgattccatctcggaccgttaatcgcaagagcaccgattcccctgtggaatgtatggggcaggagaagggggagtttcgtgagatcttttatattatcggagccgtggtgttcgtggtcatcatcctcgtcatcattctcgcaattagcctgcataaatgcagaaaggcaggagttgggcaatcatggaaggagaattctcccctcaacgtgagc

SEQ ID NO: 8680 - DNA, 885 bp, synthetic construct
  misc_feature 1..885: note = source = /note="Description of Artificial Sequence: Synthetic coding sequence"
  source 1..885: mol_type = other DNA
atggagacacctgcctggccaagagtgcccagacctgaaacggctgtagcacgcaccctgctcctgggctgggtgttcgcccaggtggcaggagcttcagggaccacaaataccgtggctgcatataatctgacttggaagagcacaaactttaagactatactcgaatgggaaccaaagcccgtaaaccaggtttatactgtccagatctccaccaagagtggggactggaaatccaagtgcttctacaccacggatactgagtgcgacctgacggatgagatcgtcaaggatgtcaaacagacatacctggcacgagttttctcttatccagctggcaacgtggagagtacagggtcggcgggagagccactgtatgaaaactctcctgagttcaccccgtacctcgagactaatctgggccagcccaccatccagtcttttgaacaggtcggtaccaaagttaacgtgaccgtggaggacgagcgcaccctcgttcggagaaacaacaccttcctctcgcttcgcgatgtgttcgggaaagacctgatttacacactgtactactggaagtcatcttctagcggtaaaaaaacagccaagacaaacactaatgaatttctgattgatgttgataagggggagaattattgttttagtgtgcaggccgtgattccgagccggaccgttaaccggaagtcaaccgattctccagtggaatgcatgggccaagagaaaggggagttcagggaaatattctacatcatcggcgccgtcgtgttcgttgtaattatcttggtcatcatcttggctatatccctgcacaaatgcagaaaagctggagtggggcagtcttggaaggagaactcgccactaaacgtgtca

SEQ ID NO: 8681 - DNA, 885 bp, synthetic construct
  misc_feature 1..885: note = source = /note="Description of Artificial Sequence: Synthetic coding sequence"
  source 1..885: mol_type = other DNA
atggagacgcctgcgtggccgcgtgtcccgagaccggaaaccgccgtagcaagaacattactgttaggttgggtgtttgcacaagtagctggagcaagtggaactacaaacaccgtagccgcttataatcttacgtggaagtcaacaaatttcaagactatcttagaatgggagcctaagccggtcaatcaggtatatacagttcaaatatctacaaagagcggagattggaagtccaaatgtttctatacgacggatacggaatgtgacttaacagacgagattgttaaggatgtgaagcaaacctatctcgcccgtgttttctcttatccggccggcaacgttgaatcaactgggtctgccggtgagcctttatatgaaaactctcctgaattcacaccttatttggagaccaatttggggcagccgaccatacagagttttgagcaagttggaaccaaggtaaacgtgaccgtagaagatgagaggacccttgtacgcaggaacaacacatttttgtcactgagggatgtgtttgggaaagacctcatctataccctctattactggaaatcgagtagttctggcaaaaaaacggccaagacaaatacaaatgaattccttattgatgtcgataagggagagaattattgcttctcagttcaagcagtcattccgtcaaggaccgtaaatcgcaagtcaacagatagtccggtggaatgcatggggcaggaaaagggcgaatttcgtgaaatcttttatatcattggcgctgtagtctttgtagtcataattctggttattattttagcaatttcgttacataaatgtcggaaagctggagtcggtcagtcgtggaaagaaaactccccattgaatgtctct

SEQ ID NO: 8682 - DNA, 885 bp, synthetic construct
  misc_feature 1..885: note = source = /note="Description of Artificial Sequence: Synthetic coding sequence"
  source 1..885: mol_type = other DNA
atggagacgccagcttggccgcgggtgccccgccctgagacggccgtggcacggaccctgctgctgggttgggtgtttgcccaagtcgcgggggcgtccggaaccactaatactgtcgccgcttacaatctcacttggaagtctaccaacttcaagaccatcctcgaatgggaacccaagccggtgaatcaggtgtacacggtgcagatctcgaccaagtccggagattggaagtcgaagtgtttctacaccactgacaccgaatgcgacctgactgacgaaatcgtcaaagacgtcaagcagacctacctggcgagagtgttcagctacccagcagggaatgtggaatcgactggatcagccggcgaacctctgtacgaaaacagccctgagtttaccccgtacctggagactaaccttggccagccgactatccaaagtttcgagcaggtcggaaccaaagtcaacgtgaccgtggaggacgagcgcactctcgtgagacgcaacaacactttcctgtccctgcgagatgtgttcggaaaggaccttatctacaccctctactactggaaatcatcctcctcgggaaagaaaacggctaagaccaacactaacgaatttctcatcgatgtggacaaaggagaaaactattgcttctcagttcaagccgtcatcccgtccagaaccgtgaataggaaaagcactgattcgccagtggaatgcatggggcaagagaagggagaattccgggaaattttctacatcatcggtgccgtggtgtttgtggttattatcctcgtcatcattttggcaatctcgttgcacaagtgccgcaaggcgggcgtcggccagagctggaaggagaacagcccgctgaatgtgtca

SEQ ID NO: 8683 - DNA, 885 bp, synthetic construct
  misc_feature 1..885: note = source = /note="Description of Artificial Sequence: Synthetic coding sequence"
  source 1..885: mol_type = other DNA
atggagacgcccgcgtggcctcgagtaccccgtcctgaaactgcggttgcgcgaacactactgttaggatgggtcttcgcccaggtggcgggtgctagcggcacaaccaacacggtcgcggcctacaaccttacatggaagagcaccaactttaaaaccattctggagtgggagcctaaacccgtgaaccaggtgtacaccgtacaaatcagcaccaagtcgggggactggaaatctaaatgtttctatacgaccgacaccgagtgcgacctcacagacgaaattgtaaaggatgtgaaacagacctacctggcgcgggtgttctcttatcccgccggtaatgtggaatccactggctctgctggagaacctctgtacgaaaattctccggagttcactccctacttagaaaccaaccttggtcagcctaccatacagtcatttgagcaggtggggacgaaggtaaacgtcaccgtcgaggacgagcgaactctcgtacgcaggaataatacattcctaagcctaagagatgtgttcggcaaggatctgatttatactctgtattactggaagtcctcgagttccggcaagaagacagcaaaaaccaacaccaatgagtttctgatagatgtggataagggagagaactactgttttagcgtgcaggccgtgatcccaagtcgtaccgtcaacagaaagagcacagattccccagttgagtgtatgggtcaggagaaaggggaatttcgcgaaatcttttacattataggagcggtggtcttcgtcgtgataattttggtgattattttggccatcagtctgcacaagtgtagaaaggctggcgtcggccagtcctggaaggaaaatagcccactgaatgtgtct

SEQ ID NO: 8684 - DNA, 885 bp, synthetic construct
  misc_feature 1..885: note = source = /note="Description of Artificial Sequence: Synthetic coding sequence"
  source 1..885: mol_type = other DNA
atggagacaccagcctggccaagagtccctcggcccgagactgccgtggctcggactctacttctggggtgggtgtttgcacaggtcgccggggcatccggaactactaatacagtggcagcctataatcttacatggaaatcaactaacttcaagacaatcctagagtgggaacccaagcctgttaaccaggtatacacagtgcagatatcaacaaagtccggagattggaaatcgaaatgcttctatacaacagatacggaatgcgatctgacagatgaaatagtcaaagatgtgaaacagacttatttggcaagagtgttttcttatcccgctggaaacgtggaaagtacagggtcagccggggaacccttatatgagaattcccccgagtttacaccttacctagagacaaatctagggcagcctacaatccagtcctttgaacaggtgggaacaaaggtaaacgttactgttgaagatgaacgaacactggtgcgccgcaataacacatttctctccctacgcgatgttttcggaaaagatctaatctatacactatattattggaaaagttcgagttccgggaaaaaaacagccaaaactaatactaatgaatttcttatcgacgtggataaaggagaaaactactgcttctcagtgcaggccgttatccccagtaggacagttaacaggaaatctacagattctcccgttgaatgcatggggcaagaaaaaggggagtttcgagaaatcttctatatcatcggggctgttgtatttgtagttataatactggtaatcatcttagcaatttccttacacaaatgtaggaaagcaggagtggggcagtcctggaaagaaaactcccccttgaatgtaagt

SEQ ID NO: 8685 - DNA, 885 bp, synthetic construct
  misc_feature 1..885: note = source = /note="Description of Artificial Sequence: Synthetic coding sequence"
  source 1..885: mol_type = other DNA
atggaaactccggcctggcctcgagtgcctagacctgaaaccgcagtggcccgaaccctgttgctgggatgggtgttcgcgcaagtcgccggagcatccggaactaccaataccgtggctgcttacaatcttacctggaaatccactaactttaagacgattctcgagtgggagcctaaacctgtgaaccaagtctacaccgtgcagatctccactaagtccggcgactggaagagcaagtgtttctacaccaccgataccgagtgtgacctgaccgatgagattgtgaaagatgtgaaacaaacttatcttgcccgggtcttttcctaccctgcaggtaatgtggaatcaactggatctgcaggggaacctctttacgagaattcacctgaatttactccgtacctcgaaactaacctgggacaacctaccattcagtcgtttgagcaggttggaaccaaagtgaacgtcaccgtggaggacgaacgtacccttgtgcgccgaaacaatacttttctgagcctgagggatgtgtttggaaaggacctcatttacacgctgtactactggaagtcgtcatcgtcgggaaagaaaacggccaagactaacacgaatgaattccttatcgacgtggacaaaggtgaaaactactgtttttcggtgcaagccgtcattccctcgcggaccgtgaaccgcaaatcaaccgatagccctgtcgagtgtatggggcaggaaaagggtgagttccgggaaatcttctacatcattggggcagttgtgtttgtggtgattattctggttatcattctcgctatatcccttcataagtgtcggaaggcaggcgtgggacagtcgtggaaggaaaactctcctttgaatgtgagc

SEQ ID NO: 8686 - DNA, 885 bp, synthetic construct
  misc_feature 1..885: note = source = /note="Description of Artificial Sequence: Synthetic coding sequence"
  source 1..885: mol_type = other DNA
atggaaacgccggcctggccacgcgtgccgcggcctgaaaccgccgtcgctcggaccctgctgcttggatgggtgttcgcacaagtggcgggggcctccggaactactaatactgtcgcggcgtacaacctcacctggaaatcaaccaactttaagaccatcttggagtgggaacccaaaccagtgaatcaggtgtacactgtccagatcagcaccaaatccggggattggaaaagcaaatgcttttacaccactgataccgaatgtgacttgaccgatgaaattgtgaaggatgtcaagcaaacttatctggcaagagtgttctcgtaccctgcaggaaacgtggagtcgactggaagcgcaggtgagcctctgtacgagaattcgcctgagttcacgccctacctggaaactaatctcgggcagcctactatccaatcctttgaacaagtgggaactaaggtcaacgtgaccgtcgaagatgagaggactcttgtccggagaaataacacgtttctttcccttcgtgatgtgttcggaaaggatctcatatacacgctgtactactggaagagcagctcaagcggaaagaaaactgcaaagaccaataccaacgaattcctgattgatgttgacaaaggagagaactattgcttcagcgtgcaagccgtgatcccgagccgtaccgtgaaccgtaaatcgactgactcgcctgtcgaatgtatgggacaggaaaagggcgagttccgggaaatcttctatatcattggcgcagtggtgttcgtggtaatcattctggtgataattctggctatctcacttcataagtgtaggaaagcaggagtgggtcagagctggaaggaaaactcgcccctcaatgtctcc

SEQ ID NO: 8687 - DNA, 885 bp, synthetic construct
  misc_feature 1..885: note = source = /note="Description of Artificial Sequence: Synthetic coding sequence"
  source 1..885: mol_type = other DNA
atggaaacgccggcctggcctcgcgtgccgcggccggaaaccgcagtcgcacgaacgctgcttctcggctgggtctttgctcaagtggccggcgccagcggaactactaacaccgtggccgcttacaaccttacttggaaatccacgaacttcaaaactatcctggagtgggaaccaaaaccagtcaaccaggtgtacaccgtgcaaatatcaaccaagtcgggcgactggaagtccaagtgcttctacactaccgatacggagtgcgacttgaccgacgagatcgtcaaggatgtcaaacagacctacctggcacgggtcttttcctaccctgcaggaaacgtcgagtccacggggtccgccggagagcctttgtacgaaaactcgccggagtttaccccatacctcgaaaccaatctggggcaaccgactatccagtccttcgaacaggtcggcactaaagtgaatgtgacggttgaagatgaacggaccctcgtgaggcgcaacaataccttcctgagcttgagagatgtgttcggtaaggacctcatctacacgctgtattactggaaatcgagcagcagcggtaaaaagacggcaaagactaacactaatgagtttctcatcgatgtcgacaagggagagaactactgcttcagcgtgcaggcggtgatccccagcagaaccgtgaaccggaagtcgactgactcgcctgtcgaatgtatggggcaagaaaagggggaattccgcgaaatcttctacatcatcggcgccgtcgtctttgtggtgatcatcctggtgattatcttggctatttcactccacaagtgccggaaggcgggggtgggccagagctggaaggagaattcgccgctgaatgtcagc

SEQ ID NO: 8688 - DNA, 885 bp, synthetic construct
  misc_feature 1..885: note = source = /note="Description of Artificial Sequence: Synthetic coding sequence"
  source 1..885: mol_type = other DNA
atggaaactccggcgtggccgcgggtgccacggcccgaaaccgcggtggcacggactcttctgctcggttgggtgttcgcccaagtcgcaggtgcctcgggtacgaccaacacggtggccgcatacaatctcacgtggaaatcaaccaactttaagactatccttgaatgggaaccaaaacccgtcaaccaggtctacactgtgcaaatcagcactaagtcgggggactggaagtccaagtgtttttacaccactgataccgaatgcgatctgactgacgagattgtgaaggatgtgaaacagacctacctggcaagagtgttttcgtaccctgctggaaacgtggagtcgacgggatccgcgggcgaacctctgtacgagaattctcctgagtttactccttaccttgagactaaccttggacagcccacgattcagtcgtttgaacaggtgggcaccaaagtgaatgtgactgtggaagatgaaaggactctggtgcgccgaaataacacttttctgtcccttcgagatgtctttggcaaggatctgatttacaccttgtattactggaaatcgtcgtcatccggaaaaaagaccgcaaaaaccaatactaatgaatttctcatagatgttgataagggtgagaattactgcttttcagttcaagcagtgattcctagccggactgtgaacaggaagtcgaccgattcgccagtcgagtgtatggggcaagaaaagggagagttccgggagatattctacatcattggagcagtggtctttgtggtcatcattctggtcattattctggcaattagcctgcataagtgtagaaaagcaggagtgggacaatcctggaaggaaaattccccactgaacgtgtcc

SEQ ID NO: 8689 - DNA, 885 bp, synthetic construct
  misc_feature 1..885: note = source = /note="Description of Artificial Sequence: Synthetic coding sequence"
  source 1..885: mol_type = other DNA
atggagactcccgcctggccccgggttccccgtcctgaaacagccgtcgccagaacgctcctgctcggttgggttttcgcccaggttgctggggcatcgggcacgactaacaccgttgccgcctacaatctgacttggaagtccacgaacttcaagacaattcttgagtgggagcctaaaccggtgaatcaggtctatactgtccagatttccactaagtccggagattggaagtccaagtgcttctacaccaccgacactgagtgcgacctgaccgacgagattgtgaaggatgtcaagcagacatacctcgcgagagttttctcttaccccgccggaaacgtcgagtccaccggttcggcgggggaacccctttacgagaattctcctgagttcaccccgtacctcgagaccaaccttggtcagcccacgattcagtctttcgagcaggtcggcacgaaagtcaacgttactgtggaggacgaacgtaccctggtacgccgaaataacacgttcctcagcctgcgagacgttttcggaaaggatcttatttacaccctctactactggaagagttcctctagtggcaagaagactgccaagactaacacgaatgaattcctcatcgacgtcgataagggcgagaactactgcttcagcgttcaggccgttataccttcgcgcaccgtaaaccgcaagtccacagacagcccggtagagtgtatgggtcaggagaagggcgagttcagggaaatcttctacatcatcggcgctgtcgtgttcgtcgtgattatcctggtcattatccttgctatctctttgcacaagtgtcgtaaggcaggcgtcggtcagagctggaaggagaactcacccttgaacgtttcg

SEQ ID NO: 8690 - DNA, 885 bp, synthetic construct
  misc_feature 1..885: note = source = /note="Description of Artificial Sequence: Synthetic coding sequence"
  source 1..885: mol_type = other DNA
atggaaacgcccgcgtggccacgggtgccccgcccagaaaccgccgtggcaagaactctcctgcttggatgggtgttcgcacaggtggccggagcttccggaaccactaacactgtcgcagcttacaatctcacctggaaatccactaacttcaaaaccatcctggagtgggagccaaagcctgtgaaccaggtgtatactgtacagatctcgaccaagtcgggggattggaagtcgaaatgcttctacaccactgataccgagtgtgatctgaccgatgagatagtgaaagacgtgaagcagacctacctggcacgggtctttagctaccctgcaggaaacgtggagtcgactggctccgcaggtgaacctctttacgaaaacagccccgaattcaccccataccttgaaactaacctcggccaacctaccatccagtcgtttgaacaagtgggtactaaggtgaacgtgaccgtggaagatgagagaaccctcgtgagacggaacaatacctttctttcccttcgagatgttttcggtaaggaccttatctacaccctttactactggaagtcctcgtcgtcgggaaaaaagaccgcaaaaactaacactaacgaatttctgattgatgtggacaagggagagaactactgcttttcagtgcaagcggtgattccctcacggaccgtgaatcgaaagagcaccgattcgcctgttgaatgcatgggccaagagaaaggtgaatttcgggaaatcttttacattattggagctgtggtgtttgtggtcatcatccttgtgatcatcctggcaattagcctccataagtgtcggaaggcaggtgtggggcagagctggaaggaaaattctccactgaatgtttca

SEQ ID NO: 8691 - DNA, 885 bp, synthetic construct
  misc_feature 1..885: note = source = /note="Description of Artificial Sequence: Synthetic coding sequence"
  source 1..885: mol_type = other DNA
atggaaacccctgcatggccgagggtgccccgcccagaaacagccgtggcaagaactcttctccttggctgggtgtttgcgcaagtagcgggggcctcagggacaacgaacaccgtagccgcttacaacttaacctggaagtcgaccaacttcaagaccattctcgagtgggaacccaagccggtcaaccaagtctatactgtccagatctccactaaatcaggtgactggaagtccaagtgcttctacaccaccgatacagagtgcgatctgaccgacgagatcgtgaaagatgtcaaacaaacatacttggctcgcgtgttcagttaccctgcaggaaacgtcgaatccacagggtcagcaggagagccactttatgaaaactccccagaatttacaccgtacctggagaccaacttaggccaacctacgatccagtctttcgagcaggtgggcactaaggtgaacgtgactgtagaggatgaacgcactcttgtgcgtcggaacaacaccttcctgtctctgagggacgtgttcggcaaggacctgatctatacactctactactggaagtcttcgtctagcggcaaaaagactgctaagacaaacacaaatgagtttttgatcgacgtggacaagggagagaattactgtttctccgtgcaggcggtgatccccagtaggaccgtgaatcgaaaatccacagactcaccggttgagtgtatggggcaggaaaagggcgaattcagggaaatcttttatatcataggtgccgttgtgtttgtcgtgattatcttggtgatcatcctggcaatatcccttcacaaatgtaggaaggcgggcgtaggtcaatcttggaaagaaaactctccgctgaatgtgtcc

SEQ ID NO: 8692 - DNA, 885 bp, synthetic construct
  misc_feature 1..885: note = source = /note="Description of Artificial Sequence: Synthetic coding sequence"
  source 1..885: mol_type = other DNA
atggaaactccagcatggcctagagttccaagaccagaaacagctgtcgccaggactctattacttggatgggttttcgcacaagttgcaggagccagtggtactactaatactgttgcagcttacaatttaacatggaaatctactaatttcaaaactattttagaatgggaaccaaagccagtaaatcaagtttatacagttcaaatttctactaaatctggagattggaaatctaaatgtttttatactactgacacagaatgtgatcttacagatgaaatcgttaaggatgtaaaacaaacatatttagctagagttttttcatatcctgcaggaaatgttgaatcaactggttcagctggagaaccattatatgaaaattcaccagaattcacaccatatttagaaactaatcttggtcaaccaacaattcaatcttttgaacaagtgggaacaaaggttaatgtcacagttgaggacgaaagaacattagttagaaggaataatactttccttagtttaagagatgtttttggaaaggaccttatatatactctttattattggaaatcttcttcatcaggtaaaaagacagctaagacaaatacaaatgaatttttaattgatgttgataaaggagaaaattattgtttctctgtacaagctgttattccatcacgaacagttaatagaaaatcaactgattcaccagttgaatgtatgggacaagaaaaaggggaatttagagagattttttatataattggtgcagttgtttttgttgttattattttagttattattctagctatatcacttcataaatgtagaaaagcaggtgtaggtcaatcatggaaagaaaattcaccattaaacgtttca

SEQ ID NO: 8693 - DNA, 885 bp, synthetic construct
  misc_feature 1..885: note = source = /note="Description of Artificial Sequence: Synthetic coding sequence"
  source 1..885: mol_type = other DNA
atggagactcctgcttggcccagagtgcctcgcccggaaaccgcagtggccagaaccctgctgctgggatgggtgttcgcgcaggtggccggagcctctggcactactaatactgtcgccgcgtacaatttgacttggaagtcgaccaatttcaaaaccatcctggagtgggagcctaagccagtgaaccaagtgtatactgtgcaaatctcaaccaagtccggggattggaagtctaagtgcttttacacgaccgacactgaatgcgacctgactgatgaaatcgtgaaggatgtcaagcaaacctacctggcaagagtgttttcgtacccggccggtaacgtcgaatcaacgggctcggcgggtgaaccgctgtacgaaaactccccggagtttaccccctaccttgaaaccaatctgggacagccgaccatacaatcgtttgagcaagtgggtactaaggtgaatgtcactgtggaggatgaacggacgcttgtccgtaggaacaatacgttcctgtcgctcagggacgtgttcgggaaggacctcatttacaccctgtactattggaaatcttcaagctccggaaaaaagaccgccaaaactaacacgaacgaattcctcatcgacgtggacaagggagaaaactactgtttttctgtccaggcagtgatcccgtcacggactgtgaaccgaaagagcaccgactccccggtcgagtgcatgggacaggaaaagggcgagttccgcgagattttctacatcattggagcggtcgtgttcgtcgtcatcatcttggttatcatccttgcgatcagcctgcacaaatgccggaaagctggtgtgggccagtcgtggaaagagaactccccactgaacgtgtca

SEQ ID NO: 8694 - DNA, 885 bp, synthetic construct
  misc_feature 1..885: note = source = /note="Description of Artificial Sequence: Synthetic coding sequence"
  source 1..885: mol_type = other DNA
atggaaactcctgcttggcctagagttccccgtcctgaaaccgcggtggctagaacacttcttttgggatgggtgttcgctcaagtcgcaggtgcttcaggaactactaacacggttgctgcatacaatttgacatggaagagtaccaatttcaaaactattcttgagtgggaacctaaaccagtcaatcaagtttataccgtacaaatttcaactaaatccggtgattggaagtctaagtgtttctacacaactgacacggagtgtgacttgactgatgagatcgtgaaagacgtcaagcaaacgtatctcgctagagttttttcatatcctgctggtaacgttgagtcaaccggatcggctggtgaaccactttatgagaattctcccgaattcaccccttatctggaaactaatttgggacaaccaaccattcagtcattcgagcaggtggggacgaaagttaacgtcactgttgaagacgaaagaacactcgttagacgaaacaatacgttcttgtcacttcgagatgtatttggtaaagatcttatctacacactttactattggaagtcaagtagcagcggaaagaagactgcgaagacaaataccaatgaatttctgatcgatgtagataaaggtgaaaattactgcttcagtgttcaggctgttataccttcacgtaccgtcaacaggaaatcaactgattcacctgtcgaatgtatgggtcaagaaaagggcgagtttagggagattttctacatcatcggagctgttgtatttgtagttatcatcttggttattattctcgctattagcttgcataagtgccgtaaagctggtgttggtcaatcctggaaggagaatagcccactcaatgtttca

SEQ ID NO: 8695 - DNA, 885 bp, synthetic construct
  misc_feature 1..885: note = source = /note="Description of Artificial Sequence: Synthetic coding sequence"
  source 1..885: mol_type = other DNA
atggaaacccctgcgtggccaagggtgcctagacccgaaacggcggtggccagaactctgctcctgggttgggtctttgcccaggtcgcaggagcctcgggcaccacgaacacggtggctgcttacaacctcacgtggaagagcactaacttcaagactatcttggaatgggaacctaagccggtcaaccaggtgtacaccgtgcagatctcgaccaaatccggggactggaagtctaagtgcttctacaccaccgacactgagtgcgatctgaccgatgagatcgtgaaggacgtgaaacaaacgtacctcgcccgggtgttctcataccctgctggaaatgttgagtccactggatcggcgggggaacctctgtacgaaaactccccagagttcaccccttacctggagactaatctgggacaaccgaccattcagtccttcgagcaggtgggaactaaagtcaacgtcaccgtggaagatgagaggaccctcgtccggaggaacaatacttttctctcgctccgggatgtgttcggtaaggacctgatctacacgctgtactactggaaatcctcctcgtccggcaagaaaaccgccaagaccaatactaatgaattcctgatcgacgtggataagggagaaaactactgcttttccgtccaggctgtgatcccgagcagaaccgtgaaccggaagtcgactgactcaccggtcgaatgtatggggcaagaaaagggtgagttccgggaaatcttctacatcattggagcagtcgtgtttgtggtcatcatcctcgtgatcatcttggccatctcactgcataaatgccgcaaagctggtgttggacagtcgtggaaagaaaactcgccactgaacgtctcg

SEQ ID NO: 8696 - DNA, 885 bp, synthetic construct
  misc_feature 1..885: note = source = /note="Description of Artificial Sequence: Synthetic coding sequence"
  source 1..885: mol_type = other DNA
atggagacaccggcttggccacgcgtccctcgcccggagactgccgtggcgcggactttgctcctgggctgggtctttgcccaggtggctggcgctagcggtaccacgaacactgttgccgcatacaatctgacctggaagtctaccaatttcaaaacaatacttgagtgggagcctaaacctgtgaaccaagtctatacagtccaaatctcgactaagagtggagactggaaatcgaaatgtttctatacaaccgacacagagtgtgacctgaccgacgaaattgttaaagacgtgaaacagacctacctcgcacgagttttctcctatcccgccggtaatgtagaaagtacaggatctgcgggcgaacccctgtacgagaatagcccggaattcaccccatatctggaaacaaacctgggacagcccacgatccaatctttcgagcaagtggggacaaaagtgaatgttacagtggaggatgagcggactctggttcgccgcaataatacattcttgagcttgcgagatgtgtttggaaaagacctgatctataccctgtattactggaagtcgtcctccagtgggaagaagaccgccaagaccaatactaatgaattcctgattgatgtagataaaggtgaaaattactgcttttctgttcaggcagtaatcccaagtcggaccgtcaacaggaaaagtacagatagccccgtcgagtgcatgggacaggagaaaggagaattccgcgagatattttacatcataggtgccgtggtgtttgtcgtgattatcttggtcattattctagcaatctcactccataagtgccgcaaggctggggtgggccagtcctggaaagaaaatagcccattaaacgtatca

SEQ ID NO: 8697 - DNA, 885 bp, synthetic construct
  misc_feature 1..885: note = source = /note="Description of Artificial Sequence: Synthetic coding sequence"
  source 1..885: mol_type = other DNA
atggagaccccggcctggccccgcgtgccgcggcctgagactgccgtggctcggacactgctgctgggttgggtctttgcccaagtggcgggagcttccggcaccactaatactgtggcggcctacaacctgacatggaaaagcacgaatttcaagacgatcctggaatgggagccgaagcctgttaatcaggtctacaccgtgcagatcagcactaaaagcggcgattggaaaagcaagtgtttctataccacggataccgagtgtgaccttaccgatgagattgtgaaagatgtcaagcagacctatttggcgcgcgtcttttcctaccctgcaggtaatgttgaatccaccggaagcgcgggcgagccactgtatgagaactcacctgaattcactccttacctggaaaccaacctgggtcagccgactattcagagcttcgagcaggtgggcactaaggtcaacgtcactgtggaggatgaacggaccctggttcgccgcaataacaccttcctgagcctgcgcgatgttttcggaaaggatctgatttataccttgtattactggaaatcgtctagcagcggtaagaaaaccgctaagaccaacaccaatgagttcctgattgacgtggataagggtgagaattactgcttttccgtacaggccgtcatccctagcaggaccgttaaccgtaaaagcacggattcccctgttgagtgcatgggccaggagaaaggtgaatttcgagagatcttctacattatcggtgccgtggtgttcgtcgtgatcatcctggtgattatcttggccattagcctgcacaagtgtcggaaggcgggcgtcggtcaaagctggaaagagaatagtccgctgaacgtcagc

SEQ ID NO: 8698 - DNA, 885 bp, synthetic construct
  misc_feature 1..885: note = source = /note="Description of Artificial Sequence: Synthetic coding sequence"
  source 1..885: mol_type = other DNA
atggaaactccggcgtggcctagagtcccaagacctgaaactgcagtagcaaggaccctgcttcttggctgggtatttgcacaagtcgccggcgcttctggaactaccaacaccgtggccgcctataacttgacttggaaatcgaccaactttaagactatccttgaatgggaacctaaacccgtcaatcaagtttacactgtgcaaatctccactaagtcgggagactggaagagcaagtgcttctataccactgacaccgagtgtgaccttacggacgaaatcgtgaaggatgtcaagcaaacctacctggctcgagtgttctcgtacccagcaggcaatgtggaaagcaccgggtcggcgggtgaacctctttacgagaattccccagagttcaccccgtacctcgaaactaacttgggtcagcctaccattcagtcgtttgaacaggtcggaaccaaggttaacgtcacggtggaggatgaacgtactctggtgagacgcaataacacctttttgtcactgcgcgacgtgtttggaaaagatctgatttacaccctttactactggaaaagctcctcctcaggaaagaaaaccgcaaagactaacacgaacgaatttctgattgatgttgataagggagagaactactgtttcagcgttcaggccgttataccttccagaacggtgaacagaaagtcaactgattccccagtggaatgcatgggacaagaaaagggagaattcagagagatcttttacatcattggtgccgtggttttcgtagtgattattctcgtgataatacttgcaatttcacttcataagtgtaggaaggcgggagtgggacagtcctggaaagagaatagccctctgaacgtctca

SEQ ID NO: 8699 - DNA, 885 bp, synthetic construct
  misc_feature 1..885: note = source = /note="Description of Artificial Sequence: Synthetic coding sequence"
  source 1..885: mol_type = other DNA
atggaaacgccagcgtggcctagagtcccacggcccgaaactgccgtggcccgcactctgctgcttgggtgggtgtttgctcaggtcgcaggggccagcggaactactaacaccgtggcagcctacaacctgacctggaagtcgacgaactttaagactatcctggaatgggagccgaaaccagtcaatcaggtatatactgtccaaatctcgaccaagtcgggagattggaagagcaagtgcttttacaccaccgatactgagtgtgatctgactgacgagatcgtcaaagatgtgaagcaaacttacctcgcgcgggtcttttcctatccagctgggaatgtggagtcgactggatcagccggcgaaccactgtacgagaattcaccagaattcactccgtacctcgagactaacctcggtcagcccactatccaatccttcgagcaggtgggaacgaaagtgaatgtgaccgtggaggatgagcgaaccctggtccgccgcaataacactttcctgagcttgcgggatgtgttcggaaaggacctcatctacaccctttactactggaagtcatcatcgtcaggcaagaaaaccgcgaaaaccaatactaacgaattcctcatcgacgtggacaagggagaaaactactgtttctcggtgcaggcggtgatcccctcgagaactgtcaatagaaaatcaactgacagccccgtcgaatgtatgggccaggaaaagggagaattccgggaaatcttctacatcataggtgctgtcgtgttcgtggtgatcattctggtcatcatcttggccattagcctccataagtgccgcaaggcgggagtgggtcaaagctggaaagaaaacagcccactgaacgtgtca

SEQ ID NO: 8700 - DNA, 885 bp, synthetic construct
  misc_feature 1..885: note = source = /note="Description of Artificial Sequence: Synthetic coding sequence"
  source 1..885: mol_type = other DNA
atggagactcctgcatggccgcgcgtgccgcgcccggaaactgccgtggctcgtaccctgctcttggggtgggtctttgcccaggtggcaggggccagcgggactacgaacacggtagcagcttacaaccttacctggaaaagcactaatttcaaaactattctggagtgggaacccaaacccgtgaaccaagtgtacaccgtgcagatcagcaccaagagcggcgactggaagtcgaagtgcttctatactaccgatacggaatgcgatctgacggacgagattgtgaaagacgtgaagcaaacctacttggcgcgggtattctcgtacccggcgggaaacgtcgaatctactggctcagctggagagcctctgtacgaaaactcccccgagttcactccatatctcgaaaccaacctgggtcagccaactatccagagctttgaacaagtgggaacgaaggtcaatgtgactgttgaggatgaacgcaccctcgtgagacggaataacaccttcctgtctctgcgcgatgtgtttgggaaagacctcatctacaccttgtactactggaagtccagcagctcaggcaagaaaactgccaagaccaacaccaatgaattcctgatcgacgtggataagggtgaaaactactgcttctccgtgcaggctgtcattccatccaggaccgtcaatcgtaagtcaactgactccccagttgagtgtatgggacaagagaagggagaattcagagagatcttttacatcataggagcggtcgttttcgtcgtgatcatcctggtcatcatcctggccatttcactgcacaagtgccggaaggccggtgtgggacagagttggaaggagaactccccactgaatgtttcc

SEQ ID NO: 8701 - DNA, 885 bp, synthetic construct
  misc_feature 1..885: note = source = /note="Description of Artificial Sequence: Synthetic coding sequence"
  source 1..885: mol_type = other DNA
atggaaaccccagcttggccccgcgtgccacggcccgaaaccgctgttgcgcggacactgctgctggggtgggtgtttgcgcaggtcgctggggcctcagggacaactaatactgttgctgcctataatctgacttggaagagtaccaacttcaagacgattctcgagtgggagcctaaaccggtcaaccaagtgtatacagtgcagataagcaccaaatccggcgactggaaatccaaatgcttttacaccactgacacagaatgtgatctaacggatgaaattgtaaaagacgtcaaacagacgtatctggcgcgggtgttttcctatcctgccggcaacgtcgagagtacagggagcgcaggcgaaccactgtatgagaactcgcctgagtttacaccctacctcgagacaaatctcggccaacctacgatacagtcattcgaacaggtcggtactaaagttaacgttactgtggaagatgagcggacgctggtgcgtcggaataacaccttcctgtcactacgggacgtgtttggcaaggatctcatctacactttgtactattggaagtcttcatcttcaggtaaaaaaactgccaaaacgaacaccaacgagtttctgatagacgtcgacaaaggcgaaaactattgtttctccgttcaggcagtgatcccgtctcggactgttaaccgaaaatccacggactcaccagtcgagtgtatgggccaggagaagggagaattccgcgaaatcttctatattatcggcgctgtggtgtttgttgtcatcatattggtgattattctcgcaatctccctccataaatgtcgtaaggccggcgtcggccagtcttggaaggaaaattcccccttgaatgtgagc

SEQ ID NO: 8702 - DNA, 885 bp, synthetic construct
  misc_feature 1..885: note = source = /note="Description of Artificial Sequence: Synthetic coding sequence"
  source 1..885: mol_type = other DNA
atggagacacctgcatggccccgggtacccaggcccgagacggctgtggctcggacacttttgctcggatgggtgttcgcgcaggtcgccggagcatccggtacgaccaacactgttgctgcgtataacttaacatggaaaagcacaaactttaaaactattcttgaatgggagccgaagcccgtgaatcaggtttacaccgtgcaaatatctactaaatctggcgactggaaaagcaagtgtttctacacgacagatacggagtgtgacctgacggatgaaatcgtcaaggacgtgaagcagacttacctggcccgtgtgttctcctaccccgctggcaacgtggagtcaactggttctgctggtgagcctctgtatgaaaattctccagagttcacgccgtacttggagacaaatctcggacagccaacaatccagtcttttgaacaggtgggcacaaaggttaacgtcacagtggaagatgaacgtactctcgtgcgccgaaacaatacgttcctgtctctgagagacgtctttgggaaagatctcatctacaccctctattattggaagtcctcatcttccggaaaaaaaacagccaaaaccaatacaaatgaatttctcattgacgtggataagggggaaaattattgttttagcgtgcaagccgttattccatcccgtactgttaaccgcaaatctacggattcgccagttgaatgtatgggccaggagaagggagaattccgcgaaattttttacattatcggggctgtggtgtttgtggtaattattttggtgattattctggcaatctccctgcataagtgcaggaaagcaggcgtgggacaaagctggaaagagaactccccactgaatgtaagc

SEQ ID NO: 8703 - DNA, 885 bp, synthetic construct
  misc_feature 1..885: note = source = /note="Description of Artificial Sequence: Synthetic coding sequence"
  source 1..885: mol_type = other DNA
atggagaccccagcgtggcctcgagtgccacgcccagaaaccgctgtagcccgtactctgctcctgggctgggtgtttgcccaagtggccggggcctcaggaaccaccaacaccgtcgccgcgtacaatttgacctggaaatctacgaactttaaaaccattctggagtgggagcctaaacccgtgaaccaagtgtatacagtccagatatcaaccaaatctggtgactggaagagcaagtgcttctacaccaccgacaccgaatgtgacctgaccgacgaaatcgtgaaggacgtgaagcagacttatctggctcgtgttttcagttatcctgccggcaatgtcgagagcaccggaagcgcaggagagcccctgtatgaaaattcacctgaattcaccccatatcttgaaacgaacctgggtcagccgaccatccagtctttcgagcaagtgggaactaaagtaaacgtgaccgtggaggacgagaggaccctcgtgagacgcaacaacacatttctgtccctgcgcgacgtgttcgggaaggacctgatctatactttgtactactggaaaagttcttcttcagggaaaaagactgcgaagacaaatactaacgagtttcttattgatgtcgacaaaggcgaaaactattgcttttcggtgcaggcagtaatcccttcgaggaccgtgaatcggaaatctacagactcccctgttgagtgcatgggtcaggaaaaaggggagtttcgagaaattttctatattataggtgcagttgtcttcgtggttataattctggttattatcctggctatcagcctacacaagtgccgaaaagcaggggtgggccagagctggaaagaaaactcgcccctgaacgtctcc

SEQ ID NO: 8704 - DNA, 885 bp, synthetic construct
  misc_feature 1..885: note = source = /note="Description of Artificial Sequence: Synthetic coding sequence"
  source 1..885: mol_type = other DNA
atggaaactccggcatggccgagagtcccgcgaccggaaactgcggtggcgcgcaccctcttgttgggatgggtgttcgcccaggttgcgggagcgtccggaaccactaatactgtcgccgcttacaatctgacttggaagagcacgaatttcaagaccatcctcgaatgggaacctaaaccagtcaaccaagtgtacaccgtgcagatttccacgaagtccggtgattggaagtctaagtgtttctacaccactgataccgaatgcgacctgacggacgagatcgtgaaggacgtgaagcagacttatctggcgagagtgttctcatacccggccggaaacgtggagtccacgggatcggccggcgaaccgctctacgaaaattcgccggagttcactccgtacctcgaaactaacctcggacaaccgaccatccagagcttcgagcaggtggggaccaaggtcaacgtgaccgtggaggatgaacggactttggtccggcgcaacaataccttcctttccctcagagatgtgtttggaaaggacctgatctacactctgtactactggaagtcctcaagcagcggaaaaaagaccgctaagacgaacaccaacgagttcctgatcgatgtggacaagggagagaactattgcttctccgtgcaggcggtgatcccatcccgaactgtgaacagaaaatccactgactcgcctgtggaatgcatgggccaggagaagggtgagtttcgcgagatcttctacatcatcggggccgtcgtctttgtggtgatcatactggtgatcattttggcaatttccctgcataaatgcagaaaagccggtgtggggcaatcctggaaggaaaattcgccactgaatgtgtcc

SEQ ID NO: 8705 - DNA, 885 bp, synthetic construct
  misc_feature 1..885: note = source = /note="Description of Artificial Sequence: Synthetic coding sequence"
  source 1..885: mol_type = other DNA
atggaaactcctgcttggccaagggtgccgcgaccggaaactgctgtagccagaaccctgctcctaggctgggtgttcgcccaagtagccggggcgtccggaacaaccaataccgttgcggcgtacaatctcacatggaagtctaccaatttcaagaccatcctcgagtgggaacccaaacccgttaaccaagtctataccgtgcagatttccacgaagagcggagattggaagtcaaaatgtttttacactaccgacacagaatgcgacctcactgacgagattgtgaaggatgtgaaacagacctacctggcccgagttttctcataccctgccggcaacgtggaatcaacaggctctgccggagagccactttacgagaatagccccgaatttaccccctacctcgagacaaatttaggtcagccgactatacagagtttcgagcaagtgggcaccaaagtaaacgtgacagtagaagatgagaggacactcgtacgtcgaaacaataccttcctgtctctgagggacgtatttggaaaagacttgatctataccctctactattggaaatcatcctcgtcgggtaagaaaactgctaagaccaataccaacgaatttttaattgatgtcgataagggcgaaaattattgcttcagtgtgcaggccgtgattccatccaggaccgtgaacaggaaatccaccgattcgcccgttgaatgcatgggccaggaaaagggagaattcagagaaattttttacatcatcggagctgtcgtttttgtcgtgatcatcctggtgataatactggccatatccctgcataaatgtcgcaaggccggggtgggtcagagctggaaagaaaactctcctctcaacgtgagt

SEQ ID NO: 8706 - DNA, 885 bp, synthetic construct
  misc_feature 1..885: note = source = /note="Description of Artificial Sequence: Synthetic coding sequence"
  source 1..885: mol_type = other DNA
atggagacccctgcatggcctcgggtgccccgccccgagaccgctgttgcgcgcaccttgctcctcggctgggttttcgcccaggtggccggcgcctcgggtactacgaatacagtggctgcgtacaacctgacttggaagtctacaaatttcaagacaatcttggaatgggaaccaaagccggtcaaccaagtctataccgtccaaatctccaccaagagcggggattggaagtccaaatgtttttacacaaccgacacggagtgcgatctcaccgacgaaatcgtcaaggatgtaaagcaaacttacctagcccgcgtgttttcataccccgcgggcaacgtggaatcgacgggtagtgccggagagcccctctacgagaactcgccggaatttacaccttacctcgagaccaatcttggccagccaaccatccagagtttcgagcaggtgggtacaaaggtgaacgtaaccgttgaagatgagcgaacgctggtccgccgcaacaatacgttcctcagcctgcgtgatgtgttcggaaaagatctgatttataccttgtactactggaaatcgtccagctcgggtaagaaaactgccaagaccaatactaacgaattcttgatagacgtggacaagggtgaaaactactgcttttcggtgcaggctgttatcccctcccgcaccgtgaaccgcaaatcaacggactcccccgtggagtgtatgggccaggagaaaggcgaatttagggagattttctacattataggcgcagtcgtgttcgtcgtgatcatactggtgataatcctggccataagtctccataagtgccgcaaagctggcgtcggacagtcctggaaggagaattcgccccttaacgtgtcg

SEQ ID NO: 8707 - DNA, 885 bp, synthetic construct
  misc_feature 1..885: note = source = /note="Description of Artificial Sequence: Synthetic coding sequence"
  source 1..885: mol_type = other DNA
atggaaacacctgcgtggcctagagttccacgccctgaaaccgccgtggccaggaccctgctgctggggtgggtatttgcccaggtggcaggcgctagtgggacaactaacactgtcgcggcctataatctgacatggaaaagcactaatttcaagacgatactagaatgggagcctaaaccagtcaatcaggtgtatacggttcagatctctacaaagagtggagactggaagtccaagtgtttctatactaccgatacagaatgcgacctcaccgacgagattgtgaaagacgtcaaacagacttatttggcaagggtgtttagttaccctgctgggaacgtggagtctacgggtagcgccggcgagcccctttatgagaattcacccgaatttacaccttatctggaaacaaacttgggccagcctacgatccaatcgttcgagcaggtgggcactaaggtgaatgtcaccgtggaagacgagaggacattggtccggagaaacaacaccttcctctcgctgagggacgtcttcggcaaggacttgatctacaccttgtattactggaagagcagcagctccgggaaaaaaacggcgaagaccaatacaaacgagtttctcatcgatgttgacaagggcgagaactattgtttcagtgttcaagctgtgatacccagtcgcacagtgaaccggaaatccaccgatagtccggtcgagtgtatgggccaagaaaagggcgagttccgggagatattctatatcatcggggctgtagttttcgttgttattattctggtgataatacttgcaatctcgctgcataagtgtaggaaagctggagttggacagtcttggaaagagaatagtcctctgaatgtctcc

SEQ ID NO: 8708 - DNA, 885 bp, synthetic construct
  misc_feature 1..885: note = source = /note="Description of Artificial Sequence: Synthetic coding sequence"
  source 1..885: mol_type = other DNA
atggagacacccgcttggccacgagtcccacggcctgaaactgccgtggcccgaacactcctactcggatgggtctttgcccaggtggccggggcttcaggaacaactaatactgtcgccgcttataacctcacttggaaatcaacaaatttcaaaacaatcttagaatgggaacccaaacccgtaaatcaggtctacacagtacagatcagtactaaatccggggattggaagtcaaagtgcttctacactacagatactgaatgcgatcttacagatgaaatcgtgaaagacgttaagcagacatatttggcgagggtgttcagttaccccgcagggaatgtggaaagtactgggtcagccggagagcccttatatgaaaattctcctgaatttactccatatctagaaacgaatctgggacagcccacaatacagtcttttgaacaggtaggaacaaaagtaaacgtgacagtcgaagatgagcgtacactcgtgaggcgcaataacacattcttgtcactgagagatgtctttggaaaagatctcatatatactttatattattggaaatcaagttcatcagggaaaaaaactgcaaaaactaatacaaatgagttccttattgatgtggacaaaggggaaaactactgtttctccgtgcaggccgtcataccctctagaacggtaaaccggaaaagtacagactctcctgtagagtgtatggggcaggaaaaaggggaatttagagagatattttatatcatcggggccgtggtgtttgttgtgattatccttgtcatcatccttgcaatctctctgcataaatgtagaaaagctggggtggggcagagttggaaagaaaactctcccctcaacgtttcc

SEQ ID NO: 8709 - DNA, 885 bp, synthetic construct
  misc_feature 1..885: note = source = /note="Description of Artificial Sequence: Synthetic coding sequence"
  source 1..885: mol_type = other DNA
atggaaactcccgcttggcccagggtgccaagacctgaaaccgcagtggccaggactctgctccttgggtgggtttttgcacaggtggcaggagcaagtggcactactaataccgtggcagcatacaatctgacttggaagtccaccaacttcaagactattctggaatgggagcctaagcctgtgaatcaggtctacactgtgcaaatttcgacgaaatctggagactggaagtcaaagtgcttttacaccaccgacactgagtgcgatctgactgacgaaattgttaaagatgtgaagcaaacttatctcgcccgcgtctttagctaccctgccggaaacgtggagtccaccggatcggcgggagagccgctctacgaaaattcacctgaatttactccttacttggaaacgaacctgggccaaccaactattcagtcctttgagcaggtgggaaccaaggtgaatgtaaccgtcgaagatgaaaggactcttgtgcgccggaacaacaccttcctttcgctgcgggatgtgtttggcaaagatcttatctacaccctttactactggaaaagctcatcaagcggaaaaaagactgcaaagactaacactaacgaattcctcatagatgtggacaagggggaaaactactgcttttcggtccaggcagtgattccatcccgaactgtgaaccgaaaatcaactgattcccctgtggaatgtatgggacaagaaaagggcgaatttagagaaatcttctacatcatcggagccgtggtgttcgtggtcattattctcgtgattattcttgcaattagcctgcataagtgcaggaaagcaggagtgggtcaatcctggaaggaaaactcccccttgaacgtctct

SEQ ID NO: 8710 - DNA, 885 bp, synthetic construct
  misc_feature 1..885: note = source = /note="Description of Artificial Sequence: Synthetic coding sequence"
  source 1..885: mol_type = other DNA
atggaaaccccagcatggcctcgggtgccacgtcccgaaaccgcggtggcacggaccttgctgctgggatgggtgttcgcccaggtggctggagcgtcgggaaccaccaataccgtggcagcgtacaaccttacctggaagtccaccaactttaagactattctggaatgggagcctaagccagtcaaccaagtctacactgtgcagatttctactaagtcgggcgattggaagagtaaatgtttttacacgacggataccgagtgtgatcttaccgacgaaattgtcaaggatgtgaagcaaacctacctggcaagggtgttctcctacccagcaggaaacgtggaatcgaccggatcggccggcgaaccgctgtacgaaaactcgcccgaatttaccccataccttgaaactaatcttggccaacctactattcaatcatttgagcaggtcggtactaaagtgaatgtcacggtggaagatgaacggaccctggtgagaaggaacaatacctttctgtcccttcgagacgtctttggaaaggacttgatctacactctttactactggaagtcgagctcctcaggtaagaaaactgcaaagaccaacactaacgagtttcttattgatgtggataaaggcgagaattactgtttcagcgtgcaggctgtcataccatccaggaccgtgaatagaaaaagcaccgatagcccagtcgagtgtatgggccaagaaaaaggtgaatttagagaaatcttttacataattggcgccgtggtgttcgtggtcattattctggtgattatacttgcaatttcgctgcataagtgtcggaaagcaggcgtgggacaaagctggaaggaaaactcgcctctgaatgtgtcg

SEQ ID NO: 8711 - DNA, 885 bp, synthetic construct
  misc_feature 1..885: note = source = /note="Description of Artificial Sequence: Synthetic coding sequence"
  source 1..885: mol_type = other DNA
atggaaactcccgcgtggccacgagtgccgcgcccagaaacggctgttgcacgaacactgttgttgggctgggtgttcgcccaggttgccggcgctagtggcactactaacacggtggccgcctacaacctgacatggaaaagtacgaacttcaagaccatcctggagtgggaacctaagcccgtcaatcaagtctacacagtgcagatctctaccaagtcaggggactggaaatcgaagtgcttctacactaccgataccgagtgtgacctcacggatgagatagtcaaagacgtcaagcagacatatcttgcccgcgtgttctcttatcctgcgggtaatgttgaatccacagggagtgctggcgaaccattatacgagaattcccccgagttcacaccttatctggagactaaccttggccaacctactattcaatcatttgaacaggtgggtactaaagtcaatgtcacagtggaggatgagaggactctggttaggcggaacaacacctttttaagtcttcgcgacgtgttcggaaaggatctgatatacacactctactactggaagagctcctcaagcgggaagaagactgcgaagactaacacaaacgagtttcttatagacgtagacaagggagagaattactgcttttctgtgcaggccgtgattcccagcaggacggtgaaccgcaagtccacagattctccggtcgagtgtatgggtcaggagaagggtgagtttcgggagatcttctacatcatcggagccgtggtgttcgtcgtcatcatcttggtgatcatacttgccatcagtctccataaatgtaggaaggccggcgttgggcagtcctggaaagagaatagtccattaaacgtgtca

SEQ ID NO: 8712 - DNA, 885 bp, synthetic construct
  misc_feature 1..885: note = source = /note="Description of Artificial Sequence: Synthetic coding sequence"
  source 1..885: mol_type = other DNA
atggaaactcccgcctggcctcgcgttccaaggcctgagactgctgtggcccgaaccctgctgctggggtgggttttcgcccaagtcgccggcgctagtggaactactaacaccgtggcagcctataacttaacctggaagtccacaaattttaaaaccatactggaatgggagcctaagccagtgaatcaggtctatacagtccaaatctcaactaagagcggcgattggaagtctaagtgtttctacacaaccgacaccgaatgtgacctgacagacgagattgtcaaagacgtgaagcagacttacttggcccgcgtctttagttatccagctggcaacgtggagtctaccgggagcgccggtgaaccactgtacgagaattcaccagagtttactccttatttggaaacaaatctcggccagcccaccatccagagcttcgagcaggtgggcaccaaggtcaatgtcaccgtcgaggacgagagaacactagtcagacgaaataatacctttctgtctttacgggacgtatttggtaaagatctgatctacaccctctactattggaaaagttcttctagcgggaaaaagaccgctaagacaaacaccaacgaatttctgatagacgtggataagggggaaaattattgctttagcgtccaggccgtgatacctagtcgtaccgtaaaccggaaaagcaccgatagcccagtggagtgcatgggccaggaaaaaggcgaattccgcgagatattttatatcatcggagccgtggtcttcgttgttatcatcttagtgatcatcctggctatatcactgcacaaatgtagaaaggcaggcgtgggccaaagctggaaggagaacagtccactgaatgtgagt

SEQ ID NO: 8713 - DNA, 885 bp, synthetic construct
  misc_feature 1..885: note = source = /note="Description of Artificial Sequence: Synthetic coding sequence"
  source 1..885: mol_type = other DNA
atggaaacgccggcgtggccgcgagtaccgcgtccggaaacggcggtagcgcgaacgttactactaggttgggtttttgcgcaagttgcgggtgcgtcgggtacgacgaatacggtagcggcgtataatctaacgtggaaatcgacgaattttaaaacgatattagaatgggaaccgaaaccggtaaatcaagtttatacggtacaaatatcgacgaaatcgggtgattggaaatcgaaatgtttttatacgacggatacggaatgtgatctaacggatgaaatagttaaagatgttaaacaaacgtatttagcgcgagttttttcgtatccggcgggtaatgttgaatcgacgggttcggcgggtgaaccgttatatgaaaattcgccggaatttacgccgtatttagaaacgaatttaggtcaaccgacgatacaatcgtttgaacaagttggtacgaaagtaaatgtaacggttgaagatgaacgtacgttagtacgtcgaaataatacgtttttatcgttacgtgatgtatttggtaaagatttaatatatacgttatattattggaaatcgtcgtcgtcgggtaaaaaaacggcgaaaacgaatacgaatgaatttttaatagatgttgataaaggtgaaaattattgtttttcggttcaagcggttataccgtcgcgaacggtaaatcgtaaatcgacggattcgccggtagaatgtatgggtcaagaaaaaggtgaatttcgtgaaatattttatataataggtgcggtagtatttgtagttataatactagtaataatattagcgatatcgttacataaatgtcgtaaagcgggtgttggtcaatcgtggaaagaaaattcgccgctaaatgtatcg

SEQ ID NO: 8714 - DNA, 885 bp, synthetic construct
  misc_feature 1..885: note = source = /note="Description of Artificial Sequence: Synthetic coding sequence"
  source 1..885: mol_type = other DNA
atggagacgccagcctggccacgcgtcccacgaccggaaacagccgtggcccggactctcttgcttgggtgggtgttcgcacaggtcgcaggcgcttcgggaaccactaacactgttgccgcctacaacctgacatggaaatccactaattttaaaacgatcctggagtgggagcccaaacctgtgaaccaggtttacacagtgcagatctcaaccaagagcggagattggaaatccaagtgcttctatacgacggatacagagtgtgacctcacagatgagattgtgaaggacgtgaagcagacttatctggcgagagtgttctcataccctgcaggcaatgtcgagtctacaggcagcgctggcgaacccctgtacgagaactcccccgagttcacaccttatctggaaactaacttgggccaaccaacgatccaatcgtttgagcaggtagggactaaggtgaacgtgaccgtggaagatgaaaggactcttgtccgtaggaacaacacttttctgtctttacgagacgtgttcgggaaagaccttatttatactctctactactggaagtcttcatcctctggtaaaaaaaccgccaaaaccaacacaaatgagtttttgattgatgtggataaaggcgaaaattactgttttagtgtgcaggccgtgattccctctaggacggtcaaccgaaagtccactgactctcctgtcgaatgtatgggccaggaaaaaggagagtttagggaaattttttacattattggagctgtcgtattcgtcgtgattatcctcgtgatcatcctggcgatctcactgcataaatgcaggaaggctggtgtgggccaatcatggaaggagaatagccccctgaacgtttca

SEQ ID NO: 8715 - DNA, 885 bp, synthetic construct
  misc_feature 1..885: note = source = /note="Description of Artificial Sequence: Synthetic coding sequence"
  source 1..885: mol_type = other DNA
atggaaacccccgcatggccacgtgtgccccgaccggaaaccgccgtggcgcggaccctcctgttgggttgggtatttgcgcaagtcgctggcgcaagcgggactacaaacactgttgccgcctataatctcacatggaaatcgacaaactttaaaacaatcctagagtgggaacctaagccggtgaaccaggtgtacactgtgcagatatcaaccaaatccggcgactggaaaagtaagtgcttttacactactgatactgagtgtgatttgactgacgagattgtcaaagacgtgaaacagacatatctggctagggtgtttagttaccccgccggcaacgtcgagagcacagggtccgccggagagcctctgtatgagaacagtcctgagtttacgccttacctcgagactaatctaggccagccaacgatccaaagctttgaacaagtgggcactaaggtcaacgtgactgtggaggacgagcggactttagttcggcggaataatacatttctatcattacgggacgtgtttggtaaggatctgatttacactctgtattactggaaaagctcttccagcggcaaaaagactgctaagacaaacacaaatgagtttctgatcgacgtagataagggcgagaattactgcttttctgtgcaagccgtcattccaagtcgtacagtgaaccgcaagtccaccgatagccctgtagagtgtatgggtcaggaaaagggcgagtttcgtgagatcttctatattatcggggcggtggtgttcgttgttattattctggtgattatcctcgccattagcttacacaagtgtcgtaaggccggagtgggccagtcgtggaaggaaaactcacctctgaatgtatct

SEQ ID NO: 8716 - DNA, 885 bp, synthetic construct
  misc_feature 1..885: note = source = /note="Description of Artificial Sequence: Synthetic coding sequence"
  source 1..885: mol_type = other DNA
atggagactccagcttggccgcgcgtgccccgcccagaaaccgccgtggcaaggaccttgctgttggggtgggtctttgcccaggtggccggcgcttccggaacaacaaacactgtcgcagcttacaatctgacctggaagtcaaccaatttcaaaacaattctggaatgggaacctaaacctgtgaatcaggtgtatacagtgcagataagcaccaagagcggagactggaaatcgaaatgtttttacacaacagacacagaatgcgacctgacagacgagatcgtgaaagacgtgaagcagacgtatcttgcccgcgtgttctcttaccctgctggcaacgtggagagtactggctcggccggagagcccctgtacgagaactcacctgagtttaccccatacttagagaccaacctgggccagccaacgattcagtcctttgagcaggtgggtacgaaagtcaatgtgacagtggaggatgagagaacactcgtgcgcaggaataatacctttctgtctctcagggatgtgttcggcaaggatctgatttacacactttactattggaaatcgtcaagctccggaaaaaaaaccgcaaaaactaatactaacgagttcctaatcgacgtcgataaaggcgaaaactattgcttcagcgttcaggccgtgatccccagtcggactgtaaacagaaagtcaactgactcacccgtggaatgcatgggccaggaaaagggtgaattcagggaaatattttacattattggggccgtcgtgttcgtggtgatcattcttgtgattatattggcaatttctctgcacaaatgccggaaagccggagtaggacagtcttggaaagagaactctccactgaatgtgtca

SEQ ID NO: 8717 - DNA, 885 bp, synthetic construct
  misc_feature 1..885: note = source = /note="Description of Artificial Sequence: Synthetic coding sequence"
  source 1..885: mol_type = other DNA
atggaaacaccggcctggccacgggtgcctcggcctgagacagctgtcgcccgtaccctgctgttggggtgggtgttcgcccaggtagcgggcgcttctgggacaactaacaccgtggccgcatataatctgacctggaaatctaccaacttcaaaaccattcttgaatgggaaccgaagccggtcaatcaggtgtatactgtgcagatcagtacaaagtcaggcgactggaagagtaaatgcttctacacaaccgacaccgagtgtgacctcacagacgaaattgtgaaggacgtgaagcagacttacttggccagagtgtttagctatcccgcaggcaatgtggagagtaccggcagtgctggcgagccgctgtacgagaactcgcctgaattcacaccttatctggagaccaacctcggccagccaacaattcagtcttttgaacaggtgggcacgaaggttaatgtgacagtcgaggacgagcggacccttgttcggcgaaacaacaccttcttgtctctaagagatgtgttcgggaaggacttaatttataccctttattattggaaatcctctagctctggaaaaaagaccgccaaaactaacacaaacgagtttctcatagacgtggataagggcgaaaattactgcttttccgtgcaagctgtcataccatcccgtaccgtaaaccgcaagtcaaccgatagcccagttgagtgcatgggccaagaaaagggagagtttcgggaaatcttctatattatcggggccgtcgtttttgtggtgattatcctggtcataattcttgccatctcactacataaatgccgcaaggccggtgtggggcagtcctggaaagagaactctcccctaaatgtcagc

SEQ ID NO: 8718 - DNA, 885 bp, synthetic construct
  misc_feature 1..885: note = source = /note="Description of Artificial Sequence: Synthetic coding sequence"
  source 1..885: mol_type = other DNA
atggaaacccctgcgtggccgcgggtgccgcgcccggaaaccgccgtggccaggaccctgctgttgggctgggtgttcgcacaggtggcaggcgcatcgggaaccaccaatactgtcgccgcttacaacctcacttggaagtccaccaacttcaaaacgatcctcgagtgggaacctaagccggttaatcaggtctacacggtccaaatttcgactaagtctggcgattggaagtcaaagtgcttctacaccactgacaccgagtgcgacctcactgatgagatcgtgaaggacgtcaagcaaacttatctggcgcgggtgttctcctacccagccggaaacgtcgagagcactgggtcggcgggagaaccattgtatgaaaactcaccggaatttactccgtacctcgaaactaacttgggacagccgactatccagtctttcgaacaggtgggcactaaagtcaatgttaccgttgaggacgagagaactctcgttagacggaacaacacctttctgtcgcttcgcgacgtttttgggaaagatctgatttacaccctctactactggaagtcctcgagcagcggcaagaaaacggcaaaaactaataccaatgaattcctgattgacgtggacaaaggtgagaactactgcttcagcgtccaagcggtgatcccaagccggaccgtgaatcgcaagtccactgatagcccggtcgagtgtatgggtcaagagaagggagagtttcgcgagatattctacatcatcggagctgtcgtattcgtcgtgatcatcctggtaatcatcctggccatcagcctgcacaaatgcaggaaggccggagtcggtcagagctggaaggaaaattcccccctgaacgtgtcc

SEQ ID NO: 8719 - DNA, 885 bp, synthetic construct
  misc_feature 1..885: note = source = /note="Description of Artificial Sequence: Synthetic coding sequence"
  source 1..885: mol_type = other DNA
atggaaacgcctgcctggccaagagtccctcgtcccgagactgccgtagcgcgaactttattattaggatgggttttcgctcaagtcgccggcgctagcgggacaaccaacaccgtcgccgcctataatttgacctggaagagcacgaatttcaagacaattctggagtgggagccgaaacctgtaaaccaggtgtacacagtgcagatttcaacgaagtcaggtgactggaagagcaagtgcttctataccacggataccgaatgtgatttgacggacgagatcgttaaggatgttaaacaaacctatttggctagggtgtttagctacccagccggcaacgtcgaaagcacaggctcagccggggagcctctgtacgaaaacagccccgagttcactccttatctggaaacgaacctaggtcaaccaacaatccagtcatttgaacaagtgggcacaaaggtaaacgttacagtggaagatgagagaacactggtgaggcgcaacaataccttcctctccctccgagatgtatttggtaaggaccttatttatacactgtattattggaagtccagcagcagcgggaagaagactgctaaaacgaacactaacgagtttttaatcgatgtggataaaggagagaattattgctttagcgtgcaggccgtgatcccaagcaggaccgtgaaccgtaagagtacagattcgccagtggaatgcatgggccaggaaaaaggagaattcagggagatcttctacattatcggagccgtcgtgtttgtggtgattattctggtgataattctggccatctcactacataagtgtagaaaagcgggagtcggccagtcttggaaggagaactctcctctgaacgtgagt

SEQ ID NO: 8720 - DNA, 885 bp, synthetic construct
  misc_feature 1..885: note = source = /note="Description of Artificial Sequence: Synthetic coding sequence"
  source 1..885: mol_type = other DNA
atggagacccctgcatggccgcgcgtacctagacccgagacggccgttgcccgaaccctgctgctcggctgggtcttcgctcaggtggctggtgccagcggaaccaccaacaccgtagccgcctacaaccttacatggaagtccacgaacttcaagacaattctcgagtgggagcctaagcccgtgaatcaagtttacacagtacaaatctccactaagagtggcgattggaagagtaaatgcttttatacgacagataccgagtgtgatctgacagacgagatcgtgaaagatgttaagcaaacatacctggctagggtgttttcataccccgcaggtaatgtcgaatccactggaagcgccggggaaccactgtacgagaactctcctgagttcactccctacctggaaacaaacttgggtcagcctacaatacagagcttcgagcaggtggggacgaaggttaacgttactgttgaggatgagaggacattggtgcgtaggaacaacactttcctgagcctgcgggacgtgttcggaaaagaccttatctacaccctgtattattggaagagtagcagctccgggaagaaaactgctaaaaccaacacaaatgagtttctcatcgatgtcgacaagggtgagaactactgcttttccgttcaggctgttattccgagtaggaccgtgaacagaaagtcgacggactccccggtcgaatgtatgggccaggagaagggggaatttagggagatcttctacatcattggagcagtggtctttgtcgtgatcattctggtcatcattctcgccatcagcctccacaagtgtaggaaagccggtgtagggcagtcttggaaggagaactcacctttaaacgtgtct

SEQ ID NO: 8721 - DNA, 885 bp, synthetic construct
  misc_feature 1..885: note = source = /note="Description of Artificial Sequence: Synthetic coding sequence"
  source 1..885: mol_type = other DNA
atggaaaccccagcctggccgcgggttccacggcccgaaacggccgtggcaaggaccttgttgctcggatgggtgtttgcccaggtcgccggggcatccggtactaccaacaccgtggccgcctacaatcttacttggaagtcaaccaactttaagaccatacttgaatgggaacccaagcctgtgaatcaagtctacaccgtgcaaatcagcaccaaatccggtgactggaaaagcaagtgtttctacactaccgatactgagtgtgatctgaccgatgagattgtgaaggacgtgaaacagacttacttggcacgcgtgttttcctaccctgcaggaaacgtggagagtactggatctgctggagaacctctgtacgaaaacagccctgagtttaccccatatcttgaaactaatctgggacagcccaccattcaatcctttgaacaggtgggcactaaagtcaacgtcaccgtggaggacgagagaactcttgtcagacgcaataacaccttcctttccctcagggatgtgttcgggaaggatcttatctataccctgtactactggaaatcctcctcctcgggtaaaaagaccgcaaaaactaacacgaatgaatttctgatagacgtggataagggtgaaaactactgtttctctgtccaagccgtgataccctcccgcaccgtgaataggaagtcaactgattcccctgtagaatgtatgggacaagaaaagggtgaatttcgggagatcttttacatcattggcgcagtcgtctttgtggtcattattctggtgattatcctggccatttcgctccataaatgtcgcaaggcaggagtcgggcagagctggaaggaaaactcacctcttaacgtctcc

SEQ ID NO: 8722 - DNA, 885 bp, synthetic construct
  misc_feature 1..885: note = source = /note="Description of Artificial Sequence: Synthetic coding sequence"
  source 1..885: mol_type = other DNA
atggaaacgccagcctggcccagagtcccacgcccagagactgcggtcgctagaacactactattgggctgggtattcgcgcaggtggctggcgctagcggcaccactaacactgtcgccgcgtataatctgacttggaaatcaactaactttaaaacaattctggaatgggagccaaagccagtcaatcaagtgtacacggttcaaataagcaccaagtctggagactggaaatcaaagtgtttttatacaacagacaccgaatgtgacctcaccgacgaaatcgtaaaggacgtcaaacaaacgtatctagctcgagtcttcagttatcccgccggtaatgttgaatctactgggtctgcaggagaacccctgtacgagaactctcccgaattcaccccttatctggagaccaaccttggacagcccaccattcagagtttcgagcaggtcggaaccaaagtgaacgtaacagtggaggacgaaagaaccctggtgcgacgaaacaacaccttcttatcgctgagggacgtgtttggcaaagatcttatttacaccctgtattactggaagtctagttcctctggcaagaagacagctaaaacgaatacaaatgagttcctgattgatgtcgataaaggcgaaaactactgtttctccgttcaggcagtgattccatccaggacagtgaaccggaagagcacggacagtccagtagaatgcatgggtcaagagaagggggagtttcgtgagattttttatatcattggtgcagtggtgttcgtggtaataatcctcgtgattatcttggcaatttcactacataagtgccgaaaagccggcgtcggacagtcgtggaaggagaactcgcccttaaacgtcagt

SEQ ID NO: 8723 - DNA, 885 bp, synthetic construct
  misc_feature 1..885: note = source = /note="Description of Artificial Sequence: Synthetic coding sequence"
  source 1..885: mol_type = other DNA
atggagacgcctgcgtggccacgagtgccaagaccagaaaccgcagtggcacggactctcctgctgggttgggtgtttgcccaagtggcaggcgcaagcggcaccaccaacactgtggctgcatataacctcacttggaaatcgaccaactttaagacgatcctggagtgggagccaaagccagtcaatcaagtgtacaccgttcaaatatcaactaaatccggtgactggaagtcaaagtgtttttacactaccgataccgaatgtgacttgaccgacgaaatcgtgaaggacgtgaaacaaacctacctggcccgcgtgttctcctaccccgctgggaatgtggagtcaactggcagcgccggagagccgctgtacgaaaactcgcctgagtttaccccctaccttgaaactaacctcgggcaaccgaccattcagtccttcgaacaggtcgggaccaaggtgaatgtgacggtggaagatgaacgtactctggtcaggagaaacaatactttcctgtcccttcgggatgtgtttggaaaagatctgatctacaccctttactactggaaaagctcaagctcagggaaaaagacggcaaaaactaacactaacgagtttctcatagatgtcgataaaggagaaaactactgtttcagcgtgcaagcagtcattccttctcgtactgtcaataggaaaagcactgattcacccgtcgaatgcatgggacaggagaagggagagtttagagaaatcttttacatcattggcgccgtggtctttgtcgtgattatacttgtgattattctcgcaatctcgttgcacaagtgccgtaaagcaggagtcggacagagctggaaagaaaattcaccccttaacgtgtcc

SEQ ID NO: 8724 - DNA, 885 bp, synthetic construct
  misc_feature 1..885: note = source = /note="Description of Artificial Sequence: Synthetic coding sequence"
  source 1..885: mol_type = other DNA
atggaaactccggcatggccacgggtgcctcgacctgaaaccgcagtggcgagaactctgctcctcggatgggtttttgcgcaggtggcaggcgcctccggaacgacgaacactgtcgcggcgtacaacttgacctggaaatctacgaatttcaaaactatactggaatgggagcctaaaccagtcaatcaggtctacaccgttcaaatttcaacgaagtccggagactggaagagcaagtgtttttacaccaccgataccgagtgtgacctgactgacgaaatagtcaaggatgtgaaacagacttatcttgcaagagtgtttagctacccagccggaaacgtggagtccactggaagcgccggagagccactctacgaaaactcgcccgaatttactccttaccttgaaactaatcttgggcaacccaccatccaatccttcgagcaagtcggtactaaagttaacgtgactgtggaggacgagagaaccctcgtgaggagaaataacactttcctgtcgctgcgagacgtctttggaaaggacttgatatacactctgtactactggaagtcgtcgtcctccgggaaaaagaccgccaaaactaataccaatgaattcctgattgatgtggataaaggtgaaaactactgcttttcggtgcaggcagtgattccctcgagaactgtgaatagaaagtcgactgactcaccggtggaatgcatgggtcaagaaaagggcgagttcagagagatcttctacattatcggagcagttgtgtttgtggtcattattcttgtcatcattcttgctatcagcctgcataagtgcagaaaggccggcgtcggccagtcctggaaagaaaactctccacttaacgtgagc

SEQ ID NO: 8725 - DNA, 885 bp, synthetic construct
  misc_feature 1..885: note = source = /note="Description of Artificial Sequence: Synthetic coding sequence"
  source 1..885: mol_type = other DNA
atggagactccagcctggcccagggtgcctcgtccagagaccgccgtggcccgcaccctgctccttggatgggtctttgcccaagtcgccggggcttctggcaccacaaacacagtggctgcatataacttgacttggaaatcaactaacttcaaaacaatcttagagtgggaacccaagcccgttaaccaggtgtacacagtccagatctccacaaagagtggggattggaagtcaaagtgcttctatacaacagataccgaatgcgatcttacagacgaaattgttaaggacgtcaagcagacctacctggcccgagtgttttcctacccagccggaaacgtggagtctactgggtcggccggggagccgttgtatgaaaactcgcccgagttcaccccgtatctggagaccaacctgggccagcccacaatccagtcgttcgagcaggtaggtaccaaggtcaatgtgaccgtggaggatgagcgaacgctcgtgcgccgcaataataccttcctgtccttacgcgacgtttttggaaaggatctgatctacacgctgtattactggaagtcctcatcgagtggaaagaaaactgccaagaccaatacgaacgagtttctgatcgatgttgataaaggcgaaaactactgcttcagcgtgcaggcggtcatcccaagccgcacagtcaatagaaagtctaccgattcacccgtagaatgcatgggacaggagaaaggggaatttcgcgaaatattctatatcataggagccgtggtatttgtagtgattatcctagtcattatattggccatttcactccacaaatgtcgcaaggccggagtggggcaatcatggaaggagaacagcccactcaacgtgagc

SEQ ID NO: 8726 - DNA, 885 bp, synthetic construct
  misc_feature 1..885: note = source = /note="Description of Artificial Sequence: Synthetic coding sequence"
  source 1..885: mol_type = other DNA
atggagactcccgcctggccacgggtgcctcgcccggaaaccgccgttgcccgtacccttctcttgggctgggtgtttgctcaggtggcaggcgcgtcgggaaccacgaacaccgtggccgcctacaaccttacctggaagtctaccaacttcaagactattctggagtgggagccgaaaccagtgaatcaggtctacactgtgcagatctcgacgaagagcggtgattggaagagcaagtgcttttacactacggatactgaatgtgaccttactgacgagatcgtgaaggacgtgaagcaaacctacttggcacgcgtcttttcttacccagcaggaaacgtcgagagcactggaagcgcgggagagccactctacgagaactcgcctgaattcactccttacctcgaaactaatttgggccagccaactatccaatcattcgagcaggtcgggactaaggtcaacgtgaccgtggaagatgaacgcactctggtgcgccggaacaataccttcttgtcgctcagagacgtctttggaaaagatctgatctacactctttactattggaagtcatcctcctcgggaaagaaaacggctaaaactaacactaacgagttcctgatcgacgtggacaaaggtgagaattactgcttctccgtccaggcggtcatcccgtcgagaactgtgaatcgaaagtccaccgacagccctgtggaatgcatgggccaggaaaagggggaattccgggagatcttctatatcatcggagccgtggtgtttgtcgtcattatcttggttatcatcctcgccatctcgctccataaatgtaggaaggccggggtgggacagagctggaaggagaactcaccgctcaatgtgtcc

SEQ ID NO: 8727 - DNA, 885 bp, synthetic construct; identical to SEQ ID NO: 8679
  misc_feature 1..885: note = source = /note="Description of Artificial Sequence: Synthetic coding sequence"
  source 1..885: mol_type = other DNA

SEQ ID NO: 8728 - DNA, 885 bp, synthetic construct
  misc_feature 1..885: note = source = /note="Description of Artificial Sequence: Synthetic coding sequence"
  source 1..885: mol_type = other DNA
atggaaacgcccgcttggcctcgggtcccaagacccgagacggctgtagcccggactctgctgctcggatgggtgttcgctcaggtagcgggcgcttccggcactaccaacaccgtagccgcctataacttgacatggaagtccacaaactttaagacgatccttgagtgggagcctaaacccgtcaatcaagtatatacagtgcaaatcagcactaagtctggggattggaaatccaagtgtttctataccaccgatacagaatgcgacctgaccgacgaaatcgtgaaggacgtgaagcagacctacttggcgcgggtgttctcataccctgccgggaacgtcgagtccactggtagtgcgggtgagcctctgtacgaaaactcaccagagtttaccccctacctcgagacaaacttaggccagcctactatacagagcttcgaacaggtcggaactaaggtcaacgttaccgtggaggatgagcggactctcgttcggcgaaataatacctttctgtccctgcgtgacgtattcggaaaggatctcatatatacgctttattactggaaatcaagttccagtggcaaaaagaccgcgaagactaataccaacgagtttttaatcgacgtggataagggagaaaactattgcttctccgtccaggcagtcatcccctccaggactgtgaaccggaagtcgactgattcacccgtcgaatgcatgggccaggaaaagggtgagttccgcgagatcttttacattattggcgccgtagtcttcgtggtgataatcctggtaattatcctggctatatccctgcacaagtgtcggaaagcgggagtgggccagtcatggaaagaaaactctcctctgaatgtgtcc

SEQ ID NO: 8729 - DNA, 885 bp, synthetic construct
  misc_feature 1..885: note = source = /note="Description of Artificial Sequence: Synthetic coding sequence"
  source 1..885: mol_type = other DNA
atggaaacccctgcatggcccagggtgcctcgtccagaaactgcagtggcaaggacgcttctgttgggatgggtgttcgcccaagtggccggggcgagcgggacgactaacaccgtggccgcatacaatctgacctggaagtcgacgaatttcaagaccatactcgaatgggaacctaagccggtgaatcaagtgtacaccgtccaaatttcgaccaagagcggagactggaaatctaagtgcttctacaccacggacactgaatgtgacctcaccgatgaaattgtgaaggatgtaaaacagacttatctggctcgggtattctcctacccagccgggaacgtggagtcgactggtagcgcgggagaaccactttacgaaaattcaccagaatttactccctacctggaaactaacctgggtcagcctactatccagtcatttgagcaagtgggcaccaaggtaaacgtcactgtcgaagatgagcggactctggtccgccggaacaataccttcctgtcactccgtgatgtctttggtaaagatttgatttacaccttgtattactggaagtcgtcctcatcggggaaaaagacggcaaagactaataccaacgagtttctgatcgatgtcgacaagggcgaaaactactgcttttccgtgcaggcagttatcccgagtagaaccgttaacagaaagtcaacggattcccccgtcgagtgtatgggtcaggaaaagggcgagtttcgcgagattttctacattattggagctgttgtctttgtggtgataatcctcgtgattattcttgcgatatcacttcataaatgtcgaaaagccggtgtgggtcaatcctggaaggagaattcgccactcaacgtgtcc

SEQ ID NO: 8730 - DNA, 885 bp, synthetic construct
  misc_feature 1..885: note = source = /note="Description of Artificial Sequence: Synthetic coding sequence"
  source 1..885: mol_type = other DNA
atggaaactcccgcatggcctagggtgccacggccagaaacggctgtggcacgtactctgctccttggatgggtgttcgcgcaagttgccggtgcctccggaactaccaacaccgtggccgcatacaatctgacgtggaaatccactaactttaagaccattcttgaatgggaacctaagccagtgaaccaagtgtacaccgtccagatctcgaccaagtcgggtgattggaagtccaagtgtttttacaccaccgataccgaatgcgatctcactgatgagattgtgaaggatgtcaagcaaacctacctggctcgcgtgttcagctacccagcaggcaacgttgagagcactggatcggctggggaacctctgtacgaaaactcgccagaatttacgccatacctcgagactaatcttggccagccgacgatccaatcatttgagcaggtgggtaccaaagtcaatgtcaccgtggaggacgagcggaccctggtcagaagaaacaacacctttctgtcccttagagatgtgtttggaaaagaccttatctacacgctttactactggaaaagcagctcatcaggaaagaaaaccgcaaagactaacaccaacgaattcctgattgacgtggataagggcgagaactattgtttttccgtgcaagctgttattccgagccggactgtgaacagaaaaagcaccgattcgcctgttgaatgcatgggacaagaaaagggagagttccgtgagatattctacataattggcgcagtcgtgtttgtcgtgattattctcgtcattatcctggcgatttccttgcataaatgccgtaaggccggggtgggacagtcgtggaaggaaaattcaccactcaatgtctca

SEQ ID NO: 8731 - DNA, 885 bp, synthetic construct
  misc_feature 1..885: note = source = /note="Description of Artificial Sequence: Synthetic coding sequence"
  source 1..885: mol_type = other DNA
atggagactccggcttggcctagggtgccgcggcctgaaactgctgtggctcgcactctccttctgggctgggtgtttgcccaggtcgcaggagcctccggaacgactaacaccgtggccgcgtacaatctgacctggaagtcgacgaatttcaaaaccatcttggagtgggaacctaaaccggttaatcaggtttacaccgtgcaaatctcgaccaagtcaggtgattggaagtccaagtgcttctacaccactgacacggaatgcgaccttactgatgaaatcgtgaaggacgtgaagcaaacttacttggcccgggtcttttcatacccagcgggcaatgtggagtctactggctccgctggagaaccactctacgaaaattcgccggaattcaccccctatctggaaactaacctcggtcaaccaactatccagtcattcgagcaggtcgggaccaaagtcaacgtaaccgtggaggacgagcggaccctggtccggcgcaacaacactttcctgagccttcgcgacgtgttcgggaaggatttgatatacaccctgtactactggaaatcgagctcgtcaggaaaaaagaccgcaaagacgaacaccaacgaatttctcattgacgtggacaagggcgaaaactactgcttctctgtccaggccgtgatcccaagtcgcactgtgaacagaaagtcgactgatagcccggtcgagtgcatgggacaagagaaaggagaattcagagaaatcttctacattatcggagccgtcgtgtttgtcgtgattatactggtgatcattctggccatctctctgcacaagtgtcgaaaggcgggggtaggacagtcttggaaggagaattccccgctcaacgtgtcg

SEQ ID NO: 8732 - DNA, 885 bp, synthetic construct
  misc_feature 1..885: note = source = /note="Description of Artificial Sequence: Synthetic coding sequence"
  source 1..885: mol_type = other DNA
atggaaactccagcctggccacgggtccctagacccgagaccgcagtggccaggacgctcctcttagggtgggtgttcgctcaggtagctggagcgtccggaaccaccaacactgtggcagcctacaatctgacttggaaaagcaccaactttaagacaattctcgaatgggaaccaaaacccgtcaaccaggtgtatacagttcagatcagtaccaaatctggggactggaagagcaagtgtttctacaccaccgatactgaatgcgatctgaccgacgaaatcgtgaaagacgtgaaacaaacgtacctcgcccgggtgtttagctaccccgccggcaacgtcgaatcaaccggaagcgccggagagccgctctacgaaaacagtcctgagtttacgccctatctggaaacaaatctcggacagcccaccatccaaagtttcgagcaggtggggacaaaagttaacgttacagtggaggacgaaaggactctcgtaagaagaaataacacattcctaagcctgagggatgtatttgggaaggatcttatatacaccctgtattactggaagagcagttccagcggaaaaaagactgctaagactaacaccaatgagtttctgatagacgtggataagggggagaactactgcttttcagtacaggccgttataccttcccgtaccgtcaaccggaagtcaactgatagcccggttgagtgcatggggcaggaaaaaggcgagtttcgcgaaatcttctatatcattggagctgttgtgtttgtggtgattatcttggttataattctggccataagcctgcacaagtgtagaaaagcgggcgtaggtcagagttggaaggagaactcccctcttaatgtgtcg

SEQ ID NO: 8733 - DNA, 885 bp, synthetic construct
  misc_feature 1..885: note = source = /note="Description of Artificial Sequence: Synthetic coding sequence"
  source 1..885: mol_type = other DNA
atggaaacccccgcttggcctagggtgcctcgtcctgagacagcggttgcacgaaccctgctgctgggctgggtcttcgcacaagtcgcaggtgcaagcggtacaacaaataccgtcgccgcctacaacctcacctggaagtctaccaactttaagacaattctggagtgggaaccgaagcccgtgaatcaagtgtacaccgtccaaatctctacaaagagcggagactggaagagtaagtgcttctacaccaccgatactgaatgcgacctcaccgatgaaatagtaaaagacgtgaaacagacctatcttgccagggttttctcttacccagctggcaacgtggagagcactggctcagcaggggagcccctttacgaaaacagccccgaatttactccatatctggaaacaaatcttggacaacccaccatccaatcattcgaacaagtgggaaccaaagtgaacgtgactgtggaggacgagaggaccttggtgaggagaaacaacacctttctgagcttgagggatgtgtttggcaaggacctgatatatactctgtactactggaagtcatccagtagcggcaagaaaacagctaaaacaaataccaatgagtttctcatagacgtggacaaaggtgagaattattgcttcagcgtccaagctgttatcccctctcgaacagtcaaccgcaaaagcaccgactcgcctgtggagtgcatgggacaggagaagggggagtttcgtgaaatattttacatcatcggggctgttgtcttcgtggttatcatattggtaattatcctggcgatcagcctgcataaatgcaggaaagccggagtggggcagtcatggaaggagaacagtcccctcaatgtcagc

SEQ ID NO: 8734 - DNA, 885 bp, synthetic construct
  misc_feature 1..885: note = source = /note="Description of Artificial Sequence: Synthetic coding sequence"
  source 1..885: mol_type = other DNA
atggaaacacctgcgtggccccgtgttccacggccggagaccgcagtggcaagaacactgttgcttggttgggtgttcgcacaggtagccggcgcgtccggcaccacgaatacggtggctgcctacaacctgacttggaagagtaccaattttaaaaccatcctggaatgggagcctaagcccgtgaaccaggtgtatacagtccaaatatcaaccaaatccggcgactggaagtctaaatgcttttataccacggatacagaatgtgatctgacagacgaaatagtgaaagatgtgaagcagacatatcttgcacgtgtgttttcctaccccgccggcaatgtggagagcacgggcagcgccggtgagccactgtatgaaaatagccccgagtttacaccgtatctcgaaaccaacctggggcagccaaccatccagagtttcgaacaggttgggaccaaggtgaatgtgacagtggaagacgaacgaactcttgtcagacgcaacaatacgtttctgtcgctgcgggacgtattcggcaaagatctgatctacaccctctactattggaagagtagtagtagtggaaagaagaccgctaaaactaacacgaatgagtttcttatcgacgtggacaaaggagagaattactgcttttcagtgcaggcagtcatcccatcaaggactgtaaatcggaagtctacagattctcccgtggagtgcatgggtcaggaaaagggagaatttagggaaatattttatatcattggggccgttgtgtttgtcgtcatcattctagtgatcatcttggcgattagtctccacaaatgtcggaaggccggtgtagggcagtcctggaaggagaatagtccattaaacgtctct

SEQ ID NO: 8735 - DNA, 885 bp, synthetic construct
  misc_feature 1..885: note = source = /note="Description of Artificial Sequence: Synthetic coding sequence"
  source 1..885: mol_type = other DNA
atggagaccccagcctggcccagggtgccgcgccctgaaacggccgtggctcggacacttttgcttgggtgggtctttgcccaagtggctggagcctctggtaccaccaacactgtagctgcgtataatctaacctggaagtcgacaaacttcaaaactatactggagtgggagccaaaaccagtgaaccaggtgtacactgtccagatttccactaagagcggggactggaagtctaagtgcttctatacaactgacacggagtgtgatcttacggacgagatcgtgaaggacgtgaagcagacataccttgccagagttttctcataccctgccggtaatgtcgagtcaaccgggagcgcaggagaacccctgtatgaaaactccccagaatttaccccctacctggagaccaacctcggtcaacccaccattcaatctttcgaacaagtgggcaccaaggtaaatgtaaccgtggaggacgaaagaaccctggtgcggagaaacaacaccttcttatccctcagggatgtcttcggtaaagatctgatatatacactctactattggaaatcttctagctctggcaagaagacagccaagactaacaccaacgagttcctcatagacgtggacaaaggtgagaattactgtttttcagtacaggcggtgataccttcccgcacagttaatagaaagagcaccgactctcccgtggagtgcatgggacaggaaaaaggggaatttagggaaattttctacattataggggctgtggtgttcgtggttataatactcgtaatcatactcgccatctctttacataagtgccgtaaggccggcgtcggtcagtcctggaaggagaactcccccctgaatgtttcc

SEQ ID NO: 8736 - DNA, 885 bp, synthetic construct
  misc_feature 1..885: note = source = /note="Description of Artificial Sequence: Synthetic coding sequence"
  source 1..885: mol_type = other DNA
atggaaaccccagcgtggcctcgcgttccccggcccgagacagccgtggctagaacactgctcttgggatgggtgtttgcccaggttgctggcgcctcaggtaccactaacacggtggcggcttacaacctaacttggaagagtacgaatttcaagaccatcctggaatgggaacctaaaccagtgaatcaggtctacaccgtgcagataagtacaaagtcaggggactggaagagcaaatgcttttatacaaccgatacagaatgcgatctcacagacgaaattgtgaaggatgtcaaacagacctaccttgcacgggttttttcctatccagcggggaacgtggagtccaccgggtctgctggtgaacccctgtacgaaaacagccctgagttcactccgtaccttgaaaccaatctaggacagccaaccatacagagttttgaacaagtgggaactaaagtcaacgtgacagtggaggatgagagaactcttgtcaggcgtaacaatacttttctatccctgcgagacgtatttgggaaggatctgatttatactttgtactattggaaatcaagctcatctggcaaaaagacggctaaaacgaacaccaacgagttcctgattgacgtggataagggtgaaaattattgctttagcgttcaggccgtgataccctctcgtaccgtcaaccggaagtcgactgacagtcccgtggaatgtatgggccaagaaaagggagagtttagagaaatcttctacatcattggcgcagtcgtgttcgtggtaataattctggtaattattttagcaatttccttacacaaatgtcgaaaagctggagtagggcagtcctggaaggagaattcacctctcaacgtgagt

SEQ ID NO: 8737 - DNA, 885 bp, synthetic construct
  misc_feature 1..885: note = source = /note="Description of Artificial Sequence: Synthetic coding sequence"
  source 1..885: mol_type = other DNA
atggaaacacctgcatggcccagagtgccccgcccagaaaccgcggtagcgagaacgctgctcttaggttgggtcttcgcacaggttgccggcgcttccggtactaccaatacagtggccgcctataatctaacctggaaatctaccaacttcaaaaccatcttagaatgggagcccaaacccgtcaaccaggtctataccgtccaaatcagtaccaagagcggagactggaagtctaagtgtttctatacaacagatacagagtgtgacctgactgatgagatcgtgaaggacgtcaagcagacgtacctggcacgcgttttcagctatcccgctgggaatgtggagagcaccggctcggccggcgagcccctttatgagaattcccctgaatttacgccgtatctggagacaaacctggggcagcccaccattcagagctttgaacaagtgggtactaaggtgaacgtgaccgtggaagacgagcggacattggttcgccggaacaacaccttcctatcattgcgcgacgtcttcggcaaggatctgatatacaccctatactactggaaaagctcgagctctggaaagaagacagccaaaacaaataccaatgagttcttgatagacgtggataaaggagagaactattgtttctctgtgcaagccgttattccttcacgtactgttaacagaaagtctacagactcaccagtggaatgcatgggccaggaaaagggcgagttccgagagatcttttatatcataggggctgtggtgttcgtagtgatcatcttggttatcattttggccatctccttgcataagtgcagaaaggcaggagtgggtcagtcctggaaggagaactcacccctcaacgtgtct

SEQ ID NO: 8738 - DNA, 885 bp, synthetic construct
  misc_feature 1..885: note = source = /note="Description of Artificial Sequence: Synthetic coding sequence"
  source 1..885: mol_type = other DNA
atggaaaccccagcctggccgcgcgtgccccggcccgaaaccgccgtagcgcgaactctcctgctcggttgggtgttcgcgcaagtggcaggagcatccggcaccaccaacaccgtggctgcttacaacctgacttggaagtcgactaacttcaagaccatccttgaatgggagcctaagccggtgaaccaagtgtataccgtgcagatctctaccaaatccggagattggaagtcgaagtgcttttacacgactgatactgagtgcgacctcactgacgagatcgtgaaggatgtaaagcagacctacctggcccgcgtgtttagctatcccgccggaaacgtggaatccaccggcagtgccggggagccgctctacgaaaactcaccagagttcaccccttacctcgaaactaacttggggcagccgacgatccaatccttcgaacaagtgggaacgaaagtcaacgtaaccgtcgaggatgaaaggactctggtccgcagaaacaataccttcctgagcctgcgggacgtgttcggcaaggatctgatttacacgttgtactactggaaatcgagctcgagcggaaagaaaaccgcgaaaacgaacactaatgagttcctgatcgacgtcgacaaaggggaaaactactgcttttcagtccaggccgtgatcccttcccgaactgtcaatcgcaagtcgactgactcgccggtcgaatgtatgggtcaggaaaagggagaatttcgggagattttctacatcattggagctgtggtgttcgtcgttatcatcctggtgatcatcctcgcaatcagcttgcacaagtgcagaaaagcgggtgtgggtcagagctggaaggagaattccccactgaatgtgtcc

SEQ ID NO: 8739 - DNA, 885 bp, synthetic construct
  misc_feature 1..885: note = source = /note="Description of Artificial Sequence: Synthetic coding sequence"
  source 1..885: mol_type = other DNA
atggagacaccggcctggcctcgcgtcccgcgtcctgagaccgcagtagcgaggacgctactattagggtgggtcttcgcgcaagtcgcgggagcatccgggaccactaacaccgtggccgcctataatcttacatggaagtcgaccaactttaagactatcttggagtgggaacctaagcctgttaaccaggtttacaccgttcagatcagtactaaaagcggggattggaagagcaagtgtttctacaccaccgataccgaatgtgatcttacggacgagattgtcaaggatgtaaagcaaacctaccttgcgcgcgtcttttcgtatccggctggtaacgtcgagtcaaccggttccgccggggagccattgtacgaaaactctccggaattcacaccatatttggagactaacctgggccagcctacaattcaatcttttgagcaagtcggtaccaaggtgaatgtcactgtcgaagatgagcgtactctagtgagacgtaataatacattccttagtctgcgagacgtgttcggtaaagatctcatctataccctttactactggaagagttcctcttccgggaaaaagaccgctaagaccaacactaacgagttccttattgatgtcgataagggagaaaactattgtttctccgtacaagctgtgatcccaagtcggactgtgaaccgcaaatctaccgacagtccggtagagtgtatgggccaagagaagggggaatttcgcgagatcttctacattattggtgctgttgtttttgtcgttatcatcctggttatcattctcgcaatctcgctgcataaatgtcgcaaagctggtgtgggacagtcctggaaggaaaattctcctttgaacgtcagt

SEQ ID NO: 8740 - DNA, 885 bp, synthetic construct
  misc_feature 1..885: note = source = /note="Description of Artificial Sequence: Synthetic coding sequence"
  source 1..885: mol_type = other DNA
atggaaacccctgcgtggccacgagtgcctaggccagagactgccgtggcacgaaccctgctgctgggttgggtgttcgcacaagtcgccggagcatccggtactactaacaccgtcgcagcttacaatctgacttggaagtcaaccaacttcaaaacgatcctggagtgggagccaaagccagttaatcaagtctacacggtgcagatttccaccaaatccggtgactggaagtcgaagtgtttttacaccaccgatactgaatgcgatcttactgacgaaatcgtgaaggatgtgaagcaaacgtaccttgcacgcgtatttagctaccccgcaggaaacgtggaaagcaccggatcggccggtgaaccactgtacgaaaactcgcctgagttcactccatatctcgaaaccaaccttggacagcctaccattcaatcttttgaacaagtgggaaccaaggtgaacgttacggtcgaggatgagagaacccttgtgaggcggaacaatactttcctgtccctgcgagatgtctttggtaaagatctgatttacaccctttactattggaagagctcgtcgtctggaaagaaaactgcaaaaacgaataccaacgaatttcttatcgatgtggacaagggcgagaattactgtttttcggtgcaagcggtcattccttcacgaactgtgaatcgcaaaagcaccgactcgcctgtggagtgtatgggccaggaaaaaggcgaatttagagagatcttctacataatcggggcagtggtctttgtggtgattattcttgtcattatcctcgcgatctcgctccacaagtgcagaaaggctggtgtggggcaatcatggaaggagaattcgcccctgaacgtgtct

SEQ ID NO: 8741 - DNA, 885 bp, synthetic construct
  misc_feature 1..885: note = source = /note="Description of Artificial Sequence: Synthetic coding sequence"
  source 1..885: mol_type = other DNA
atggaaaccccggcttggccgcgcgtcccgaggcccgagacggcggttgcacgcactcttctgctcgggtgggtgttcgcgcaggtggccggtgcgtcaggaactaccaacactgtggcggcatacaatctgacttggaagtcgaccaatttcaagactatactcgaatgggagccgaagcctgtgaaccaggtgtacaccgtgcaaatctccaccaaatctggagactggaagagcaaatgcttctacaccacggacaccgaatgcgatctgacggatgagatcgtcaaggacgtgaagcaaacgtacctggccagagttttctcgtaccccgcgggaaacgtagaaagcaccgggtcggctggtgagccgctgtacgaaaacagcccagaattcactccatacttggagactaatctcggtcagccgactattcagtcgttcgaacaagtggggactaaagtcaacgtcaccgtcgaagatgagcgaaccctggtgagacgtaacaacacgtttttgagtctgcgcgatgtgttcggaaaggatcttatctacactctgtattactggaaatcgtcgagtagcggtaaaaagaccgcaaagaccaataccaacgaatttctcatcgacgtcgacaagggagaaaactattgcttcagcgtgcaggctgtgatcccatcaaggactgtcaatcggaagtccactgactcccctgttgaatgtatgggccaggaaaagggcgaattccgcgagatcttttacatcatcggagccgtggtttttgtggtcattatcctggtcatcattctcgctatctcactccacaagtgccgcaaagccggagtcggccaatcctggaaggagaacagccctttgaatgtgtcg

SEQ ID NO: 8742 - DNA, 885 bp, synthetic construct
  misc_feature 1..885: note = source = /note="Description of Artificial Sequence: Synthetic coding sequence"
  source 1..885: mol_type = other DNA
atggagaccccagcttggccccgagtgccaaggccagaaaccgccgtcgcacggactctcctactgggatgggttttcgctcaggttgctggcgcttccggcacaactaatacagtagccgcctacaatctgacctggaagtcgacaaatttcaagacgatcctagagtgggagccaaagcctgtgaaccaggtgtacacagtacagatcagcaccaaatcgggagactggaaaagcaaatgtttttacactaccgacacggaatgtgacctgacggacgagatcgtaaaagatgtcaaacagacctatctggcacgagttttcagctaccctgccggcaatgtcgagagcaccggcagtgccggcgagccactctatgaaaactcgcccgaattcactccctatctggaaacaaatctcggccagcccaccatacagtcctttgagcaggtcggcaccaaggtgaatgtgactgtggaagatgagaggacactggttagacggaataacacatttctgtccttacgggacgttttcggcaaggatttgatctatactctctattactggaaatcaagctcatccggcaagaagacggcaaaaaccaacacaaacgagttcttgattgatgttgacaagggcgaaaactattgcttcagtgttcaggctgtgattccatccagaacagttaacagaaaaagcaccgattcccccgtggaatgtatgggccaggaaaaaggggagttccgggaaattttctatataatcggagccgtggtgtttgtggtgataatcctagttatcattctggccatctccctgcataaatgccggaaggcgggggtcggacagagttggaaggagaattccccgctgaatgtgagc

SEQ ID NO: 8743 - DNA, 885 bp, synthetic construct
  misc_feature 1..885: note = source = /note="Description of Artificial Sequence: Synthetic coding sequence"
  source 1..885: mol_type = other DNA
atggaaacacccgcctggccgcgcgtacctaggcccgagactgccgttgcaaggaccctgctgctgggctgggtatttgcgcaggtggcaggggcctccggcactacgaatacagtggctgcatacaacctgacctggaagagcacgaactttaagacgattttagaatgggagcccaagcccgtgaatcaggtttacacagtgcaaatttcgacaaagtcgggcgactggaagtctaagtgcttctacactacagacacagaatgcgacctgactgatgaaatagtaaaagatgtcaagcagacgtatctggcacgagtgttttcctaccccgcgggcaacgtggagagcactggctcggcaggagagcctttgtacgagaatagtcccgaattcacaccctatcttgaaaccaacctgggccaaccgacaattcagagtttcgagcaagtgggaactaaagtaaatgtcacagtggaggacgaacgtaccctcgttcgacgcaataacacttttctctctctcagagacgttttcggcaaggacttaatctataccctgtattattggaagagtagcagctcgggcaagaagacggcgaagacaaataccaatgagtttctgatcgacgtggataaaggcgagaattattgtttcagcgtgcaggcggtgataccatccagaactgtaaaccggaagtctacagatagtccggttgagtgcatgggtcaggagaaaggcgagtttcgggagatattctacattattggcgccgttgttttcgtcgtgatcatcctcgtcatcatcctcgctatcagcctccataagtgtcgcaaggccggggttggacaatcttggaaagaaaatagtcccctgaacgtctcc

SEQ ID NO: 8744 - DNA, 885 bp, synthetic construct
  misc_feature 1..885: note = source = /note="Description of Artificial Sequence: Synthetic coding sequence"
  source 1..885: mol_type = other DNA
atggagacgcctgcctggccccgggtgcctcgcccagaaaccgcagtcgcacgcactctgcttctggggtgggtgtttgcacaagtcgcaggggcatcaggtactaccaatactgttgccgcatacaatctgacttggaaatccacgaactttaagaccatactggaatgggaacccaagcctgtcaaccaagtgtacactgtccagatctccactaaatccggtgactggaaaagcaagtgtttttacacgactgatactgaatgtgacctgaccgatgagatagtgaaggacgtcaagcaaacttacctcgcacgagtgttctcgtaccccgccggtaatgtggaatcgactggttcagcgggagagcctctctacgagaactcgcctgaatttactccttaccttgaaactaacttgggacaacccaccattcaatcgtttgaacaggtgggaactaaggtgaatgtcaccgtcgaggacgaaagaactcttgtcagaagaaacaacactttcctttcactccgcgatgtctttggcaaggatctgatttacaccctttactactggaaatcttcgtcatcaggaaaaaagactgcaaagactaatactaacgagttccttattgatgtggacaaaggggagaactactgtttttctgtgcaagccgtgataccatccaggacggtgaaccgcaagtcgactgatagcccagtcgaatgtatgggtcaagagaagggagaatttcgggagatcttctacatcatcggcgcagtggttttcgtcgtgattattctggtgatcattctggcaatttcactccataagtgccggaaggccggtgttggtcagtcatggaaggagaatagccccctgaacgtgtcg

SEQ ID NO: 8745 - DNA, 885 bp, synthetic construct
  misc_feature 1..885: note = source = /note="Description of Artificial Sequence: Synthetic coding sequence"
  source 1..885: mol_type = other DNA
atggaaactccagcgtggccgcgcgtgccccgccccgaaactgcagtggctaggaccctccttctcggttgggtctttgcacaggttgctggtgcttccgggactacgaataccgtggcggcatataatctcacatggaaaagtacgaacttcaagacgattttggagtgggaacccaagcctgttaatcaggtgtacactgtgcagatctcaacaaaatctggggattggaaatccaaatgcttctacacgacggacaccgagtgtgaccttaccgatgagattgtaaaagacgtgaaacagacctacctggcacgagtattctcctacccagccggtaatgttgagagcacgggctccgcaggagagcctctgtatgaaaatagccccgaattcacaccctacttggaaacaaatttgggccagcctaccatacaatcctttgaacaggttggcactaaagtgaatgtaacagtggaggacgaaagaacactggtcagacgaaataatacattcctgtctcttcgggacgtcttcgggaaagatttgatttatacactctactattggaagtcttcttcttctggaaagaagaccgcaaaaaccaataccaatgagttcctgattgatgttgacaaaggcgaaaattactgtttttctgtacaagctgttattccgtcccgcactgtgaaccggaaaagcaccgactcccccgttgagtgcatgggtcaggagaaaggtgagttcagagaaatattctacataattggcgctgtggtctttgtcgtaatcattctcgtgatcattcttgctatcagtttgcacaagtgccgcaaggctggagtcggtcagagctggaaagagaatagcccgttgaacgtatcc

SEQ ID NO: 8746 - DNA, 885 bp, synthetic construct
  misc_feature 1..885: note = source = /note="Description of Artificial Sequence: Synthetic coding sequence"
  source 1..885: mol_type = other DNA
atggagacccccgcctggccacgcgtgccccgacccgagacagctgtggccagaacactgctcctggggtgggtgttcgcccaggtggcgggggcctccgggacaacaaacaccgtagccgcttacaacctgacctggaaaagcaccaacttcaaaaccattcttgagtgggaaccaaaaccagtcaaccaggtctatacagtgcagatctccacaaagagtggagattggaagagcaaatgtttttatacaactgataccgaatgtgacctgacagacgaaatcgtgaaagatgtcaaacagacttacctcgcccgggttttttcttaccccgccgggaacgtagagtctacggggtccgcgggggaaccactgtacgagaattctcccgagtttacaccttatctcgagactaatctgggccagcccacgattcagtccttcgagcaggtgggaacaaaagtaaatgtcaccgttgaggatgagaggacacttgtgagaagaaataacacctttctgtctcttagggacgttttcgggaaggaccttatctacaccctgtactattggaaatcatcctcaagtggcaaaaagacagcaaagaccaatactaacgaattccttatcgacgtggataagggcgagaactattgcttctccgtgcaggccgtaatcccgagccggaccgttaatcggaagtccaccgatagccctgtagagtgtatgggccaggaaaaaggggaattccgggaaatcttttatatcatcggtgcggtagtgtttgttgtcatcatacttgtgatcattctcgccatcagtctgcataaatgtcgcaaggcgggggtcggccagagctggaaggagaactcaccactgaacgtgagc

SEQ ID NO: 8747 - DNA, 885 bp, synthetic construct
  misc_feature 1..885: note = source = /note="Description of Artificial Sequence: Synthetic coding sequence"
  source 1..885: mol_type = other DNA
atggaaactccggcgtggccaagggtgcccaggccagaaacggctgtggctcgcacactgctgttgggctgggtgtttgcccaggtagcaggagcctcaggaacaactaacaccgtcgcggcatataacctgacctggaagagtacaaacttcaaaacaattctggagtgggaacctaagcctgtgaaccaagtgtacacagtgcagatttctactaaatctggcgattggaagagcaagtgtttttatacaacagataccgagtgcgacctgaccgacgagattgtgaaggatgtgaagcagacttacctggctagagtttttagctatcctgcgggaaacgtggaatctactggctccgctggtgaacccctctacgagaactcaccagaatttacgccatacctagagactaaccttggtcagccgaccatccagtctttcgagcaggtgggcaccaaggtgaacgtcaccgtggaagacgagaggactctcgttcgaaggaacaatacttttctgagtttgagagatgtgttcggcaaagatttgatttacaccctttattactggaagtcgtcgagcagtggcaaaaaaacggccaagactaatactaatgaatttctcatcgacgtggataagggcgagaactattgcttctcggtgcaagccgtgattcctagtcggacagtcaaccgaaaaagtaccgacagtccagtcgagtgtatggggcaggaaaaaggagaatttcgagaaatcttctacattattggcgctgtggtgttcgtggttatcatactcgtgataatcctcgctataagtctccataagtgcaggaaagccggcgtcggccagagctggaaagaaaatagccctcttaatgtgtca

SEQ ID NO: 8748 - DNA, 885 bp, synthetic construct
  misc_feature 1..885: note = source = /note="Description of Artificial Sequence: Synthetic coding sequence"
  source 1..885: mol_type = other DNA
atggaaacccctgcatggccacgggtgcctcgccccgagactgctgtcgcacgtactcttctgcttggatgggtctttgcacaagtggctggtgcttccggaacgactaatacggtggcagcgtacaatctgacgtggaagtcgaccaactttaagactatcctcgaatgggagcctaaacccgttaatcaggtgtacaccgtgcagatttcgaccaagtcgggagactggaaatctaaatgtttttacacgaccgatacggaatgtgatctgactgatgaaattgtcaaagatgtcaagcagacctaccttgccagggtgttctcctacccagccgggaatgtggaatcaaccggaagcgccggagaaccgctttacgagaactccccagaatttaccccttatctcgaaaccaacctgggacagccgaccatccagtcattcgaacaagtgggaactaaggtgaatgtgactgtggaggacgaacggaccctcgtgcggcgtaacaatacctttctttcccttcgggacgtctttggaaaagatttgatttacactctgtactactggaaatcctccagctccgggaaaaagactgcgaaaactaacaccaacgagtttcttattgacgtcgataagggagagaattactgcttttcggttcaagccgtgattcctagcagaaccgtgaacagaaagtctactgattcgcctgtggaatgtatggggcaagaaaaaggcgaatttcgggagatcttctacattattggagcagtcgtctttgtggtcattatacttgtgatcatccttgcaattagccttcataaatgtcgaaaggccggagtgggacagtcgtggaaggagaattcgcccctcaacgtgtct

SEQ ID NO: 8749 - DNA, 885 bp, synthetic construct
  misc_feature 1..885: note = source = /note="Description of Artificial Sequence: Synthetic coding sequence"
  source 1..885: mol_type = other DNA
atggagacgcccgcatggccacgcgtgccaaggcccgaaacagctgtagcccggactctgctgctgggttgggtgttcgcccaggttgccggtgcaagcggcacgacaaacacagtggcagcgtacaatctgacgtggaagtcaaccaatttcaagactatcctcgaatgggagccaaaacccgtaaatcaagtttacactgttcagatttcaacaaaatctggcgactggaagagtaaatgtttttatactaccgataccgaatgtgatcttacggacgagatcgtcaaagacgtgaagcaaacgtacctggccagggtgttttcctatccagccggaaatgttgagtctactggcagcgccggagaaccgctttatgagaacagtccagagtttacgccctacctggagaccaacctcgggcagcctacgatccagtctttcgagcaggtggggactaaagtgaatgtgacagtggaagacgagaggaccctggtgagacgcaataacacttttctttcccttagggacgtcttcggcaaggacttgatttacacattgtattactggaagtccagcagctcagggaaaaagacagcaaaaaccaatacgaacgagtttctcatagacgtggacaaaggagagaactattgcttctctgtgcaggctgtaatccctagcaggactgtcaatcggaagagtactgacagcccggttgagtgtatgggccaagagaagggagaatttcgggaaattttctatatcatcggcgctgtcgtgtttgttgtcatcattctcgtgatcatcctggctatttctctgcataagtgtcggaaggctggggtcggccagtcttggaaggagaacagtcccttgaatgtatcc

SEQ ID NO: 8750 - DNA, 885 bp, synthetic construct
  misc_feature 1..885: note = source = /note="Description of Artificial Sequence: Synthetic coding sequence"
  source 1..885: mol_type = other DNA
atggaaaccccggcctggcccagagtgccgcggcccgaaactgcggtcgcgcggaccctcctgctggggtgggtctttgcacaggtggcaggagcatcaggaaccaccaacactgtggcggcttacaacctgacttggaagtccaccaacttcaaaactatcctggagtgggaacctaagccggtgaatcaggtgtacaccgtgcaaatctcgaccaaatcgggcgactggaagtccaagtgcttctacacgactgatactgagtgcgacctgactgatgagatcgtgaaggacgtgaagcaaacctatctggcgcgcgtgttctcatacccggccggcaacgtcgaaagcaccggatcggccggagagcctctctacgagaacagcccagagtttaccccttacctcgagactaacctcggtcagccgaccatccaatcattcgagcaggtcggaacgaaggttaacgtcacggtggaggacgagagaaccctggtgcggcgcaacaatacctttctgtcactgcgggatgtgttcgggaaggatctcatctacactctgtactactggaagtcgtcgtctagcggtaagaaaactgctaagactaataccaatgaattcctgatcgacgtggacaagggagaaaactactgcttcagcgtgcaggccgtgatcccaagtcggactgtgaatagaaagtcgactgacagcccggtcgaatgcatgggccaggaaaaaggcgaattccgcgaaatcttttacatcatcggcgccgtggtgttcgtagtgatcatcctggtcatcatcctcgcgatctcgctgcacaagtgccgcaaagcgggtgtgggacagtcgtggaaggagaattcgccgttgaacgtgtcg

SEQ ID NO: 8751 - DNA, 885 bp, synthetic construct
  misc_feature 1..885: note = source = /note="Description of Artificial Sequence: Synthetic coding sequence"
  source 1..885: mol_type = other DNA
atggagactccagcctggccccgcgtgcctagaccagaaacagccgttgcacgcactttgctcctagggtgggtctttgcccaagttgccggcgcctccggcacaacaaacactgtcgccgcctataatctcacatggaaatctaccaattttaaaaccatactggagtgggaaccgaagcctgtgaaccaagtctatactgtccagatttccaccaagagtggcgattggaagtctaaatgtttctacaccaccgatactgaatgtgacctcaccgacgagatcgtcaaggatgttaagcagacatatctggcacgggtcttctcataccctgcagggaatgttgagtctacaggctcagctggggagcctctctatgagaattcacctgagtttaccccctacctggagacaaacctcggccagcccacgatccaatccttcgaacaggtaggcacgaaggtgaacgtcaccgtggaggatgagcggacactcgtgaggaggaacaacacattcttgagtctgcgggatgtgtttggcaaggacctcatctataccctttactactggaagtcgtcatccagcggcaagaagacagcgaaaaccaatactaatgagttccttatcgacgtagacaagggcgagaactactgcttctctgtgcaggccgttattccaagccgaaccgtcaataggaagtctacagattcgcctgtggagtgtatggggcaggagaagggcgaattccgggaaatcttctatataattggggccgttgtgtttgttgtcataatcctcgtgatcattttggccatctcccttcacaagtgtagaaaggccggtgtgggccagagttggaaagagaattctcccctaaacgttagc

SEQ ID NO: 8752 - DNA, 885 bp, synthetic construct
  misc_feature 1..885: note = source = /note="Description of Artificial Sequence: Synthetic coding sequence"
  source 1..885: mol_type = other DNA
atggaaactcctgcgtggcccagagtcccgcggcctgagactgccgtggcccgcactctgttgctgggttgggtgtttgcacaggtggctggagctagcggaactactaataccgtggccgcgtacaacctgacttggaagtcaactaacttcaaaaccatcctggagtgggagccaaagcctgtcaaccaagtgtataccgtccaaatctccaccaaaagcggcgactggaagtccaagtgcttctacaccaccgatactgaatgtgacctgactgatgaaatcgtgaaggatgtcaagcagacttatctcgcgagagtgttcagctacccagctgggaacgtggaatccactggatccgccggcgaacctctgtacgagaattcgccagagttcactccctacctggagactaacttggggcagcccactatccagagcttcgagcaggtgggtactaaagtcaacgtcaccgtggaggatgagcgcaccctggtccgtcgcaataacactttcctttcacttcgcgacgtttttggaaaggacctcatctacacgctgtattactggaaatcttcatcctccggaaaaaagaccgcgaaaaccaacactaatgagttcctgatcgatgtggacaaaggagagaactactgcttctcagtgcaagcggtgatcccgtcgagaaccgtcaaccgcaagtcgacggactcgccggtggagtgcatgggccaggagaagggtgagtttagagagattttctacatcatcggagcagtggtgttcgtagtgattatcctcgttatcatcttggcaatctcccttcacaagtgtcgcaaagccggggtcggacaatcgtggaaggagaactcacctctcaatgtgtcc

SEQ ID NO: 8753 - DNA, 885 bp, synthetic construct
  misc_feature 1..885: note = source = /note="Description of Artificial Sequence: Synthetic coding sequence"
  source 1..885: mol_type = other DNA
atggagacgccagcatggccacgggtcccaagaccagaaaccgcagtcgcgcgcaccctgctgctcgggtgggtgttcgcccaggtcgccggagctagtggcaccactaataccgtggcggcgtacaacctgacttggaagagcacgaatttcaaaactatcctcgagtgggaacctaagccagtgaatcaggtgtacactgtgcagatctcaaccaagtcgggagattggaagagcaagtgcttctacactaccgacaccgagtgcgatcttactgacgagatcgttaaagacgttaaacagacctacctcgcccgcgtgttctcgtacccagctggtaacgtcgaatcgaccgggtcggcgggagaacctctgtacgagaactccccggaattcactccgtatctcgaaactaacctgggccaacccaccatccaatctttcgaacaggtcggcaccaaagtgaacgtcacggtggaagatgaacggactctcgttcgcagaaacaatacctttctgtcgcttcgcgacgtgtttgggaaggatctgatatacaccctgtactactggaaatcgtcgtcgagcggaaagaaaactgccaagaccaataccaacgagttcctcatcgatgtcgacaagggagagaattactgtttctcggtgcaagcagtcattcccagccggactgtcaaccggaaaagcactgactcaccggtggaatgcatgggtcaggagaaaggagaattccgcgagatcttctatatcatcggagccgttgtctttgtggtgatcattcttgtgattatcctggcgatctcgctgcacaaatgcaggaaggcgggagtcggccagtcctggaaggaaaattctcctctgaacgtgagt

SEQ ID NO: 8754 - DNA, 885 bp, synthetic construct
  misc_feature 1..885: note = source = /note="Description of Artificial Sequence: Synthetic coding sequence"
  source 1..885: mol_type = other DNA
atggagacaccggcgtggccccgagtaccgcgaccagagaccgccgtcgcgagaactcttctgctcggctgggtcttcgcccaggtggccggggcctccgggactactaacactgttgctgcctacaacctcacttggaagagcacaaacttcaagactattctggagtgggagccaaaacctgttaaccaggtgtatacagtgcagatctccactaagtctggggactggaaatcaaaatgcttttataccactgacactgagtgcgacttgaccgacgagatcgtgaaggatgtgaagcaaacatacttggcgcgcgtgtttagctatccagccggcaacgtggagagtactgggtctgccggcgagccactttacgagaattctccggagttcaccccgtacctggagactaacctgggccaacccacgatccaaagctttgaacaagtcggcaccaaagtgaacgtgaccgtggaagacgagagaaccttagtaaggcgcaacaatacctttttgagtctgagagacgtgttcggtaaggacctgatttacacactttattactggaagtccagctcaagcggaaaaaaaaccgccaagactaacacaaacgagtttttgatcgacgttgacaagggggaaaattactgtttcagcgtccaggccgtgatcccctctcgcaccgtgaatcggaaaagcaccgattcacccgtagaatgcatggggcaggaaaaaggcgagtttcgggagatcttttacatcatcggcgccgttgtgttcgttgtcatcatcctagtaatcattcttgcgatctctttacacaagtgccgcaaggccggcgttgggcagtcatggaaggagaatagcccgctcaatgtcagc

SEQ ID NO: 8755 - DNA, 885 bp, synthetic construct
  misc_feature 1..885: note = source = /note="Description of Artificial Sequence: Synthetic coding sequence"
  source 1..885: mol_type = other DNA
atggaaacccccgcctggcctcgcgtgccacgccccgagaccgctgtggcccgcacattgctgctgggatgggtgttcgctcaagtagctggcgcctcaggaactacaaacaccgtggccgcctacaacctgacatggaaatcaaccaacttcaagacaattttggaatgggagcccaagcccgtgaaccaggtgtacacagttcaaatttcaacaaaatccggagactggaagagcaagtgtttctacaccacagatacagaatgtgatctgacagatgagatcgttaaagacgtgaaacagacttatttggcacgcgtattctcttatcccgccggaaacgtggaatcaaccggaagtgcaggcgagcccctctatgaaaattctcctgagtttactccttatctggagactaatctgggccagcccacaatacaaagcttcgagcaggtgggcaccaaagtgaatgttaccgttgaggacgagagaacccttgtgcgtaggaacaacacattcctgagccttagagacgtgttcggtaaggacctcatctacacactgtattattggaagagcagtagcagcggaaaaaagactgcaaaaaccaacactaatgagttcctcatagacgtcgacaagggcgagaactattgcttttctgtgcaggcagtgatcccttctagaactgtgaataggaagtcaaccgactcacccgtggaatgcatgggacaggagaaaggcgagtttcgtgaaatcttttacatcattggtgccgtcgtattcgttgtgataattctcgttatcatactggccattagcctgcacaagtgtaggaaagcaggcgtgggccaaagctggaaggagaactctcctctgaacgtcagt

SEQ ID NO: 8756 - DNA, 714 bp, synthetic construct
  misc_feature 1..714: note = source = /note="Description of Artificial Sequence: Synthetic coding sequence"
  source 1..714: mol_type = other DNA
atggagacgccagcgtggcctagagtgcctaggcccgagaccgccgtggccagaaccctgctgcttggttgggtctttgcccaggtagcaggagcaagtgggacaactaacaccgttgccgcctataaccttacctggaaatctactaactttaaaaccatcttggaatgggagcccaaaccggtgaatcaagtgtatactgtgcagatctcgacaaagagtggcgactggaaatccaagtgcttttacacgaccgataccgaatgtgatctgacggacgaaatagtgaaagacgtcaagcagacatatctcgcgagggtgttctcttatccagctgggaatgtggaaagcacaggaagcgcaggcgaacccctttacgagaatagtcccgagttcacaccctaccttgagaccaacttggggcagcccactatccagtctttcgagcaggttggtactaaggtgaatgtgacggttgaggatgagcgcacactggttcggaggaacaacactttcttgagcttgcgtgatgtgtttggcaaagacctaatttatactttatattattggaaatctagtagtagcgggaagaaatattctacaagcctagaattgtggtacctgtggtcctcgtctctgtctagtagttggctatacctctacacaagcgtggagaggcaggaatggggaagggctggcagacgaaccccacac

SEQ ID NO: 8757 - DNA, 714 bp, synthetic construct
  misc_feature 1..714: note = source = /note="Description of Artificial Sequence: Synthetic coding sequence"
  source 1..714: mol_type = other DNA
atggaaacccccgcctggccacgggtgccaagaccagaaacggccgtggcacgcaccctgctccttggatgggttttcgctcaggtggcaggcgcaagtggaaccaccaataccgtcgcagcgtataacctgacttggaagtcgaccaacttcaagacgatccttgaatgggagcccaagcctgtcaaccaggtatacactgtccagatatccactaagtcgggtgattggaaatcgaaatgcttttacaccaccgataccgagtgtgacctcacggatgagatcgtaaaggatgtgaagcagacttacctcgcgagggtgttttcgtacccggcgggaaatgtggaatctactggttcggcaggagaaccactttacgagaacagccctgagtttaccccttacctggaaacgaacctgggtcaacctaccattcaatcattcgaacaagtgggaaccaaggtgaatgtgactgttgaggacgaaagaactctcgtccgtcgcaacaatacctttctttccctgcgtgacgtgtttggaaaggatctgatttacacgctgtactactggaaatcctcctcttccgggaaaaagtactccacgagcttggaactgtggtacttgtggtccagctcactttcgtcgagctggctgtatctctacacttccgtggaacggcaagagtgggggcgggcaggcagacgaactccccat

SEQ ID NO: 8758 - DNA, 714 bp, synthetic construct
  misc_feature 1..714: note = source = /note="Description of Artificial Sequence: Synthetic coding sequence"
  source 1..714: mol_type = other DNA
atggagacacctgcctggccaagggtccccaggcccgagaccgccgtcgccagaacacttctactggggtgggtctttgcacaggtggcgggagctagcggcaccaccaacacagtggcagcatataatctcacttggaagtctaccaacttcaagacaatccttgagtgggagccaaagcccgtcaatcaggtgtatacggtgcagatctccaccaagagtggggattggaaatcgaaatgtttctacactaccgatactgaatgtgacctgacggacgaaatagttaaggatgtcaagcaaacctacctcgccagagtgttctcttatccggctggaaacgtagagagtacaggcagcgcaggcgagcctctgtatgaaaactcacctgaatttaccccttaccttgagacaaatctaggacagcccacaatccagtcgttcgagcaggtgggaacaaaagtgaacgtcaccgtggaagatgaaagaactctggtcagacggaataacacttttctttctttgcgggatgtgtttggaaaagacctgatttacacactctattattggaaatccagtagttcaggcaagaaatatagcacctcgcttgaactctggtacctgtggagctcaagcctatcctccagctggctatatctgtacactagtgtggagagacaggagtgggggagggcgggcagacgcaccccccat

SEQ ID NO: 8759 - DNA, 714 bp, synthetic construct
  misc_feature 1..714: note = source = /note="Description of Artificial Sequence: Synthetic coding sequence"
  source 1..714: mol_type = other DNA
atggaaacacccgcatggccacgagttccccgacctgagaccgccgtcgctagaactctgttgctgggctgggtgttcgctcaggtggcgggtgcatctgggaccaccaatacggtcgccgcgtataacctaacgtggaagtccactaattttaaaactatcctcgaatgggaaccaaagcctgtcaatcaggtgtacacggtgcagatcagtacaaagtctggagactggaaaagcaagtgcttctatacaacagacactgagtgcgacctgaccgatgaaatagttaaggatgtaaagcagacctatctggctagagttttttcctatcctgccggcaatgtggagtcaacaggttcagctggggaaccactgtacgaaaactccccagagttcaccccgtaccttgagactaacttgggccagccgactattcaatctttcgagcaggttggcaccaaggtgaacgtcacagtagaagacgaaaggaccctggtgcgaagaaacaatactttcctgagcctgcgtgacgtgttcgggaaggacttaatttatacactctattactggaagtcatccagctcaggcaagaaatactccacttcactcgaattatggtacttatggtcctcgagtctgtcttcctcctggctgtatctgtacacatcagtggaaagacaggagtgggggcgtgcaggaagaagaactcctcac

SEQ ID NO: 8760 - DNA, 714 bp, synthetic construct
  misc_feature 1..714: note = source = /note="Description of Artificial Sequence: Synthetic coding sequence"
  source 1..714: mol_type = other DNA
atggaaacccctgcgtggccgagggtgccgcggccagagactgctgtcgcaagaactctcctcctgggatgggtgttcgcacaggtcgcgggcgctagcggtactaccaataccgtcgctgcctataacctgacctggaagtccactaatttcaagacgatcctcgaatgggaaccgaagccagtcaaccaagtgtacaccgtacagatttcgacgaagagcggcgactggaagtcgaagtgtttctacactactgatactgagtgcgatctgacggacgagatcgtgaaggacgtgaagcagacctacctggcaagagtgttctcctaccccgcgggaaatgtggaaagcactggttcagctggggagccgctgtatgaaaactccccggaattcaccccttacctcgaaaccaacctgggacagccgactatccagagcttcgaacaagtgggaaccaaagttaatgttaccgtggaggacgaacgcaccctggtcagacgcaataacacctttctctcgctccgtgatgtctttggaaaagatcttatctacacgctctactactggaaatcatcaagcagcggaaagaagtactcaacctccctggaactgtggtacctttggtccagctccctctcctcgtcctggctttacctctacactagtgtggagaggcaggagtggggtcgagcgggtcgccgcactccccac

SEQ ID NO: 8761 - DNA, 714 bp, synthetic construct
  misc_feature 1..714: note = source = /note="Description of Artificial Sequence: Synthetic coding sequence"
  source 1..714: mol_type = other DNA
atggaaaccccagcctggccaagagtgccgcggccggaaaccgccgtggccaggactctgctgctcggttgggtctttgcacaggtcgcaggcgctagtggaactacgaatactgtggccgcttacaacctgacttggaagtccacgaacttcaaaactatcctggagtgggaacccaagcctgtgaatcaggtgtacaccgtgcaaattagcacgaagtccggggattggaaaagcaagtgcttctacaccacggacacggaatgtgacctgaccgatgaaatcgtgaaagacgtgaagcagacctacctcgcgcgcgttttcagctacccagcaggaaacgtcgaatcaacgggaagcgcgggagaaccgctgtatgagaatagcccggagtttaccccgtatctggagactaacttggggcagccgactatccagtcctttgagcaggtcggcaccaaggtcaacgtgacggtcgaagatgaacgtactcttgttcgacggaacaacactttcctctcattgcgcgacgtgttcggaaaggatctgatatacactctctactactggaagtcgtcaagcagcggcaagaagtactcgacctcgttggaactgtggtacttgtggtcctcgagcctttcgagctcctggctctacctctacacgtcggtggagcgccaagaatggggccgggccggaaggagaaccccgcat

SEQ ID NO: 8762 - DNA, 714 bp, synthetic construct
  misc_feature 1..714: note = source = /note="Description of Artificial Sequence: Synthetic coding sequence"
  source 1..714: mol_type = other DNA
atggagacaccagcttggcctagagttccaagaccagaaacagcagtcgctcgtactttacttctaggttgggtttttgcacaggttgctggagcaagtggaacaacaaataccgttgctgcttataatttaacatggaaatcaacaaattttaaaacaatacttgaatgggaaccaaaacctgttaatcaagtatatacagtacaaatttctactaaaagtggtgactggaagtcaaaatgtttttacactaccgatacagaatgtgatcttacagatgaaattgttaaagacgtcaaacaaacttatttagctcgagtcttttcttacccagctggaaacgtcgaatcaactggatctgcaggagaaccactttatgaaaattcacctgaattcactccatatcttgaaactaatttaggacagcctactattcaatcttttgaacaagttggaacaaaagtaaatgtaacagtcgaagatgaaagaacacttgttaggagaaataatacttttttaagtttaagagacgtttttggaaaagatttgatttatactctttattattggaaatcatcttcttctggtaaaaaatattcaacatctcttgaattatggtatctttggtcatcatcattatcatcctcatggctttatctatatacaagtgttgaaagacaagaatggggaagggctgggagaagaacaccacat

SEQ ID NO: 8763 - DNA, 714 bp, synthetic construct
  misc_feature 1..714: note = source = /note="Description of Artificial Sequence: Synthetic coding sequence"
  source 1..714: mol_type = other DNA
atggaaactccagcgtggcctcgggtgcctcgccctgaaactgcagtggcaagaacgttgcttctcggctgggtctttgcccaagtcgcaggtgcatcaggaactactaatactgtcgcggcatacaacctgacttggaagtccactaactttaagactattctggagtgggagcctaaaccagtgaatcaggtgtacaccgtgcagattagcaccaagagcggagattggaaatccaagtgtttctataccactgatacggagtgtgacctcaccgacgagatcgtgaaggatgtgaagcaaacttacctcgcccgcgtgtttagctacccagctggcaacgtcgaatccaccggttcggcaggcgaaccattgtatgaaaacagccctgagttcaccccgtacctcgaaacgaatctgggtcaaccaaccatacagtccttcgaacaggtgggcactaaggtcaacgtgacggttgaagatgagcgaaccctggttcgtcgcaataacacgttcctttccctccgcgacgtgtttgggaaggatctcatctacaccctttactactggaaaagctcgtcatcaggcaagaagtactcaacttcgcttgaactgtggtacctgtggtccagctcattgtctagctcctggctttacctctacacctctgtcgaacgacaagaatggggaagagcaggacgacgcaccccacat

SEQ ID NO: 8764 - DNA, 714 bp, synthetic construct
  misc_feature 1..714: note = source = /note="Description of Artificial Sequence: Synthetic coding sequence"
  source 1..714: mol_type = other DNA
atggagactcctgcttggccacgcgtgccaaggccagagacggctgtggcaaggactctgctgctgggatgggtgtttgcgcaagtggcgggagcatcgggcaccacgaacactgtggctgcttacaacctgacttggaaatcaacgaacttcaaaactatcctcgaatgggaacccaagccggtcaatcaggtctacactgtgcagatctcaaccaagtcgggcgactggaagtctaagtgtttctacaccaccgatactgagtgcgacctgacggacgaaatcgtgaaggacgtgaagcaaacttatctggccagggtgttcagctaccctgccggaaatgtcgagtcaactggcagcgccggcgagccgctctacgaaaattcacctgaattcactccgtacctggaaaccaacctcggacagccaaccatccagtccttcgagcaggttggcaccaaggtcaatgtaactgtggaggacgaacggacccttgtcagacgcaacaacacgttcttgtctctgcgcgatgtttttggcaaagatctcatctacactctttactattggaagagctcgagttcagggaagaagtactcgacctcgctggaactgtggtacctgtggtcatcctccctgtcctcttcgtggttgtacctttacacctccgtggaaagacaagagtggggccgggcagggcgtcgaaccccccat

SEQ ID NO: 8765 - DNA, 714 bp, synthetic construct
  misc_feature 1..714: note = source = /note="Description of Artificial Sequence: Synthetic coding sequence"
  source 1..714: mol_type = other DNA
atggagacaccggcctggccccgcgtgccacggcccgagaccgccgtggcacgcacactcctactaggctgggtgttcgcacaggtggctggggcctctgggacaacaaatacagtggctgcatataatctcacgtggaaatctacaaacttcaaaacgattcttgagtgggaacccaagccagtgaatcaggtgtacaccgtgcaaatatcaacaaaaagtggcgattggaaaagtaagtgtttctatacgacagatacggagtgcgatctcaccgacgaaattgtaaaagacgtgaagcagacctatctggcacgcgtattctcatacccggccggaaacgttgaaagcacagggtccgccggtgagcctctatacgaaaactcacccgaattcaccccctacctggagacaaacttagggcagcctacaatccagagctttgagcaggtgggcactaaagttaatgtgacagtcgaagacgaaaggactctagttcggaggaataacacctttttatcccttagggacgtgttcggaaaggacctgatttacactctgtactactggaagtcaagcagctccgggaagaagtacagtacttccctcgaactatggtacctttggtcttcgtcattaagctctagttggctctacttatatacctccgtcgagagacaggagtggggacgcgctgggaggcgaaccccgcat

SEQ ID NO: 8766 - DNA, 714 bp, synthetic construct
  misc_feature 1..714: note = source = /note="Description of Artificial Sequence: Synthetic coding sequence"
  source 1..714: mol_type = other DNA
atggaaaccccggcctggccgagggtcccgaggcctgaaaccgctgtcgcacgcacgttgttgcttggatgggtgttcgcccaggtggccggtgctagcggcacgactaacaccgtggcggcctacaatcttacttggaaaagcactaacttcaagactatcctggaatgggagcccaaacctgtgaaccaagtgtacaccgtccagatttctacgaagtcgggcgactggaaatccaaatgcttctataccaccgatactgaatgtgaccttactgatgagatcgtcaaggacgtcaagcaaacctaccttgcgcgcgtgttttcctacccagctggcaatgttgagtcgaccggatccgctggagaacccctctatgagaactccccagaatttactccatacctggaaacgaatctgggacagccgactatccagtcattcgagcaagtggggactaaggttaacgtgactgtggaagatgagcgcaccctcgtacgacgtaataacaccttcctgtcgctgcgggacgtattcggaaaggacctgatctacacgttgtactactggaaatcttcaagttcgggcaagaagtacagcacctccctggagctttggtacctgtggagttcctcgctgtcgtcctcgtggctgtacctgtacactagcgtggaacggcaggaatgggggcgggcgggaagaagaaccccgcac

SEQ ID NO: 8767 - DNA, 714 bp, synthetic construct
  misc_feature 1..714: note = source = /note="Description of Artificial Sequence: Synthetic coding sequence"
  source 1..714: mol_type = other DNA
atggaaaccccggcctggccgagagtccctagaccggagactgcagtggcccgcactctgttgctcggatgggtgttcgcacaggtggcgggagcgtcaggaactaccaacacggtggctgcatataacctgacttggaagtcgacgaatttcaagaccatcctggaatgggaaccaaagccggtgaatcaggtctacaccgtgcaaattagcaccaaatcgggcgactggaaaagcaagtgcttctacactacggatactgagtgcgacttgacggatgagatcgtgaaggacgtgaaacagacctacctcgcccgggttttctcgtaccctgccggaaacgtggaatccactggatcggccggagaaccactctacgaaaactcgcctgaatttactccttatctggagactaatctgggtcagccaaccatccagtccttcgaacaggtggggactaaagttaacgtgactgtggaggacgagaggactctggtgcggagaaacaacacctttctctcattgcgcgatgtgttcggtaaagacctcatctacactctgtactattggaagtcatcatccagcggcaagaagtactccacttccctcgaactgtggtacctttggtcgtcgtcattgtcctcttcctggctgtacctgtacacttcggtggagaggcaggaatggggccgcgccggacggagaaccccgcac

SEQ ID NO: 8768 - DNA, 714 bp, synthetic construct
  misc_feature 1..714: note = source = /note="Description of Artificial Sequence: Synthetic coding sequence"
  source 1..714: mol_type = other DNA
atggaaactccagcctggccccgcgtgccgcgcccggagactgccgttgccagaaccctgctcctgggatgggttttcgcccaagtggctggtgcctccggtaccaccaacactgttgcggcctacaacctcacatggaaatctacaaacttcaagacaatcttggaatgggagcctaaacccgtgaatcaggtctacactgttcagatctcaacgaagtctggtgactggaagtccaagtgcttttacaccacagacacagagtgtgatctgactgacgagatagtcaaggacgtgaagcagacttacttggctcgcgtattttcataccctgccggaaacgtcgagagcaccggatctgctggtgaaccactttacgagaatagtccagagttcaccccataccttgagactaatctgggacagcctaccatccagtctttcgagcaagtgggtacaaaggttaacgtcactgtggaagacgagaggactctcgtcagaaggaacaacacctttctgagtctgagagacgtctttggaaaagatctcatttacaccttgtactattggaaatcatctagctccggtaagaagtactccaccagtctcgaactctggtacctctggtcttcatccttgtcttccagctggttgtacctgtatacgagcgtggaaaggcaggaatggggcagagccggcagaagaacccctcat

SEQ ID NO: 8769 - DNA, 714 bp, synthetic construct
  misc_feature 1..714: note = source = /note="Description of Artificial Sequence: Synthetic coding sequence"
  source 1..714: mol_type = other DNA
atggagaccccggcgtggccgcgggttcctcgccccgagaccgcagtggcaaggactctgctgcttggatgggtcttcgcacaggtggctggtgcctctggtacgacaaatacggttgcagcttacaacctgacatggaaatccacgaatttcaagacgattttggagtgggagcccaaacctgttaaccaagtttacaccgtgcagatctcaacgaaaagcggtgattggaagagtaagtgcttctacacaactgacacagagtgtgacctcaccgacgagatcgtaaaagacgtcaagcagacctaccttgcccgcgtgttctcctacccagccggtaacgtcgaatctacgggatcagcaggcgaacctctctatgagaattctccggagtttaccccatatttggaaactaacctgggacagcctaccatccagtcttttgagcaggtcggaaccaaggttaatgtgactgttgaggacgagagaacactggtcagacggaacaacaccttcctcagccttcgagacgtgtttggcaaggacttgatttacactctgtattattggaaatcctcctcttccggaaagaagtactccacctcacttgagctgtggtacctttggtcaagttccttgagtagttcatggctttacctgtacactagtgtggaaaggcaggagtggggccgagccggacgcaggacacctcac

SEQ ID NO: 8770 - DNA, 714 bp, synthetic construct
  misc_feature 1..714: note = source = /note="Description of Artificial Sequence: Synthetic coding sequence"
  source 1..714: mol_type = other DNA
atggagactcccgcatggccccgcgttcccaggcccgaaacagctgtagctcggaccctgcttcttgggtgggttttcgcccaggtggctggcgcatccggcaccaccaataccgtcgccgcttataacctgacatggaagtccacaaattttaaaacgatccttgagtgggagccaaagcctgttaatcaagtctacaccgtgcaaatttcgacgaaatctggggactggaagagcaaatgtttttataccacagacaccgaatgtgaccttacagatgagatcgtgaaagatgtgaaacagacatacctggctagggttttttcttacccggccggtaacgtggagagcactgggagtgctggggaacccctttatgagaattccccggagttcacgccttacctggaaactaatttaggtcagccaacaatccagagcttcgagcaggtcggcactaaagtgaatgtgacagttgaggacgagagaacattagtccggcggaacaacacgttcctatctttgcgagatgtcttcggaaaggatctgatctataccttgtattattggaagtcatcttcatccggaaaaaagtactccaccagcttggagctgtggtacctttggagtagttccctttcgtcaagctggctttacttgtacacttccgtcgaaagacaggaatggggacgcgcgggacgacggacacctcac

SEQ ID NO: 8771 - DNA, 714 bp, synthetic construct
  misc_feature 1..714: note = source = /note="Description of Artificial Sequence: Synthetic coding sequence"
  source 1..714: mol_type = other DNA
atggaaacgcccgcgtggccccgggtgcctcgtcctgagaccgccgtggctcgcaccctcctgctgggatgggtgttcgctcaggtggcaggcgcatctggcacgactaacacagttgctgcgtataatttaacatggaagtcgacaaattttaagaccatccttgagtgggagcccaagcctgtgaaccaggtgtatacagtgcagatctctacaaaatcaggcgattggaagtctaaatgtttctacacaacagatacagaatgcgatcttaccgatgaaatagttaaagacgtgaagcagacatatctggcaagagtgttctcgtaccccgctggtaacgtcgagtccaccggaagtgcgggagaacccttatacgagaattcccctgagttcaccccctatctggagactaatcttggtcaacctaccatccaatcctttgagcaagtgggcacgaaggtcaacgtgaccgtcgaagatgagagaacactagtgagaagaaataacacttttctctccctgcgagacgtgtttggcaaggacctgatctacaccctgtactactggaaaagcagttcaagcggaaagaagtactctaccagcctcgagctgtggtatttatggtcctcatcactgtcatcgtcttggctctacttgtacacttcggtcgagcggcaggagtggggcagggctggccggaggacgcctcat

SEQ ID NO: 8772 - DNA, 714 bp, synthetic construct
  misc_feature 1..714: note = source = /note="Description of Artificial Sequence: Synthetic coding sequence"
  source 1..714: mol_type = other DNA
atggaaaccccagcctggccccgcgtgccaagacctgagactgcagtcgctagaaccctgctgctggggtgggtgtttgcacaggttgctggagcgtccggcactacgaataccgtggcagcgtacaacctgacttggaagtccactaacttcaaaacgatcctcgagtgggaaccgaagccggttaaccaggtctataccgtccagatttcgactaaatccggcgattggaagagcaagtgcttctacaccaccgatacggaatgcgacctgaccgacgaaatcgtgaaagatgtgaagcaaacctacctcgcgcgggtgttttcctacccggcaggaaacgtggaaagcactggatcggccggagagccgctgtacgaaaactccccggagttcactccgtacctggagactaacctgggtcaaccaactattcagtcttttgaacaggtgggaaccaaagtgaacgtgaccgtggaggacgagcggactcttgtgcgccggaacaatactttcctgtcgctgagggacgtgttcggaaaggacctcatttacaccctgtactactggaagagctcgagcagcggtaagaagtactcaacctcgcttgaactgtggtacttgtggtcatcctccttgagctcgtcttggctctacctctacacttccgtggaacgccaggagtggggccgcgccggaagaagaaccccacac

SEQ ID NO: 8773 - DNA, 714 bp, synthetic construct
  misc_feature 1..714: note = source = /note="Description of Artificial Sequence: Synthetic coding sequence"
  source 1..714: mol_type = other DNA
atggaaacgcccgcctggccccgagttccacggcctgaaaccgccgtagcaaggactcttctactgggctgggtattcgcacaggttgccggagcatctggcaccacgaatacggttgctgcttataatctaacctggaagagcaccaattttaagacaatactggagtgggagcctaaacctgtgaatcaagtttacaccgttcaaataagcacaaagagcggggactggaaaagtaaatgcttttataccaccgacactgagtgcgacctgacagatgaaatcgtcaaggacgtgaaacagacctatctcgcgagggtgttttcttatcccgccggtaacgtggagagcactgggtctgccggagagcctctttatgagaatagtccagaatttaccccctatttggagactaatctcggtcagcccacgatccagtcgttcgagcaggtcgggacaaaggtgaacgtcacagttgaggatgagaggactctcgtccgtaggaacaatacctttctcagcctgagggatgtcttcgggaaagacctaatctacactctgtattattggaaatcctcctccagtggaaagaagtacagcacatctctcgagctttggtacttgtggtcaagcagcttgtccagctcttggctgtacctgtatacatccgtcgaaagacaggagtgggggagagctggcaggaggaccccccat

SEQ ID NO: 8774 - DNA, 714 bp, synthetic construct
  misc_feature 1..714: note = source = /note="Description of Artificial Sequence: Synthetic coding sequence"
  source 1..714: mol_type = other DNA
atggagacccccgcctggccacgtgtacccagacccgaaacggcagtggctagaacgctgcttttgggctgggtctttgctcaggtggctggggccagtggaacaactaatactgtcgccgcatataatttgacttggaaatccacaaacttcaaaacgatcttggaatgggaacccaagcctgttaaccaagtctatacagtgcagattagcacaaaatctggggactggaaaagtaaatgtttctacaccacagataccgagtgtgacctcacagacgaaattgtcaaagatgtgaaacagacatacctagccagagtgttctcttaccctgctggcaacgtagagtcgaccggaagtgccggggagccgctgtatgaaaactctcccgaatttaccccataccttgaaacaaatttgggtcaacccacaatccagtcattcgagcaggtgggcaccaaggttaatgtgaccgtcgaagatgagcggacacttgtacggagaaataataccttcctctcacttcgcgacgtgtttggtaaagacctcatttacacgttgtattattggaagagctcatcatccggaaagaagtatagtaccagtcttgaactgtggtacctgtggtctagctccttatcctcttcctggctgtacctatacacttcagtggagaggcaggagtgggggcgggcgggccgtagaacccctcac

SEQ ID NO: 8775 - DNA, 714 bp, synthetic construct
  misc_feature 1..714: note = source = /note="Description of Artificial Sequence: Synthetic coding sequence"
  source 1..714: mol_type = other DNA
atggaaacccctgcatggccgcgggtcccaagacctgaaaccgctgtcgcgcgaactctgctcctgggttgggtgtttgcacaggtggcgggtgcgtcgggcaccactaacactgtggctgcatacaacctgacttggaagagcaccaatttcaagaccattctggagtgggagccaaagccagtcaaccaggtgtataccgtgcaaatatcgactaagtcaggcgactggaagagcaagtgtttttacactacggatactgagtgcgatcttaccgatgaaattgtgaaggacgtgaaacagacgtacctggcacgtgtgttttcctaccctgcaggtaatgtcgaatcaaccggctcggcgggcgaaccgctttacgaaaacagcccagagttcaccccttacctggaaacgaatcttggacaacctaccatacaatcattcgagcaagtcggtacgaaggtgaacgtgactgtggaggatgaaaggactcttgtgcgccggaacaatacctttctttcacttagagatgtctttggaaaggatttgatttacacgctgtactattggaagagctccagctctggaaaaaagtactccacctccctggagttgtggtacttgtggagtagctcactgtcctcctcctggctttacctgtacacctctgtggaacgccaggaatggggccgcgccgggaggagaaccccacac

SEQ ID NO: 8776 - DNA, 714 bp, synthetic construct
  misc_feature 1..714: note = source = /note="Description of Artificial Sequence: Synthetic coding sequence"
  source 1..714: mol_type = other DNA
atggaaaccccagcttggccgcgcgtcccccgtccggagacagctgtcgctaggacgcttttgttaggatgggtgttcgcccaggtcgccggcgctagcggtacaactaacaccgtagctgcttacaatctcacttggaaaagtaccaactttaaaaccattctggagtgggaacccaagcctgtgaatcaggtttacaccgttcagatttcgacaaaatccggagattggaaaagcaagtgtttctacaccaccgatactgaatgcgatctgacagatgagatcgtgaaggatgtgaagcagacctatctggcccgtgtgttttcatatccagctgggaatgtcgagtccaccggaagcgcaggagaacctctgtatgaaaactcacctgagtttacaccgtatttagaaacgaacctcggccagcctactatccagtcttttgaacaggtgggtaccaaagtcaacgtgacagtcgaggacgagcgtacactcgtgagaagaaacaacacatttctcagtttacgagatgtgttcggaaaggatctgatctatacactgtactattggaagagcagtagctcaggaaagaagtactcgacgagcttggaactgtggtatctgtggtcctcctctctctcgtcctcctggttatatctatacaccagcgtggagagacaggagtggggacgcgcaggccgcaggactccacac

SEQ ID NO: 8777 - DNA, 714 bp, synthetic construct
  misc_feature 1..714: note = source = /note="Description of Artificial Sequence: Synthetic coding sequence"
  source 1..714: mol_type = other DNA
atggagacacctgcctggcccagagtaccaaggcctgagactgccgttgccaggactctgttgctgggctgggtgtttgcccaggtggccggagcaagcggtacgaccaataccgtggcagcttacaacttgacctggaagtcaacaaactttaaaaccattctggaatgggagcccaagccggtcaatcaggtctacaccgttcagatctccaccaagagtggagactggaagtcaaagtgcttttacaccacggacaccgagtgtgatctcaccgatgagatcgtcaaggatgtaaagcagacatacctggcacgcgtattctcctaccctgcaggcaacgtggagtccactgggagcgccggcgagcccctctacgaaaattcccctgagtttactccctacctcgaaactaatctgggccagcccaccattcaatcattcgaacaggtgggaaccaaagttaacgtgaccgtggaagacgagaggacacttgtcaggcggaacaatactttcctgagtcttcgggatgttttcgggaaggatttgatctatactctctattactggaagagttctagctctggaaagaagtacagtacatcgttggagctgtggtatctgtggagctcctcgctgagttccagctggctctatctgtatacaagtgtggagcgccaagagtgggggagagccggccggcggaccccccat

SEQ ID NO: 8778 - DNA, 714 bp, synthetic construct
  misc_feature 1..714: note = source = /note="Description of Artificial Sequence: Synthetic coding sequence"
  source 1..714: mol_type = other DNA
atggagacacccgcctggccaagagtacccagaccagagacagctgtcgctagaacgctgctgctgggctgggtgttcgcccaggtggctggtgcttccggaactacgaatacggtggctgcttataacctcacatggaaatcaacaaatttcaagactattctagagtgggaaccaaaacctgttaaccaggtctacacggtccagatttccacgaagtccggcgactggaagtctaagtgtttttatacgacggatacggagtgtgacctgactgacgagatcgtcaaggatgtgaagcagacctaccttgcccgggtcttcagctacccggccgggaatgttgaatctaccggtagtgccggggagccactctatgagaactcgcctgaatttaccccctatctggagacaaatctgggtcagcctacgattcagtcgttcgagcaggttggcaccaaggtgaatgtgaccgtggaggacgagcgaactctggtgagacgcaataacacctttctgtcgcttcgagatgtctttggtaaggacctgatttacaccctatactactggaaaagctcctcaagcggcaagaaatacagtacaagtttggagctctggtatctgtggagctccagcttgtcctccagctggctgtatttatacacctcggtagagcgccaagaatgggggcgagccggccggcgtactccacac

SEQ ID NO: 8779 - DNA, 714 bp, synthetic construct
  misc_feature 1..714: note = source = /note="Description of Artificial Sequence: Synthetic coding sequence"
  source 1..714: mol_type = other DNA
atggagactccggcttggccgcgggttcccagaccagaaaccgctgtggcgaggaccctgctccttggatgggtgttcgctcaggtggcgggtgcgtccggaacgacgaacaccgtggccgcatacaacctgacttggaaaagcaccaacttcaagactattctggaatgggaacccaagcccgtgaaccaagtgtacacggtccagatttcgactaagtccggagactggaagtccaagtgcttctatactaccgacactgagtgcgacttgactgacgaaatcgtgaaggatgtcaaacagacttacctcgcccgcgtgttctcctacccagcgggtaatgtcgagtcaactgggagcgccggtgagccactgtacgaaaattcgccagagttcaccccatacctcgaaaccaatctgggtcagcccacgatccagagctttgagcaagtcggaaccaaggtcaacgtgaccgtggaggacgaacgcactttggtgcgccgaaataacacctttctgagcctgcgcgacgtgtttggtaaagacctcatttacaccctgtactactggaagtcatccagctccgggaagaaatactcaacttccctcgaactttggtacctgtggagctcatcgctgtcgtcctcctggctgtacctttacacctcggtggagcggcaagaatggggccgcgcagggaggaggaccccgcac

SEQ ID NO: 8780 - DNA, 714 bp, synthetic construct
  misc_feature 1..714: note = source = /note="Description of Artificial Sequence: Synthetic coding sequence"
  source 1..714: mol_type = other DNA
atggaaacccccgcatggccacgcgtgcctaggcccgaaacggcagtggcgagaactctgctcctcggatgggtgttcgcacaagtcgcaggagcatcgggaactactaataccgtggcagcctacaatctcacttggaagagcactaatttcaaaactatcctcgagtgggagcccaagcctgtgaaccaagtgtacaccgtgcagattagcactaagagcggtgattggaagtcgaagtgcttctataccactgacaccgaatgtgatcttactgatgaaattgtgaaagatgtgaagcagacttacctcgcacgcgtgttttcttaccctgctggaaatgtggagtccactggaagcgcgggggaaccactttacgaaaactcccccgaatttaccccatatcttgagactaacctcggacaaccaactatccagagctttgagcaagttggaaccaaggtcaacgtgactgtggaggacgagagaaccctggtgcggagaaataacacttttctttccctgcgggatgtgttcggtaaagatctcatatacactctttactactggaagtccagctcgtcggggaagaaatactcgacctcattggaactgtggtacctgtggagctcatcccttagctcgagctggctgtacctctatactagcgtggaacgacaggaatggggccgcgctggtagacggactccgcat

SEQ ID NO: 8781 - DNA, 714 bp, synthetic construct
  misc_feature 1..714: note = source = /note="Description of Artificial Sequence: Synthetic coding sequence"
  source 1..714: mol_type = other DNA
atggaaacccccgcctggcctagggtccccaggccggaaaccgcagtggcacgaacattgctgttgggctgggtcttcgcccaggtagccggtgcgtcaggtacaactaacacagttgccgcatacaatcttacgtggaagtctaccaattttaaaacaattctcgagtgggaacccaagcctgtgaatcaagtttacaccgtgcagattagtaccaaatctggagattggaagtccaaatgcttttatacaactgacacagagtgcgatctgacagacgagatagtcaaggacgtcaaacagacataccttgcacgtgtgttttcgtaccccgccggcaatgtcgagagtactggatctgccggtgagcctctttacgaaaatagtcctgagttcactccctacttggagacaaatctgggacagccaacaattcagtccttcgagcaggtgggtactaaagtgaatgtgaccgtggaagatgagagaacgttggtgcgtcgaaataacactttcctgtcgctcagagacgtgttcggaaaagatttaatctacaccctgtactattggaagtccagcagctccggtaaaaaatattccactagcctggagctttggtacctctggtcttctagtttgtcctcttcgtggctctacctgtacacttcggtcgaaagacaagagtgggggagggcgggacgtagaactcctcat

SEQ ID NO: 8782 - DNA, 714 bp, synthetic construct
  misc_feature 1..714: note = source = /note="Description of Artificial Sequence: Synthetic coding sequence"
  source 1..714: mol_type = other DNA
atggaaacccctgcctggccgagagtcccacgaccagagaccgcagttgcgcggaccttattgctgggatgggtctttgctcaggtcgccggggccagcggtaccaccaatactgtggctgcctacaaccttacctggaagagcaccaacttcaagaccatactcgagtgggagcccaagcccgtgaatcaagtatataccgtgcagataagcactaaaagcggggattggaaatcaaagtgtttttacacaaccgacacggagtgtgatctgaccgacgagatagttaaagacgtcaaacaaacttacctggctcgagtcttttcgtacccggccggtaatgtggagagtacaggcagtgcgggagagcccctttacgagaatagtcccgagtttacgccctacttggaaacaaatttgggccagcctactattcagtcgttcgaacaggttggtacaaaggtaaacgtgacagtagaggacgagcggacactggtgcgtcgtaataacaccttcctttcgttgcgcgatgtatttggcaaggatctcatctacaccctgtactattggaaatccagttcgtccggtaagaaatatagcacctctctggagctgtggtacctgtggtcatcaagtttgagctcatcttggctgtatctttacacctcggtggaaagacaggagtggggacgggctggtagacgcacgccgcac

SEQ ID NO: 8783 - DNA, 714 bp, synthetic construct
  misc_feature 1..714: note = source = /note="Description of Artificial Sequence: Synthetic coding sequence"
  source 1..714: mol_type = other DNA
atggagacacctgcatggccgcgggtgccacgacccgaaacagccgtcgctcgcacactgctattgggctgggtgtttgcccaagttgcaggcgctagcggcaccaccaacaccgtagctgcttacaaccttacctggaagagcacaaacttcaaaactattctcgaatgggaacccaagccggttaatcaggtctacactgtccagatctctaccaagtcaggcgactggaagtctaagtgcttttatacaaccgatactgagtgtgatcttaccgatgaaatcgtaaaggacgtgaaacagacatacttggcacgcgttttttcttatcctgctggaaatgttgaaagtaccggcagtgctggcgaacctctgtatgaaaatagccccgaatttaccccctacctggagaccaatctcggacaaccgacaatccagtcttttgagcaggttggaactaaagtcaacgtcacggttgaagatgaacgaacactggtcagaagaaacaacacttttctttctctccgcgacgtcttcggcaaggatctgatctacaccctctattactggaagtcatcatccagcgggaagaaatactcaacctcactggagctgtggtatctgtggtcctcatcactttctagctcctggctctacctctacactagcgtggaaaggcaagaatgggggagggctggcagaaggactcctcat

SEQ ID NO: 8784 - DNA, 714 bp, synthetic construct
  misc_feature 1..714: note = source = /note="Description of Artificial Sequence: Synthetic coding sequence"
  source 1..714: mol_type = other DNA
atggaaacgcctgcttggccacgtgtcccgaggcccgaaacagccgttgctcggaccctgctgctgggctgggtgttcgctcaggtggccggcgcctccggtaccaccaacaccgtggctgcctacaatctgacctggaagtccaccaattttaaaacgatcctggaatgggagcccaagcccgtgaatcaggtctacacagtgcagatttctactaagtccggggactggaagtcgaagtgtttttacacgaccgacactgagtgtgatctcaccgacgaaatcgtgaaagatgtaaaacagacatacctggcccgcgtgttcagttacccggccggtaatgttgagagcacaggctcagccggggagcccctgtacgaaaatagtccagagttcaccccctatctggagaccaacttgggccagcctaccatccaaagctttgagcaagttggcaccaaagtgaatgtaacggttgaagacgagcgtacacttgtccggagaaacaatacttttctgagcctgcgggacgtgtttgggaaggatttgatttacaccctgtactattggaaaagctcatcaagcggaaagaagtattctacttctctagaactgtggtatctctggtcttcttctctgtcctcttcgtggctgtacctctatacaagtgtggaacggcaggaatggggtagagctggcaggcgcacaccacat

SEQ ID NO: 8785 - DNA, 714 bp, synthetic construct
  misc_feature 1..714: note = source = /note="Description of Artificial Sequence: Synthetic coding sequence"
  source 1..714: mol_type = other DNA
atggagaccccagcttggccgagggtccccagacctgaaaccgcggtcgctagaactctgttgctgggctgggtgtttgcccaggtcgctggagcatctgggacaaccaatacggtggctgcttacaatttgacttggaaatctaccaatttcaaaactattctggaatgggagccaaagcccgtcaaccaggtatacaccgttcagatttccacaaaatctggcgactggaaatcaaagtgtttctataccactgacacggagtgtgacttgacggacgagatcgtgaaggacgtcaagcagacctacttggcgagagtgttttcttatccagcaggtaatgtggaaagcacaggctccgccggcgaacccctgtatgagaatagccccgagttcaccccatatctggagaccaatctggggcaacccaccatccaatccttcgaacaagtgggaacaaaggtaaatgtgactgtagaggatgagaggacgctggttcggcggaacaacacctttctgtctctccgggatgtgtttggaaaggaccttatatatacactttattattggaagagctcaagctctggtaagaagtatagtacctcactcgagctgtggtatctgtggagctcatctcttagcagtagctggctgtatctgtacactagcgtggaacgacaggaatgggggagagctgggcggagaacgccccac

SEQ ID NO: 8786 - DNA, 714 bp, synthetic construct
  misc_feature 1..714: note = source = /note="Description of Artificial Sequence: Synthetic coding sequence"
  source 1..714: mol_type = other DNA
atggagaccccagcctggcccagagtgcccagacccgaaacagctgtggcccgcacgctactgcttggctgggtgtttgctcaagtggcaggcgccagcggcacgacaaatacagttgccgcctacaatctcacgtggaaaagcaccaattttaagacgattttggagtgggaaccgaagccagtcaatcaggtttacactgtccagatttcaaccaagtccggagattggaagagcaaatgtttctatacaacagacacagaatgtgacctcaccgatgagattgtcaaagacgtcaagcagacatatctagcccgcgtgttctcttatcccgctgggaatgtggagagtactggatccgccggggaacccctctatgaaaatagccctgagtttactccctacttggagacgaacctgggtcagcccacgatacagtcttttgaacaggtggggacgaaggtgaatgtcaccgtggaggacgagagaacactcgtgcggcgcaacaatactttcctgtctctgagggacgtgttcggtaaggacctaatctacacattatactattggaagtctagctcctcagggaagaagtattccacgtccttggaactctggtatctctggtcctcctccctaagctccagctggctatatctgtacactagtgtcgagagacaggaatggggacgcgcaggccggaggaccccgcac

SEQ ID NO: 8787 - DNA, 714 bp, synthetic construct
  misc_feature 1..714: note = source = /note="Description of Artificial Sequence: Synthetic coding sequence"
  source 1..714: mol_type = other DNA
atggaaaccccggcctggccacgcgtgccacgccccgagacggccgtggcgaggaccctccttctgggctgggtctttgcccaagttgccggtgcgtcgggaactactaacaccgtggccgcgtacaatctgacgtggaagtcaacgaatttcaagacgattctggaatgggagccgaagccggtgaatcaggtgtacactgtgcaaatctccaccaagtccggagactggaaatcgaagtgcttctacaccacggatactgagtgcgacctcaccgatgaaatcgtgaaggatgtcaaacaaacctatctggcccgcgtgttctcctacccggcggggaacgtggaatccactggatcggccggagagcctctgtacgagaactcgcccgaattcacgccatacctggagactaacctggggcaaccaaccatccagtccttcgaacaggtgggcactaaggtgaacgttacggtggaggatgaacgaaccctggtccgcagaaataacacctttctctcgctgagagacgtgttcggaaaggatctgatctacactttgtactactggaagtcctcctcgtcgggcaaaaagtactcgacctccttggaactgtggtacctgtggtcaagcagcctgtcatcgtcctggctctacctctacacctccgtggagaggcaggagtggggacgggccggaagaagaacgcctcac

SEQ ID NO: 8788 - DNA, 714 bp, synthetic construct
  misc_feature 1..714: note = source = /note="Description of Artificial Sequence: Synthetic coding sequence"
  source 1..714: mol_type = other DNA
atggaaacccctgcatggccgcgggtccctcgccccgagactgccgtggcacggaccctgctgcttggatgggtctttgcacaggtcgccggcgcctcgggtaccaccaatactgtggctgcatacaacctgacctggaagtcaactaatttcaagaccattcttgaatgggaaccgaagcctgtcaaccaagtgtatactgtccagatcagcactaaatcgggcgactggaaatccaaatgtttttacactacggatactgaatgcgacttgactgatgagatcgtgaaagatgtcaaacagacctaccttgcaagagtgttctcgtaccctgcaggaaacgttgagtcaaccggctcggcgggggaacccctgtacgaaaattcacctgaatttaccccttacctcgaaacgaatcttggtcaaccaaccatacagagctttgaacaggtcggtaccaaagtgaacgttaccgtcgaagatgaaagaaccctggtgagacgcaacaatactttcctttcgctcagggacgtctttggtaaggatcttatctataccctttactactggaagtcgtcgagttcagggaagaagtactccacctcgctggaactgtggtatctctggtcatcctcactttcatcgtcgtggctctacctttacacgtcagtcgagcggcaggagtggggacgagcaggtaggcgcactccacat

SEQ ID NO: 8789 - DNA, 714 bp, synthetic construct
  misc_feature 1..714: note = source = /note="Description of Artificial Sequence: Synthetic coding sequence"
  source 1..714: mol_type = other DNA
atggaaactcctgcgtggccgcgtgtccctcggcccgaaaccgcagtcgctagaacccttctgcttggatgggtatttgcacaggttgctggcgcgtcaggaacgaccaacactgtcgccgcctacaatcttacttggaagtcaaccaactttaagactattcttgaatgggaaccaaaacccgtgaatcaagtgtacactgtacaaatttcgacgaagtcgggtgattggaaatcgaagtgcttctacactactgataccgaatgtgatctgaccgatgagattgtgaaggacgtgaagcagacgtacctggcgcgagtgttttcttaccccgcagggaatgtggaatcaaccggctcagcaggggaaccactttacgaaaactcgcctgaattcaccccttatttggagacgaacctgggtcaaccgaccattcagagctttgagcaggtgggcactaaagtgaacgttactgtggaggacgaaagaaccctggtcagacgaaataacacctttctttccctccgggatgtctttggcaaagacttgatatacactctgtactactggaaatcgtcgtcgtccggtaagaaatactctacgtcactcgagctgtggtacctctggagctcatcgctgtcgagcagctggctgtacttgtatacctccgtcgaacgccaagaatggggtagagcaggtcggagaactccgcat

SEQ ID NO: 8790 - DNA, 714 bp, synthetic construct
  misc_feature 1..714: note = source = /note="Description of Artificial Sequence: Synthetic coding sequence"
  source 1..714: mol_type = other DNA
atggagacaccagcctggcctagagtgcctagaccagaaactgcggtagccagaactctgttacttggctgggtatttgcccaggttgcgggggctagcggcaccacaaatactgtggcagcatataatctgacttggaagtccacaaattttaaaaccatactcgaatgggagcctaaacctgtaaatcaggtatatactgtccagataagcaccaaatctggagactggaaaagcaagtgcttctacaccacggacacagagtgcgacttgactgatgaaatcgtaaaagacgtcaagcaaacctacttagcgagagtgttctcctaccctgctgggaacgtggagagcaccgggtcggccggagagcctctgtacgaaaattcccccgaattcaccccttatttggagaccaacctcggacagccgacaatccagagcttcgaacaggtggggaccaaggttaacgtgacagttgaagatgagaggactctagtgcggcgaaacaataccttcttgtctctccgagacgttttcggcaaagatctgatttataccctgtactactggaagtcctccagcagcgggaagaaatactctacaagcctcgagctgtggtacctctggagcagctccttgtcgtctagttggctgtatctgtacacttccgttgaacggcaggagtgggggcgcgccggacgcaggacaccccac

SEQ ID NO: 8791 - DNA, 714 bp, synthetic construct
  misc_feature 1..714: note = source = /note="Description of Artificial Sequence: Synthetic coding sequence"
  source 1..714: mol_type = other DNA
atggaaactccagcatggccaagggttccaagacccgagaccgccgtggcacgaaccttgctcctaggatgggtttttgcccaagtggcgggtgccagtggcaccaccaacaccgtcgcggcatacaacctgacctggaagtcaacgaatttcaagaccattctggagtgggagcccaaacccgtgaatcaagtttacactgtgcaaatctctactaagtcaggcgattggaagtctaagtgtttttatacaacggacactgaatgtgacttaacggacgaaatagttaaggatgtgaaacagacttatctcgcacgagttttctcgtacccagccggcaacgttgagagtacggggtcagcaggggagcctctttacgagaactcccctgaattcaccccctatttggaaacaaacttggggcaacctactatccagtctttcgaacaggtgggaactaaagtcaacgtgacggtcgaggacgaacgcactttagtgagacgaaataatacttttctgtcacttcgtgatgtgtttggcaaggatctcatatataccctctactactggaaaagttcctcctccggaaaaaagtacagcacctccctggaactttggtatttgtggagctcttcactttctagcagttggctgtatctgtacacttcagtggagaggcaggagtggggaagggctggacgtcgcaccccccac

SEQ ID NO: 8792 - DNA, 714 bp, synthetic construct
  misc_feature 1..714: note = source = /note="Description of Artificial Sequence: Synthetic coding sequence"
  source 1..714: mol_type = other DNA
atggagacacctgcctggcctcgggtgcctcgcccagagacagccgtcgcccggacactgctcctcggttgggtgttcgctcaggtggccggcgcgagcggtacaactaataccgtcgcagcatacaacctaacatggaagtctaccaactttaaaacgatcttagagtgggagccaaaaccagtgaatcaggtttacactgtgcagatctctactaaaagcggggactggaagtccaagtgtttctacacaactgatacagagtgtgacctcacagatgaaatcgtcaaagatgtcaaacagacttatctggctagggtgtttagttaccccgccggcaacgtcgagagcaccggctccgccggcgagcccctatacgagaattccccagaattcacgccttatctagagactaacctggggcagccaacaatccagtctttcgagcaagtgggcacgaaggtaaacgtgactgttgaggacgagcggactctcgtcaggagaaataatacattcctctctctgagagatgtatttggtaaggacctgatctatacgctctactactggaagagttcgagttcaggcaaaaagtattccaccagtctggagttgtggtacctgtggagctcatcactcagcagctcttggctgtacctgtacacctccgtggagcgtcaggagtggggacgggcaggcagaagaactccgcac

SEQ ID NO: 8793 - DNA, 714 bp, synthetic construct
  misc_feature 1..714: note = source = /note="Description of Artificial Sequence: Synthetic coding sequence"
  source 1..714: mol_type = other DNA
atggagacccctgcctggcctagggttccgaggcccgagactgccgtggctaggaccctgctgctgggctgggtttttgctcaggtggccggggcctcagggaccactaacactgtcgcggcttacaacttaacctggaaatctactaacttcaaaactatcctggaatgggagccgaagcccgtcaatcaggtttacactgttcaaatctctacaaagtctggagactggaaatcaaagtgtttttacacaacagacactgagtgcgacttgaccgatgagatcgtgaaagacgttaaacagacctatttagctcgagtgttcagttatccagctggcaatgttgaatctactggcagtgctggagagcctctgtacgaaaatagccctgaattcaccccctatctcgaaacgaatctgggccagccaacaatccagagctttgaacaggtgggcacaaaagtgaacgtgacagtggaagacgagagaaccttggttaggagaaataacaccttcctttctctgagggatgtgttcggcaaagacctgatctacacactgtattactggaaaagctcaagttcaggcaagaagtattctacaagcctggaactgtggtatttatggtcttccagcctatcttctagctggctttacctgtacacatctgtggaaagacaggagtggggacgggccggtcggagaaccccccac

SEQ ID NO: 8794 - DNA, 714 bp, synthetic construct
  misc_feature 1..714: note = source = /note="Description of Artificial Sequence: Synthetic coding sequence"
  source 1..714: mol_type = other DNA
atggaaaccccggcgtggccaagggtgccgcggccagaaaccgcggtcgcccggactctgctccttgggtgggtgtttgctcaggtggcgggagcatcggggactaccaacacggtggcagcctacaatcttacttggaagtcgaccaacttcaaaaccatccttgagtgggagccgaaacctgtgaaccaggtgtacaccgtgcagatctcgacgaagtccggggactggaaatccaagtgcttctatacgaccgacactgaatgcgacctgaccgacgaaatcgtgaaggatgtgaagcagacctacctggccagggttttcagctacccggcgggcaacgtcgagagcacgggttcagccggagaaccactgtacgagaatagccctgagttcacgccctaccttgaaactaacctgggccaaccgactatccaatcgttcgagcaagtgggaaccaaggtcaacgtcaccgtggaggatgaacggacgctcgttagacggaataacacctttctgagcctccgggatgtttttggaaaggacctcatctacaccctgtactattggaagagctcaagctcgggaaagaaatactctacttcacttgaattgtggtacctgtggagctcgtcccttagcagctcgtggctctacctctacacgtccgtcgaacggcaggaatggggtcgcgccggccgccgcacgccgcat

SEQ ID NO: 8795 - DNA, 714 bp, synthetic construct
  misc_feature 1..714: note = source = /note="Description of Artificial Sequence: Synthetic coding sequence"
  source 1..714: mol_type = other DNA
atggaaacccctgcttggccaagagtacctagacccgagaccgcggtcgcccggactcttctgcttggctgggtgtttgctcaggtggccggagcatctggtaccacaaacacagttgccgcctacaaccttacttggaaaagcactaacttcaagactatcctggaatgggaacccaagcctgtcaatcaggtatatactgtgcagattagcacaaaatcgggcgactggaagtccaaatgtttctataccaccgatacagagtgtgatcttaccgatgagatcgtgaaggacgtaaagcaaacatatctggctagagtgttttcctaccccgcaggtaatgtggaaagtacaggctcggcgggggagccgctgtatgagaatagccctgagttcacgccttacctggagacaaatctaggccagccaacgatacaaagtttcgagcaggtgggtacgaaggtcaacgtcacggtggaagatgagagaaccctggtccggcggaataatacattcctatcactccgggacgtgttcggcaaagacttgatttacacgctctattattggaagagctcatcctcaggcaagaaatacagtactagcttggagctgtggtacctatggagtagtagcctttccagcagctggctgtacctctacactagcgtcgagagacaggagtggggcagagctgggagaagaacaccgcac

SEQ ID NO: 8796 - DNA, 714 bp, synthetic construct
  misc_feature 1..714: note = source = /note="Description of Artificial Sequence: Synthetic coding sequence"
  source 1..714: mol_type = other DNA
atggaaaccccagcatggccacgggttcccagacctgagactgcggtggctagaacccttctcttgggttgggtctttgcacaggttgccggagcctcaggcaccaccaacaccgtcgcagcatacaaccttacttggaaatcgacgaactttaagaccattcttgagtgggaaccaaagcccgttaaccaagtctacaccgtgcaaatcagcaccaagtccggcgattggaaatccaaatgtttctacaccaccgataccgagtgcgatctgactgacgaaattgtcaaggatgtgaaacagacttacttggcacgcgtctttagctatccagccggaaacgtcgagtcgacgggaagcgcaggtgaacctctttatgaaaactctcccgaatttacgccatacctcgaaactaacctgggccaaccgactatccaatccttcgaacaggtcggaaccaaggtgaacgtgactgtggaagatgaaagaactctcgttagaaggaataacaccttcctgtcactgagagacgtgtttggtaaggacctcatatacacgctctactactggaagtcgtcctcctccgggaagaagtactcaaccagccttgagctgtggtacctgtggtcatcctcgctgtcgagctcgtggctctacctctacacctcggtggagagacaggaatggggacgcgcgggaaggaggactccgcat

SEQ ID NO: 8797 - DNA, 714 bp, synthetic construct
  misc_feature 1..714: note = source = /note="Description of Artificial Sequence: Synthetic coding sequence"
  source 1..714: mol_type = other DNA
atggagactcctgcctggccgcgcgtgcctcggcccgaaaccgccgtcgcacgcactttgctgctgggctgggtctttgcccaggtggctggagccagcggcactaccaatactgttgcggcatacaacctgacctggaagagcactaacttcaagaccatcctggaatgggaaccgaagccagtgaatcaggtgtacactgtgcagatcagcaccaagagcggagactggaagtccaaatgcttctacaccaccgatactgagtgtgacctgactgacgaaatcgtcaaggacgtcaagcaaacctacttggctagagtgtttagctacccggcaggaaatgtggagtccactggctccgcgggtgagccgctgtacgagaattccccggagttcactccgtacctggagactaacctgggacagccgactatccagtcctttgaacaagtgggcaccaaggtgaacgtgactgtggaagatgagcggaccctcgtgcggaggaataacacgttcctctccctccgcgacgtgttcggaaaagatctcatatacactctctactactggaaatcttccagctcgggaaagaaatactccacgtcgcttgagctgtggtacctctggtcaagctcgttgtcatcgtcctggctgtacctttacacttccgtggaacgccaagaatggggacgcgctggtaggcggaccccgcac

SEQ ID NO: 8798 - DNA, 714 bp, synthetic construct
  misc_feature 1..714: note = source = /note="Description of Artificial Sequence: Synthetic coding sequence"
  source 1..714: mol_type = other DNA
atggaaaccccagcatggccgcgcgtgcctagacccgaaactgcagtggcacggacgctgctgctgggatgggtgttcgcacaagtcgccggggcatcgggaaccactaacaccgtcgctgcatacaacctgacgtggaagtcgactaacttcaagactattctcgagtgggaacctaagcctgtcaaccaagtctatacggtgcaaatttccactaaatccggtgattggaaatcaaagtgtttttacaccacggatactgaatgtgaccttaccgatgaaatagtgaaggatgtgaagcagacgtacctggctcgtgtcttttcctatcctgcaggcaatgtggagtcgaccggctcggcaggcgaacctctttacgaaaactccccagaatttaccccttacttggaaaccaaccttggtcaaccgaccatccaatcattcgaacaagtggggactaaagtcaatgtgactgtggaggatgaaagaaccttggtgcgacgtaacaataccttcctttccctgagggatgtgtttggaaaggatcttatctacactctgtactactggaagtcgtcgtcatccggaaaaaagtacagcacctcccttgaactttggtacctttggtcaagctcgctctcgtccagctggttgtacctctacacctcggtcgaacgccaagaatggggacgggcaggcaggagaaccccgcat

SEQ ID NO: 8799 - DNA, 714 bp, synthetic construct
  misc_feature 1..714: note = source = /note="Description of Artificial Sequence: Synthetic coding sequence"
  source 1..714: mol_type = other DNA
atggaaactcccgcatggcccagagtacctcgcccagagaccgccgtggccagaaccctgcttctcggctgggttttcgctcaagttgctggtgcttcaggcaccactaataccgtggccgcctataatctgacttggaaatctactaactttaaaaccatcctggagtgggagcctaagccagtaaaccaggtctacacagtgcaaatcagtaccaaaagcggcgattggaagagcaagtgcttctacacaaccgatacagagtgcgacttgactgacgaaatcgtgaaagatgtgaagcagacctaccttgccagagttttcagttaccccgctggcaatgttgaaagcaccggttccgccggagaaccactgtacgagaactcacccgagttcactccctacttggagaccaaccttggacaacctacaatccagtctttcgagcaggtcggtactaaagtcaacgtgaccgtggaggacgagcgcaccctcgtccgtagaaacaacacctttctttcattgcgcgatgtgttcggaaaagatctgatttatacactctattattggaagagctcctcttctggcaaaaaatattctacctccttggagctgtggtacctctggagttccagtctcagcagttcctggttgtacctctatacatcagtcgagcgtcaagaatggggaagggctggccgtagaacaccccac

SEQ ID NO: 8800 - DNA, 714 bp, synthetic construct
  misc_feature 1..714: note = source = /note="Description of Artificial Sequence: Synthetic coding sequence"
  source 1..714: mol_type = other DNA
atggaaacccctgcatggccccgagtgccacgccctgagactgccgtggctcgaacgctcctcctgggatgggtgtttgcacaagtggccggtgcttccggtacgaccaacactgtggcggcgtacaacttgacgtggaagtcgaccaacttcaaaacgatcttggagtgggagccgaagccagtgaaccaggtgtatactgtccagatctccaccaaatcaggagactggaagagcaaatgcttttacaccacggatacggagtgcgatctgactgacgaaatcgtgaaagatgtcaagcagacctacctggccagagtgttctcctaccccgccggaaatgtcgaatcaaccggtagcgctggcgaaccgctgtacgaaaactccccagaatttactccgtaccttgagactaatctggggcagcccactatccagtcattcgaacaggtgggaactaaggtgaacgttactgtggaggacgagaggacccttgtccgccggaacaataccttcctttctttgcgggacgtgttcggaaaagacctgatttacaccctctactattggaagtcgtcatctagcggcaagaaatactccacgagcctggaactgtggtacctttggtcatcgtccctgagctcgtcatggctttacctctacacctcggtggaacgccaagagtggggaagagccggacggagaaccccgcat

SEQ ID NO: 8801 - DNA, 714 bp, synthetic construct
  misc_feature 1..714: note = source = /note="Description of Artificial Sequence: Synthetic coding sequence"
  source 1..714: mol_type = other DNA
atggaaactcccgcatggccccgagtacctcggcccgaaactgctgtggcacggacactgctccttggatgggtgtttgcgcaggtagcaggagcttccggaactacaaatacagtggcagcctacaaccttacttggaaatcaactaatttcaaaactatactcgaatgggaaccgaaaccagtaaatcaggtctatacagtccagatttcaacaaaatcaggggattggaaaagtaaatgcttctatactactgatacagaatgtgaccttactgatgaaatcgtgaaagatgttaagcagacatatctggctagggtgttttcttacccagctggaaatgttgaatctacaggaagtgccggagaaccactgtatgaaaattcacccgaatttacaccttatttggaaacaaatttagggcagcctacaatacagtcctttgaacaagtgggaactaaagtgaacgtgacagttgaagatgagcgaacactcgtgagaaggaataacacattcctcagtctccgcgacgtcttcgggaaagatcttatctatactctgtattattggaaatccagttcttctggaaagaaatattctacatcactagaactttggtatctatggtcatcttcacttagttccagttggctatacctgtacacatccgtggaacgccaggaatggggacgagccgggcgacgcacaccccat

SEQ ID NO: 8802 - DNA, 714 bp, synthetic construct
  misc_feature 1..714: note = source = /note="Description of Artificial Sequence: Synthetic coding sequence"
  source 1..714: mol_type = other DNA
atggagacaccggcatggccccgagtcccaagacctgaaaccgcagtggctcgtacccttcttctaggatgggtcttcgcccaagtcgcgggagcttctggaacgaccaatacggtagcagcttataaccttacatggaaatccacaaactttaaaactattctagagtgggaaccaaagccagtaaaccaagtttatacagttcaaattagcaccaagtcaggagactggaaatccaaatgcttttatacaacggatacagagtgcgatctcacagatgaaattgttaaggacgtcaagcaaacttatctggctcgcgtcttctcatacccagcgggaaatgttgagagtactggatctgccggtgaaccgttatatgagaacagtcccgaatttactccatatcttgagaccaacctgggtcaaccgactattcaatctttcgagcaggtcggtacaaaagttaatgtaaccgtggaagatgaacgaacacttgttcgaagaaataataccttcctgagccttagggatgtcttcggaaaggacttaatctacaccttgtattattggaagtcatcatcatcaggtaaaaaatactccacctctttggagctctggtatctttggagttcatctctctcctcttcctggctttatttatacactagtgttgaacgtcaagaatggggaagagcgggaagacgtacaccacat

SEQ ID NO: 8803 - DNA, 714 bp, synthetic construct
  misc_feature 1..714: note = source = /note="Description of Artificial Sequence: Synthetic coding sequence"
  source 1..714: mol_type = other DNA
atggaaactccagcatggcctagggttcctagaccggaaacagcagtggcccgaacactgctccttgggtgggtttttgcccaagtagccggggccagtgggactacgaacacagtagccgcctacaatttgacttggaaatcaactaactttaagacaatcttagaatgggaacccaagcccgttaaccaggtctatactgtgcagatcagtactaagagtggggattggaaatctaagtgcttttatactacagatactgaatgcgatctcacggatgaaatagtgaaagatgttaaacagacatatctcgctcgggtgttctcctaccccgcaggaaatgtcgaatcgacagggtcagcaggggaacccctgtatgaaaactcccccgaatttacaccctatctggaaactaatctcggacagccaactatacagtcttttgagcaagttggaactaaagtgaacgtaactgtagaagacgaaaggactctcgtacgaagaaataacacttttctgagtttacgcgatgtttttgggaaagatctcatatatactctgtactattggaaatcctcttctagtggaaaaaaatatagtacttcactggaactctggtacctgtggtcctcctctttatctagttcttggctttacctgtatacttccgttgagaggcaagagtgggggcgggcggggaggcggacaccccat

SEQ ID NO: 8804 - DNA, 714 bp, synthetic construct
  misc_feature 1..714: note = source = /note="Description of Artificial Sequence: Synthetic coding sequence"
  source 1..714: mol_type = other DNA
atggagacgcctgcctggccgcgcgtcccacggccggaaaccgccgtcgcgcggaccctcctcctgggctgggtgttcgcgcaagtggccggagcctcaggaactaccaatactgtggcggcctacaacctcacttggaaatctacgaatttcaagactatcctcgagtgggagcctaagccagtgaaccaggtgtacaccgtgcaaatctcaaccaaatcaggagactggaaaagcaaatgcttttacaccaccgatactgaatgcgacctcaccgacgagattgtgaaagatgtgaagcaaacctacctggcgagagtgttctcctacccggcaggaaatgtggaatccaccggcagcgccggagagcctctgtacgaaaactcaccagagttcacgccgtacttggaaaccaacctcggtcaacctaccatccaatcctttgaacaggtgggaactaaagtcaatgtcaccgtggaggacgaacgcactcttgtgaggagaaacaatacgttcctctctctgagagatgtgttcggcaaggacttgatctataccctctattactggaagagcagctcatcgggaaagaagtactcaaccagccttgaactgtggtatctgtggtcgtcctcgctctcgtcctcctggctttacttgtatacctccgtcgagaggcaggagtggggacgagccggccggcggactccgcac

SEQ ID NO: 8805 - DNA, 714 bp, synthetic construct; identical to SEQ ID NO: 8793
  misc_feature 1..714: note = source = /note="Description of Artificial Sequence: Synthetic coding sequence"
  source 1..714: mol_type = other DNA

SEQ ID NO: 8806 - DNA, 714 bp, synthetic construct
  misc_feature 1..714: note = source = /note="Description of Artificial Sequence: Synthetic coding sequence"
  source 1..714: mol_type = other DNA
atggagacgccggcctggccccgcgtccccaggccagagacagctgtggctaggactctcttgctcgggtgggtgtttgcccaggtggcaggagcttcagggactacaaacactgtggccgcctacaacctgacttggaagtcaactaactttaaaaccatcttggagtgggagcccaagcctgtgaaccaggtctacacggtgcagatcagtaccaagagcggcgattggaagagtaaatgcttttacacaacagacaccgaatgcgacctgacagacgagatcgtcaaggacgtgaagcagacatacctggcccgcgtgttttcataccctgcaggcaacgtggaatctacggggagcgccggagaacccttgtacgagaattcccccgagtttaccccatatctcgagactaacctgggacagcctacaatccagtctttcgagcaggtgggcaccaaagtcaacgttaccgtggaggacgaaaggaccctggtccgccgcaataataccttcctatccctgcgggatgtgttcgggaaggatctcatatacacactttactattggaaatcatctagctccggcaaaaagtactctacctctttggaactgtggtatttgtggagcagctccctgtcttcatcttggttgtacttatacacaagcgtggaaagacaggagtggggccgggctggccgcaggactccacac

SEQ ID NO: 8807 - DNA, 714 bp, synthetic construct
  misc_feature 1..714: note = source = /note="Description of Artificial Sequence: Synthetic coding sequence"
  source 1..714: mol_type = other DNA
atggagacccccgcctggccacgcgtgcccagaccagaaaccgcagtcgcgcgaacgctgctcctggggtgggtctttgcccaggtagccggagcgtccggaacgaccaatacagtagcagcgtacaacctcacctggaagagcacgaacttcaagactatcctggagtgggaacctaagccggttaatcaggtttatactgtgcagatcagcactaaatctggcgactggaagagcaaatgtttctataccacagatacagagtgtgatttgaccgacgaaatagtcaaggacgtaaaacagacttacctagcccgggtcttcagctatcccgccggcaacgtggagagcaccggcagcgctggcgaaccgctgtacgaaaattcaccagagtttacaccgtacttggagactaacctgggtcaacccacaattcagtctttcgaacaggtaggaacaaaggttaacgtcactgtagaggacgaacgcactctcgtgagaagaaacaacacatttttgagtttacgagacgtgttcggtaaggatctcatatacaccttgtattattggaagtcttcttccagcggcaagaagtatagcacttccctcgaactatggtatctgtggagctcctccctttcaagttcatggttatacctgtacacttctgttgaaaggcaggaatgggggcgggcaggacggaggacaccccat

SEQ ID NO: 8808 - DNA, 714 bp, synthetic construct
  misc_feature 1..714: note = source = /note="Description of Artificial Sequence: Synthetic coding sequence"
  source 1..714: mol_type = other DNA
atggaaactcccgcctggcccagagtgccacgcccagagacagcagtcgccaggactttgctgctggggtgggtgttcgcgcaggtggccggcgcgagtgggactaccaacaccgtagctgcctataacctcacctggaaatctacaaatttcaagacaatactggagtgggaacctaagccagtgaaccaagtgtatacagtgcagataagcactaaatcaggtgactggaagagtaagtgcttttacactacggacaccgagtgcgacctcaccgacgagattgttaaggatgtcaagcaaacctacctggcaagggtattcagctaccccgcaggcaacgtggagtccacgggatccgctggagaaccattgtacgagaattcacccgagtttactccctacctggagaccaatctcggccagccaaccattcaatccttcgaacaggtcggaacaaaggtgaacgtgaccgtcgaagacgaacgcacgctggtccgcaggaacaatacatttctgagcctaagggatgtttttgggaaggacttgatatacacactctattactggaaatcatcctcctctggtaaaaaatacagcactagcctggagctgtggtatctctggtccagttcattgagttcgtcgtggctctatctatatacaagtgttgaaagacaggaatggggcagggcgggaaggcgcactccccat

SEQ ID NO: 8809 - DNA, 714 bp, synthetic construct
  misc_feature 1..714: note = source = /note="Description of Artificial Sequence: Synthetic coding sequence"
  source 1..714: mol_type = other DNA
atggaaaccccggcatggccacgcgtcccccgcccagagacggcagtggcacggactctgctgctcggttgggtatttgcgcaggtggcaggcgcaagcgggactactaatactgtcgcagcctacaacctgacttggaagagcactaactttaagaccatacttgaatgggaacctaaacccgtgaatcaggtctacactgtgcaaatttcgaccaagagcggagattggaagtcaaagtgtttctacactacggataccgaatgtgacctcactgatgaaattgtcaaggatgtgaaacagacctaccttgcacgggtctttagctacccagcaggaaatgtcgagtcgaccggatccgccggagagccgctgtacgaaaactctccagaattcaccccctacctggaaactaacctcggacagcctaccatccaatcgtttgaacaggtcggaaccaaggtgaacgtgaccgtcgaagatgaaaggactctcgtcagaaggaataacacctttctgtcgctgcgggatgtctttggaaaggacctgatatacactctttactactggaagtcctcctcctcggggaaaaagtactccacctcgctggaactttggtatctctggagctcgtcgctgtcatccagctggttgtacttgtacacgtcagtggagcgtcaggagtgggggcgggcaggcaggcgaaccccccat

SEQ ID NO: 8810 - DNA, 714 bp, synthetic construct
  misc_feature 1..714: note = source = /note="Description of Artificial Sequence: Synthetic coding sequence"
  source 1..714: mol_type = other DNA
atggaaactccagcatggccgcgggtgccgcggccggagactgcggttgccaggaccctgttgctgggatgggtgtttgcccaggtggcaggcgcttcgggcaccactaataccgtcgccgcctacaatctcacctggaaatctactaatttcaagactattctggagtgggaaccgaagccagtgaaccaagtgtacaccgtgcaaatcagcaccaaatccggagactggaagagcaagtgcttctacacgactgacaccgagtgcgacctgacggacgagatcgtgaaggacgtcaaacagacttacctcgcccgggtgttctcgtacccagccggcaatgtcgagtccactgggtcagccggcgaacctttgtacgaaaactcacccgagtttactccttacctggagacgaacctggggcaaccgactatccaatccttcgaacaggtgggaactaaggtgaacgtgaccgtcgaagatgaaagaaccctcgtgaggagaaacaacactttcctctccctgcgggacgtattcggaaaggaccttatctacactctgtactactggaagtcctcctcgagcgggaaaaagtactccacgtcactcgaactgtggtacctctggtcctcatcactgtcatcttcctggctgtacctgtacacctcagtggaacgccaggagtggggccgggccggacgccgaactccccac

SEQ ID NO: 8811 - DNA, 714 bp, synthetic construct
  misc_feature 1..714: note = source = /note="Description of Artificial Sequence: Synthetic coding sequence"
  source 1..714: mol_type = other DNA
atggaaaccccggcatggccacgcgtgccgcgtccagagacggccgtggcgcgcaccctgctcctgggatgggtctttgcacaggtcgccggagcttcgggtaccaccaacactgtggccgcttacaatctgacctggaagtccactaatttcaagactatcctggaatgggagccgaagccggtcaatcaggtgtacactgtgcagatctccactaagtccggagattggaagagcaaatgcttctacactactgatactgaatgtgacctcactgacgaaatcgtgaaggatgtcaagcaaacgtacctggctcgcgtgttctcttaccccgcgggaaacgtcgaatcaactggatccgcaggggagcctctgtacgaaaattcaccagagtttacgccataccttgaaaccaatcttggccagcctaccatccagtcattcgagcaggtcgggacgaaggtgaacgtgactgtggaagatgagcgcactctcgtgaggagaaacaacaccttcctgtcgcttcgcgatgtattcggaaaggatctgatctacaccttgtactattggaaaagctcatcctcaggaaagaagtactccacctccctggagctctggtacttgtggtcatcgtcgctctcctcctcctggttgtacctgtacacgtcagttgagcgacaagaatggggacgggcgggccggcggaccccccac

SEQ ID NO: 8812 - DNA, 714 bp, synthetic construct
  misc_feature 1..714: note = source = /note="Description of Artificial Sequence: Synthetic coding sequence"
  source 1..714: mol_type = other DNA
atggagacacctgcatggcctcgggtgcctaggcccgagactgctgtggctaggaccctgcttttaggttgggtcttcgcccaggtggcgggcgcctccgggacgactaacactgtcgctgcctataacctgacttggaaatccactaacttcaaaacaatcctggaatgggagccgaaacccgtaaaccaggtctacacggtgcagatttctaccaagagcggagactggaaaagcaaatgcttctataccactgacaccgaatgcgacctgacggacgaaatcgtgaaggacgtgaagcagacatacctggcacgcgtgttctcttacccggcagggaacgtcgagtccacaggaagcgctggagagcccctgtacgaaaatagccccgagttcactccataccttgagacaaatttgggccagcctacgatccagagttttgagcaggtgggaactaaagtcaacgtgacagtcgaagacgagaggacattggttagaaggaacaacactttcctgtctctccgagacgtgttcgggaaggacctgatctacactctttactactggaaatcctcctcctccggaaaaaaatattccacatccctggagctttggtacctatggagttcgtctctgagttcttcctggctatatttatatacgtcggtggaacggcaggaatgggggagggccgggaggaggacaccccac

SEQ ID NO: 8813 - DNA, 714 bp, synthetic construct
  misc_feature 1..714: note = source = /note="Description of Artificial Sequence: Synthetic coding sequence"
  source 1..714: mol_type = other DNA
atggaaacccctgcttggccgagagttccgcgcccggagactgcggtggctcggacgctgctgctgggatgggtgtttgcccaggtggcgggtgcgtcaggaaccacgaataccgtggcggcctacaacctgacctggaagtcgactaatttcaagacgatcttggaatgggaaccaaagccggtgaaccaagtgtacactgtgcaaatctcgactaagtccggtgactggaaaagcaagtgtttctacactaccgataccgagtgcgacctgactgatgagattgtgaaggacgtgaagcagacctatctggcgagagtgttctcttaccctgcaggaaacgtcgaatccaccggtagtgcaggcgaacctctctacgaaaactcgccggagttcaccccgtatctggagacgaatctgggacagccaaccatccaatccttcgagcaagtcggtactaaggtgaacgtgactgtggaggatgaacgcactctggtgcggcggaataacaccttcctgtcgctgagagacgtctttggaaaggacctgatctacaccctgtactactggaagtcgtcgtcgtccgggaaaaagtacagcacctcactggaactgtggtacctctggtcaagctcgctctcctcaagctggctgtacctgtacaccagcgtggagcggcaggaatggggacgggcgggccgccggactccgcat

SEQ ID NO: 8814 - DNA, 714 bp, synthetic construct
  misc_feature 1..714: note = source = /note="Description of Artificial Sequence: Synthetic coding sequence"
  source 1..714: mol_type = other DNA
atggagacacctgcctggccccgcgttcccaggcccgaaacggctgtcgctagaaccttgttactaggctgggttttcgcacaggtggccggggcgtctggcaccactaacaccgttgcagcatacaacctgacgtggaaatctaccaacttcaagactatcctcgaatgggaacctaagcctgtgaaccaagtttatacggtccaaatctcaacgaagtcgggcgattggaagagtaaatgcttctacaccactgacactgaatgcgatctgactgatgaaatcgtcaaagacgttaagcagacatatctcgcgcgcgtcttctcctatccagcgggaaatgtggaatcaacgggtagtgccggtgagcccctctacgagaactcacccgaattcacgccatatctggaaactaacctgggacaacctacaattcagagctttgaacaagtgggaaccaaagtgaacgtaactgttgaggacgaaaggaccctggtgagacgaaacaatacctttctgagcttaagggatgtcttcggcaaggacctgatatataccctttattattggaaatcgagctcgtccggaaaaaagtatagcacatcactggagctttggtacctatggagtagctctctgagttccagctggctatatttgtatacaagtgtagaaaggcaggaatgggggcgggcaggtagaaggaccccccac

SEQ ID NO: 8815 - DNA, 714 bp, synthetic construct
  misc_feature 1..714: note = source = /note="Description of Artificial Sequence: Synthetic coding sequence"
  source 1..714: mol_type = other DNA
atggaaacgccggcgtggccgcgagttccgcgaccggaaacggcggtagcgcgtacgctattactaggttgggtatttgcgcaagtagcgggtgcgtcgggtacgacgaatacggtagcggcgtataatctaacgtggaaatcgacgaattttaaaacgatattagaatgggaaccgaaaccggtaaatcaagtatatacggtacaaatatcgacgaaatcgggtgattggaaatcgaaatgtttttatacgacggatacggaatgtgatttaacggatgaaatagtaaaagatgttaaacaaacgtatctagcgcgtgtattttcgtatccggcgggtaatgtagaatcgacgggttcggcgggtgaaccgctatatgaaaattcgccggaatttacgccgtatctagaaacgaatttaggtcaaccgacgatacaatcgtttgaacaagttggtacgaaagtaaatgtaacggtagaagatgaacgtacgctagtacgacgtaataatacgtttctatcgttacgagatgtatttggtaaagatctaatatatacgctatattattggaaatcgtcgtcgtcgggtaaaaaatattcgacgtcgctagaattatggtatttatggtcgtcgtcgctatcgtcgtcgtggttatatctatatacgtcggtagaacgacaagaatggggtcgagcgggtcgacgtacgccgcat

SEQ ID NO: 8816 - DNA, 714 bp, synthetic construct
  misc_feature 1..714: note = source = /note="Description of Artificial Sequence: Synthetic coding sequence"
  source 1..714: mol_type = other DNA
atggaaacccctgcctggcctagagtccccagaccagaaactgcagtggctcgtactttgctgttgggatgggtgttcgcgcaagtggcgggcgcatcgggtaccacgaacaccgtcgctgcatacaacctcacctggaagtccacgaacttcaagaccattcttgaatgggagcccaaaccagtgaaccaagtttacactgtccagatctccaccaagtccggagattggaagtcaaagtgtttctacacgaccgacaccgagtgcgatctgactgatgaaattgtgaaagacgtgaagcaaacttatcttgcgcgggtgttttcataccccgccggtaacgtggagtcgaccgggtcggccggagaaccactgtacgagaatagcccagagtttactccatacttggagacgaacctcggacagccaacgatccagtctttcgaacaggtgggtactaaagtcaatgtgaccgtggaggatgaacgaaccctcgtgcgccgcaacaatacttttctgagccttagagacgtttttggtaaggacctcatttacaccctgtactactggaagagcagcagctccggaaaaaagtactctacttcgctcgagctgtggtacttgtggtcgtcctccctgtcgtcatcatggttgtacctttacacctcggtagaacggcaggaatggggcagagcagggcggcgcacccctcac

SEQ ID NO: 8817 - DNA, 714 bp, synthetic construct
  misc_feature 1..714: note = source = /note="Description of Artificial Sequence: Synthetic coding sequence"
  source 1..714: mol_type = other DNA
atggaaactccagcgtggcctcgggtcccaagaccggaaaccgccgtggcacgaactctcctgctgggatgggtgttcgcccaggtggcgggagcctcaggtaccaccaataccgtcgcggcgtacaatctgacctggaagtcaacgaactttaagaccatcctcgaatgggagccgaaaccagtgaaccaggtgtacactgtgcagatctcgaccaagagcggagactggaagtccaaatgcttctacaccaccgacactgagtgtgacctgacggacgagatcgtcaaggatgtgaagcagacctacctggcccgcgtcttttcctacccggctggtaacgttgaaagcaccggttcggccggagaaccactctatgaaaattctccggaattcaccccctacttggaaaccaacctgggacaaccgactatccagtccttcgaacaggtgggcactaaggtgaacgtgacggtggaggacgagcgcactctggtgcgacgcaataacactttcctctccctccgggacgtgttcggcaaggacctcatttacactttgtactactggaaaagcagctccagcggaaagaagtattcgacctcgcttgagttgtggtacctttggtcctcgagcctcagctcatcatggctctacctgtatacctcggtcgagcgacaagagtggggtcgcgctgggcggcgcactcctcat

SEQ ID NO: 8818 - DNA, 714 bp, synthetic construct
  misc_feature 1..714: note = source = /note="Description of Artificial Sequence: Synthetic coding sequence"
  source 1..714: mol_type = other DNA
atggaaacccctgcttggcctagggtgcctcggcctgaaactgctgtcgcacgtactctgcttctgggatgggttttcgcacaggtcgccggagcgagcggcactacgaatactgtcgcagcgtacaatctcacttggaagtccacgaactttaagactatacttgaatgggaacccaagccagtcaaccaagtgtacactgttcaaatcagcactaagtcgggtgattggaaatcaaagtgcttctatactactgatactgagtgtgaccttaccgatgagattgttaaagacgtgaagcagacttatctggcaagagtgttctcgtacccggcagggaacgtggaaagcaccggctcagccggtgaacctctttacgagaattccccagagtttaccccataccttgaaaccaatctgggacaaccgactattcagtcattcgaacaggtggggaccaaggtgaacgtcaccgtggaagatgaacggaccctggtcagaagaaacaacacctttctttcccttagagacgtttttggaaaggatctcatatacaccctgtactactggaagtccagctctagcggaaaaaagtactcaacctccctggagctctggtacctttggagctcatcgctgtcgtcatcgtggctttatctgtacacctcggtggaacgccaagaatgggggcgcgccggtaggcgaaccccgcat

SEQ ID NO: 8819 - DNA, 714 bp, synthetic construct
  misc_feature 1..714: note = source = /note="Description of Artificial Sequence: Synthetic coding sequence"
  source 1..714: mol_type = other DNA
atggaaactcccgcttggccaagagtccccaggccggagacagcagtcgccagaaccctgcttttgggctgggtttttgcccaggtggccggggctagcggcaccacaaataccgtcgccgcctacaacttaacatggaagagcacaaattttaaaacaatcctggagtgggagccaaagcctgtgaaccaggtttatacagtgcagatctccactaagagcggggactggaagtctaagtgcttctataccaccgataccgaatgcgatctgactgatgaaatcgtgaaagacgtcaagcagacctaccttgccagagtgttcagttatcctgctggcaacgtggagagcaccggctccgccggcgaaccactgtacgagaacagccccgaatttaccccttatctggagacaaatctaggccaacccaccattcagagtttcgagcaagtcggaactaaggtgaacgtcaccgtggaggacgaacgtactctggtgcgacggaataacacatttcttagcctcagggacgttttcggcaaggaccttatctacactctctattactggaaatcaagcagttctgggaagaaatattccacctccctggaattatggtatctgtggagtagttctctgtcctctagttggctgtacctttacacatccgttgagcggcaggaatggggccgggccggcaggaggaccccacac

SEQ ID NO: 8820 - DNA, 714 bp, synthetic construct
  misc_feature 1..714: note = source = /note="Description of Artificial Sequence: Synthetic coding sequence"
  source 1..714: mol_type = other DNA
atggagactcctgcctggccgagagtcccaaggcctgagacggctgtggcacggactctgttgctggggtgggtgtttgctcaggtggcaggagcatccggaaccaccaacactgtggcagcatataacctgacttggaaatccacgaatttcaaaaccatactggaatgggaacctaagcctgtgaaccaggtgtacaccgttcaaatctccaccaagagcggggattggaagtcgaagtgtttttacactactgatactgaatgtgaccttaccgatgagattgtgaaggatgtgaagcagacctaccttgcacgagtgttttcgtaccctgcgggtaacgtggaatccactggctccgccggcgagcccctgtacgagaattcgcctgagtttaccccttacctggaaactaatcttgggcaaccaaccatccagtccttcgaacaagtcggcactaaagtcaatgtgaccgtcgaggatgagagaacccttgtgagaagaaacaacaccttcctgtcgctgcgcgatgtttttggcaaagaccttatctacaccctttactactggaaatcctcctcctcgggcaaaaagtactcaacttcgttggaactctggtatctgtggagctcatccctttcctctagctggttgtacctgtacacttcagtcgagaggcaagagtggggacgggccgggcggcgaaccccccac

SEQ ID NO: 8821 - DNA, 714 bp, synthetic construct
  misc_feature 1..714: note = source = /note="Description of Artificial Sequence: Synthetic coding sequence"
  source 1..714: mol_type = other DNA
atggagactcctgcatggcctagagtcccaagaccagagacggctgtcgcgaggaccctgctccttggttgggtgtttgcccaggtcgcgggagcatcgggaaccaccaacactgtggccgcctacaacttgacttggaagtcgaccaatttcaagaccatcctggagtgggaaccaaaacctgtgaatcaagtgtacaccgtccagatctcgacgaagtcgggagactggaaatctaagtgtttttacactactgataccgagtgtgatcttactgatgagattgtgaaagatgtgaagcaaacttacttggcacgcgttttttcgtaccctgcaggaaacgtggagtccacgggatcagctggagaacctctgtatgaaaactcgcctgaatttactccctacctggaaactaacctggggcaacccactatccagtcgtttgagcaagtgggtactaaggtgaatgtgaccgtggaagatgaaagaaccctcgtgcgcagaaataacactttcctctcactgagagatgtctttggaaaggatttgatttacaccctctactactggaagtcatccagctcgggtaagaagtactcgacgtctctggaactgtggtatctgtggtcgtccagcctttcatcgagctggctttacctgtatacgagcgtcgaacggcaagaatggggccgcgcaggacggagaactccacac

SEQ ID NO: 8822 - DNA, 714 bp, synthetic construct
  misc_feature 1..714: note = source = /note="Description of Artificial Sequence: Synthetic coding sequence"
  source 1..714: mol_type = other DNA
atggaaacccctgcttggccaagggtcccccggcctgagactgcagtcgcgcgcacattgttactcggttgggttttcgcccaggtcgctggtgccagcggcaccactaacacagtggccgcttacaacctcacctggaagtccacaaactttaaaacaatcctggagtgggaaccaaagcctgtcaaccaggtgtacacggtgcagatcagcacgaaatccggggattggaagagcaagtgcttttacaccaccgacacagagtgcgatctgaccgacgagatcgtgaaggacgtgaaacagacataccttgccagagttttctcttacccggccggtaacgtggaatcgaccggctccgcaggagaaccactgtacgagaactctccagaattcactccgtaccttgagactaacttgggtcagccaaccattcagagtttcgagcaagttggaaccaaggtgaacgtgacagtggaggatgagaggaccttggtgcgacgcaacaacacatttctctctctcagagacgtgtttggcaaggacctgatttacacactgtactattggaagtccagctcatctggaaagaaatattctaccagcttggaactgtggtatctttggtcaagttccctgagtagcagctggctttacttatatacttcagtggaaaggcaggagtggggcagggctggaaggcgaactccccat

SEQ ID NO: 8823 - DNA, 714 bp, synthetic construct
  misc_feature 1..714: note = source = /note="Description of Artificial Sequence: Synthetic coding sequence"
  source 1..714: mol_type = other DNA
atggaaacacctgcatggcctcgcgttccacgcccagaaacagcggttgccagaactctgcttctcggctgggtttttgcgcaagttgcgggcgcaagcggcacgacaaatacggtcgccgcatataatctgacgtggaaaagtactaacttcaaaactatccttgaatgggaaccgaaacctgtgaatcaggtttacactgtgcaaatctcgaccaaaagtggagattggaaatcaaaatgcttctataccacggatacggaatgtgatttgacagatgagatcgtcaaggacgtgaaacaaacgtatttagcgcgagtgttttcttatccggcaggcaacgtcgaaagcacaggaagcgccggagaaccgctgtatgaaaactctccggagtttacaccgtacttagagacgaaccttggtcagcctacgattcagtcctttgaacaagttggcacaaaagttaatgtgaccgtggaagatgaacgaacacttgtacgcagaaacaataccttcctgtctctgcgagatgtattcggcaaagatctgatttacacattatattactggaaatctagctcatcagggaaaaaatattccacctctttagaactctggtatctgtggagtagttccctgtcgtcttcttggttgtacttatacacatctgtggaaagacaagaatggggccgcgcgggccggcggacgccgcat

SEQ ID NO: 8824 - DNA, 714 bp, synthetic construct
  misc_feature 1..714: note = source = /note="Description of Artificial Sequence: Synthetic coding sequence"
  source 1..714: mol_type = other DNA
atggaaaccccagcatggccacgtgtgccccgccccgaaaccgctgtggccagaactctcctgcttgggtgggtctttgcgcaggtagcaggtgcctccggcaccactaataccgtggctgcctacaacctcacttggaaatcaaccaacttcaagactattcttgagtgggaacctaagcccgttaatcaagtctacaccgtgcagatttcgaccaagtccggcgactggaaatcgaaatgtttttacaccacggatactgagtgtgaccttactgatgaaattgtgaaggatgtgaaacaaacctacctggcacgtgtcttttcctaccctgcaggtaatgttgagagcactggatcggcaggtgaacctctctacgaaaacagcccagaattcaccccctaccttgaaactaacctgggtcagcctacgatccaatcttttgagcaagtgggaaccaaggtgaacgtcactgttgaggatgaacgaactctggtgcgaagaaataacacttttttgagtctgagggatgttttcggtaaggacctgatatacaccctctactattggaaatcatcttcgtccgggaagaagtactccacttcacttgaactgtggtatttgtggtcatcatcgcttagctcgagttggctctacctttacacgtcggtcgaacggcaggagtggggacgggcagggaggagaactccccac

SEQ ID NO: 8825 - DNA, 714 bp, synthetic construct
  misc_feature 1..714: note = source = /note="Description of Artificial Sequence: Synthetic coding sequence"
  source 1..714: mol_type = other DNA
atggaaacacccgcatggccgcgagttcctcgccccgagaccgctgtggcacgcacgcttctgctcggttgggtctttgcccaagttgcaggtgcatctggcaccaccaataccgtggccgcatataatctaacgtggaagagcaccaacttcaagaccatcctggaatgggagcccaaacccgtgaaccaagtctataccgtgcagatctccaccaaaagtggtgattggaagagtaagtgtttctacacgaccgacacggagtgcgatctcaccgacgagatcgtcaaggatgtaaaacagacctacctcgcccgcgtctttagctaccctgctggcaacgtcgagtccaccggcagcgccggtgagccgttgtacgaaaacagtcccgaattcactccttacctggagaccaacctgggccagccgacgatccaaagtttcgagcaggtcggaacgaaggtcaacgtaaccgtagaggatgaacgaacattagtacgacgtaacaacactttcctctccttgcgtgatgtgttcggcaaagatctgatctacaccctttactactggaagtctagctcctccggtaagaagtactccacctccctcgagctctggtatctgtggtcctcatcactctcgtcctcgtggctttacctttataccagcgtcgagcgtcaagagtggggacgggccggtcggagaaccccgcat

SEQ ID NO: 8826 - DNA, 714 bp, synthetic construct
  misc_feature 1..714: note = source = /note="Description of Artificial Sequence: Synthetic coding sequence"
  source 1..714: mol_type = other DNA
atggagacgcctgcctggccgcgagtgcctcggccggagaccgcggtagcacgcactctcctgctgggctgggtctttgctcaggttgcaggagcctctggtactacaaataccgtggctgcttataatctgacctggaagtctaccaattttaagaccatacttgaatgggagcccaagccggtaaaccaggtgtacaccgtccagatctccactaaatcaggtgactggaaatctaagtgcttctatacaacagatacggaatgcgacctgaccgatgaaatcgttaaagatgtaaaacagacatacctggcaagggtgttctcctatccagccgggaatgtggagtccaccggatccgctggtgagccactgtacgagaacagtccagaatttaccccttacctcgagaccaatcttgggcaacctacaattcagagcttcgaacaggttgggactaaagttaatgtgactgttgaggatgagagaactttagtgcgccggaacaacacatttctgtccctgcgcgatgtcttcggtaaagacttgatttacactctgtactactggaagtcatcatcttcaggcaaaaagtattccacatcacttgagctgtggtatctgtggtcgagctctttgtctagcagttggctgtacctgtacacatctgttgagcgacaggagtggggccgggccggcaggcggacgccccac

SEQ ID NO: 8827 - DNA, 714 bp, synthetic construct
  misc_feature 1..714: note = source = /note="Description of Artificial Sequence: Synthetic coding sequence"
  source 1..714: mol_type = other DNA
atggagacacccgcctggcctagggtcccacggcctgagacagcggtagccaggacgctgttactcggctgggttttcgcacaggtggcgggcgcatcaggaaccaccaatacggtggccgcgtataatttaacttggaaatccactaattttaaaacgatcctcgagtgggagcccaaacccgtgaatcaggtctacactgtgcaaattagtaccaagagcggcgactggaaatcgaagtgcttctacactacggataccgagtgcgacttgactgacgagattgttaaggacgtgaaacagacgtatttggcccgagtcttttcttatccagccggcaacgtagagagcacaggatcagctggcgaacccttgtatgaaaactcacccgagttcacgccctacttggagacgaacctgggccagccaacaattcaatccttcgagcaggtgggtacgaaggttaacgtcaccgtggaggatgaaagaacccttgtgcgccgaaacaatacgttcctgagcctgagggacgtttttggcaaggatctaatttacacgctgtattactggaagtctagcagtagcggcaagaagtattcgacgtcgctggagctgtggtacctgtggtcatccagcctgtcgagctcgtggctatatctgtatacgagcgttgagcgccaagagtggggcagggccggacgcagaacaccacac

SEQ ID NO: 8828 - DNA, 714 bp, synthetic construct
  misc_feature 1..714: note = source = /note="Description of Artificial Sequence: Synthetic coding sequence"
  source 1..714: mol_type = other DNA
atggagactccagcttggcctcgcgtcccacggcctgagaccgcggtcgcgcgaaccctcctgctcggctgggttttcgcccaggtcgcaggcgcctccggtacaacgaacaccgtagctgcctataatctcacctggaaatccactaatttcaagaccatattagagtgggaaccaaaacctgtcaaccaggtctacaccgtgcaaatctcaaccaaaagcggcgactggaaatcgaagtgtttctatactaccgacacggaatgcgatctgaccgatgaaatagtgaaggatgtgaaacagacgtatctagcccgcgtattttcttatcccgctgggaatgtagaaagtactgggagtgcaggggagccactctacgagaactctcccgaattcaccccgtaccttgagaccaacttggggcagccgactatccagtctttcgagcaggtaggcacgaaagtgaatgtgacggtggaagatgagcgcacgctggtgcggcggaacaacaccttcctgtcactgagggacgtcttcggcaaagatctaatttatactctgtattactggaaatccagctctagcggcaaaaagtattcaactagccttgagttgtggtacttgtggagtagcagcctcagttcttcttggttatatctgtatacatctgtcgagaggcaggaatgggggagagctgggaggagaacccctcat

SEQ ID NO: 8829 - DNA, 714 bp, synthetic construct
  misc_feature 1..714: note = source = /note="Description of Artificial Sequence: Synthetic coding sequence"
  source 1..714: mol_type = other DNA
atggagacccctgcttggccaagagtgccacggcccgagaccgctgtcgccagaacactcctgctcggttgggtctttgcccaggttgcaggcgcatccgggaccacaaatactgtagctgcctataatcttacctggaagtccaccaattttaagacaatcctggaatgggagcccaaacccgtaaatcaagtgtataccgtccaaattagcaccaagtccggagattggaagagtaagtgcttctacaccacagatactgagtgtgacctgacggacgagatcgttaaggatgtaaagcagacctatcttgcacgagtcttctcgtatcctgcagggaacgtggaatctaccggctctgcgggggaaccactgtacgaaaactcaccggaattcacaccttacctggagacaaacctcggccaacccacaatccagtcttttgagcaagttggtactaaggtcaatgtgacggtcgaggatgaacgaacgctggtgagaaggaacaacacttttttgagcttgagggatgtgttcggcaaggaccttatttatacactctactattggaagtcttcctcgagtgggaagaagtactcgacttcactggagctgtggtacctttggagttctagtttgtctagcagttggctgtacttgtacacctctgtcgaacggcaggagtgggggcgagctggcaggagaaccccccac

SEQ ID NO: 8830 - DNA, 714 bp, synthetic construct
  misc_feature 1..714: note = source = /note="Description of Artificial Sequence: Synthetic coding sequence"
  source 1..714: mol_type = other DNA
atggaaaccccagcctggcctagggtccctcgtcctgaaacagcagtagcgcggacactattgcttgggtgggtgtttgcccaagtcgcaggagcgagtgggactacaaatactgtcgccgcatacaatctcacctggaagtctacaaacttcaaaacaatactcgagtgggagccaaagcctgtgaatcaggtatacacagtccagatctctacgaaatcaggagactggaaatcgaagtgtttctatacgactgacactgaatgcgacctcaccgatgagatcgtgaaggatgttaaacagacctatctggcccgggtgttcagctatcccgccggaaatgtggagtctactggtagcgcaggagaaccactttacgaaaacagtcccgaattcacaccgtatttagagacaaatctcggtcaacctacaattcagagcttcgaacaagttgggactaaggttaatgtgacggtggaagatgaacggaccctcgtgagaaggaataacacgttcctcagcctgcgggatgtgttcggtaaggatctcatctacaccctgtactattggaagtcctccagctcggggaagaaatacagcacctctctggagctctggtacctttggtcatcctcattatcatcctcctggctctacctgtatactagcgtggagagacaagaatggggaagggctgggcggcgaactcctcat

SEQ ID NO: 8831 - DNA, 714 bp, synthetic construct
  misc_feature 1..714: note = source = /note="Description of Artificial Sequence: Synthetic coding sequence"
  source 1..714: mol_type = other DNA
atggagacccccgcttggcctcgggtgcccaggccagaaacagctgttgccagaactctacttctcggatgggtttttgctcaagtcgctggcgccagcggtactaccaacaccgttgccgcatataacttgacatggaagagcacaaattttaagaccatacttgagtgggaaccgaaacctgtcaatcaagtttatacggtgcaaattagtactaagagcggggactggaaatccaaatgtttttatactacagatactgaatgcgatctcactgatgagattgtgaaagacgtgaagcaaacatatctagccagggtgttttcttacccagcgggtaatgttgaaagtacaggctcggccggcgaaccattgtatgagaactcacctgagttcacaccttatctcgaaactaatctggggcagccaacaattcaatcatttgagcaagttggaacaaaggttaatgtgaccgttgaagatgaaagaacgctcgttcgccggaataacacattcctttcactcagggatgtttttggaaaggatttaatttacaccttgtattactggaagtcctcatcgagcgggaagaagtattcaacctcactcgaactctggtatttgtggagcagcagcttgtccagctcatggctttatttgtacacatcggtggaacgacaagagtgggggagggcgggcaggaggactccccat

SEQ ID NO: 8832 - DNA, 714 bp, synthetic construct
  misc_feature 1..714: note = source = /note="Description of Artificial Sequence: Synthetic coding sequence"
  source 1..714: mol_type = other DNA
atggaaacgcccgcctggccgcgcgtgcccagaccagaaactgcagtcgcaagaactttgctgctgggatgggttttcgcccaagtggctggggcaagcggaaccaccaatactgtggcagcgtacaatcttacctggaaatcgaccaactttaagactattcttgaatgggaaccaaagcctgtgaaccaggtgtacactgtccagataagcaccaagtccggagactggaagtctaagtgtttttacaccacggataccgaatgtgatcttaccgacgaaatcgtgaaagatgtcaagcaaacttacttggctcgggtgttcagttaccctgcaggcaatgtggagtccaccggatcggccggagaacccctctacgaaaattcacccgaatttactccatacctcgaaaccaacctggggcagcccaccatccagagctttgaacaggtgggtactaaggtgaatgtcaccgtggaagatgaaagaacgcttgtgcgaagaaataacacgttcctctccctcagagacgtctttggcaaggatctcatttacactctgtactactggaagagctcgtcctccggtaaaaagtactctactagcttggaactgtggtacctgtggtcctcctcactgtcaagctcctggctctacctctatacctcagtggagagacaggaatggggaagggcgggtcgccgtactccgcat

SEQ ID NO: 8833 - DNA, 714 bp, synthetic construct
  misc_feature 1..714: note = source = /note="Description of Artificial Sequence: Synthetic coding sequence"
  source 1..714: mol_type = other DNA
atggaaacaccagcgtggccacgtgttcctcgacccgaaaccgccgtcgcacgtacactgctgcttggatgggtgttcgctcaggttgcaggtgcctctggcacgaccaatacggtggcagcgtacaatttgacctggaagagcaccaactttaagaccattttagagtgggagccaaaacctgtcaaccaagtctacacagtccaaatttcaaccaaaagtggcgactggaaatccaagtgtttttatacgacggacactgagtgcgacctcaccgacgaaatagtgaaggatgtcaagcagacatatcttgctcgtgtattctcctatccagccggcaatgtggaatctactggctcagcaggcgagccgttgtacgaaaacagtcctgagttcaccccttatcttgagacgaacctcgggcaacctacaattcagtccttcgagcaggtcggaactaaggtgaatgtgacggttgaggacgaaagaacactcgtccgtagaaataacacatttttgtccctgagagatgtgttcggcaaggatctcatttatacactatactactggaagtcaagctcctcaggtaagaagtatagcacttccctcgagctgtggtatctgtggtcctcatccctgtcgagttcctggttgtatctctacacgtcagtcgagcgccaagagtggggccgggcaggacgccggacgcctcac

SEQ ID NO: 8834 - DNA, 714 bp, synthetic construct
  misc_feature 1..714: note = source = /note="Description of Artificial Sequence: Synthetic coding sequence"
  source 1..714: mol_type = other DNA
atggagacgcccgcctggccgcgggtcccccgcccggaaactgctgttgcgcgcaccctgctgctgggatgggtgtttgcacaagttgccggcgccagcggtaccaccaacaccgtggccgcctacaacctcacttggaagtcaaccaacttcaagacgatcctcgaatgggagccaaagccggtgaatcaggtgtacacggtgcagatcagtaccaagtccggtgactggaaatctaaatgtttctacactactgatactgagtgcgacctgactgatgagatagtgaaggacgtgaaacaaacctacctggctcgtgtgttctcgtacccggctggaaatgtggaatcgaccggatcggcgggagagccattgtacgaaaacagccctgaattcactccctacctggaaactaacttgggacagcctactatccagagtttcgagcaggtcgggaccaaggtgaatgtgacggttgaagatgaaagaaccctggtgcggcgcaacaacaccttcctgtcattgagagacgtgtttggcaaggacttgatctacaccctgtattactggaagtcctcttcgtcaggaaagaaatactcaacctcgctcgaactctggtatctttggagctcctccctttcgtcgtcttggctctacctgtacactagcgtcgagcgccaagaatggggacgggcagggcgccgcactccgcac

SEQ ID NO: 8835 - DNA, 714 bp, synthetic construct
  misc_feature 1..714: note = source = /note="Description of Artificial Sequence: Synthetic coding sequence"
  source 1..714: mol_type = other DNA
atggagactcccgcctggccacgagtcccaagaccagagaccgcagtggcgcgaaccttgctcctcggctgggtgtttgcacaggtggcaggtgcatcaggcaccacgaataccgttgctgcatacaacctcacctggaagtctacaaacttcaagacaatattagagtgggagcccaagcccgtgaaccaagtgtatacagtgcagatctccaccaagtcaggggattggaaatccaagtgcttctacaccaccgatacagaatgcgacttaactgatgagatcgtgaaggatgttaaacagacctatctggcacgagtctttagctatcctgccggaaacgtcgaaagtaccgggtcagccggagagcctctgtacgagaattcacctgagttcaccccctacctcgaaaccaacctcggccagcccacaatccagtccttcgagcaggtgggcaccaaagtaaatgtgaccgtcgaggacgaacggacgctggtgcgaagaaacaacacattcctgtcactgcgggatgtttttgggaaagatctgatctataccctgtactactggaagtcttcttcttctggcaaaaaatattccacaagtctcgagctctggtacttgtggtcctcatctttaagcagttcctggctttatctttatacaagcgttgagcgacaggagtggggaagggctggccgcaggacacctcat

SEQ ID NO: 8836 - DNA, 714 bp, synthetic construct
  misc_feature 1..714: note = source = /note="Description of Artificial Sequence: Synthetic coding sequence"
  source 1..714: mol_type = other DNA
atggagactccagcatggcccagagttcccaggccggagacagccgtggcacgtacgttgctactgggttgggtttttgcacaggttgccggcgcaagcggaactacaaacacagtcgccgcatacaatctcacttggaagagtactaattttaagaccatacttgaatgggagccgaagccagtaaatcaggtgtatacagttcagatttcgactaaatctggcgattggaaatctaagtgtttttacactacagatactgaatgcgatctgactgacgagatagtcaaggatgtgaaacaaacatatttagcgcgcgtgttctcctatccagccggcaatgttgaaagtaccggtagcgccggagaaccgttgtacgaaaattctcctgagtttacaccctacctggaaactaacctcggccaacccacgatacagagctttgagcaggtaggaacaaaagtgaatgtgaccgtggaggacgagagaactctcgtgagacgcaacaataccttcttatcactgcgcgatgtgttcgggaaagacctaatctatactctctactactggaagtccagctcttcagggaagaagtattctacttccctggaactctggtacttgtggtcgtcttcattgagtagctcatggttatatctgtatacatccgtcgagcggcaggaatgggggcgagctggacggcgaaccccacac

SEQ ID NO: 8837 - DNA, 714 bp, synthetic construct
  misc_feature 1..714: note = source = /note="Description of Artificial Sequence: Synthetic coding sequence"
  source 1..714: mol_type = other DNA
atggagacccctgcctggcctcgggttccgcgaccggagacggcagttgcacggaccttgctgctaggttgggtcttcgcccaggtggcaggcgcatccggtacgactaacaccgtcgccgcctacaacctgacctggaagagcactaacttcaagacgatcctggaatgggagccgaagccagtcaatcaggtttacacggttcagatcagtacaaagagcggcgactggaaatccaaatgcttctacactaccgacacagaatgtgatttgaccgatgagatcgtcaaagatgtcaaacagacctatctggcgcgcgtatttagctaccccgcgggtaacgttgaaagcaccggttctgctggtgaacctctgtacgagaactccccggaatttactccatacctcgagactaacctgggccagccaaccatccagtcctttgaacaggtgggaaccaaagtgaatgtcactgtggaggatgagcgaaccctggtgcgccgcaataataccttcctgtctctgagggatgtttttggtaaagatctaatctacacgctgtactattggaagtccagctcaagcggcaaaaagtatagtacctctctggaactgtggtacctgtggtccagcagcctttcgtccagctggctctacctgtacaccagcgtggaacggcaggaatggggcagggccggacgccgaaccccgcac

SEQ ID NO: 8838 - DNA, 714 bp, synthetic construct
  misc_feature 1..714: note = source = /note="Description of Artificial Sequence: Synthetic coding sequence"
  source 1..714: mol_type = other DNA
atggagactcccgcctggccaagggtgccccgcccggaaaccgcggtcgctcgcactctgctgctcgggtgggtgttcgcacaagttgcgggggctagtgggaccacgaacactgtggcagcctacaacttgacgtggaagtcgactaatttcaaaaccatcttggaatgggaaccgaagccagtgaatcaggtctacaccgtgcagatctcgactaagtcaggcgactggaagagcaaatgcttctacactaccgatactgagtgcgatctgaccgacgagatcgtgaaggacgtgaagcagacttacctcgcaagggtcttttcatacccagcggggaatgtcgagtccactggctccgccggagaaccactgtacgagaattcgccggaatttaccccatacctggaaaccaatttgggccaaccaactatccagtcctttgaacaagtgggaaccaaggtgaacgtgaccgtggaggacgaacgcacgctggtcaggcgcaataacaccttcctgtccctgcgggacgttttcggaaaagacctcatctacaccctctactattggaagtcctcgtcatcaggaaaaaagtacagcacttcactggagctgtggtacctgtggtcctcctccctgtcgagcagctggctgtacctctacacgagcgtggagagacaggaatggggaagagctggcagacgaaccccccac

SEQ ID NO: 8839 - DNA, 714 bp, synthetic construct
  misc_feature 1..714: note = source = /note="Description of Artificial Sequence: Synthetic coding sequence"
  source 1..714: mol_type = other DNA
atggagactccggcctggccgagagtcccccggccggaaaccgcggtggcacggaccctcctgctgggttgggtgttcgcccaagtggccggcgcgtccgggaccactaatactgtggccgcttacaaccttacttggaaatcgaccaacttcaaaaccattctggaatgggagcccaaaccggttaaccaggtctacactgtgcagatctccaccaagagcggagactggaagtccaagtgtttctacaccactgataccgaatgcgatctcaccgatgagatcgtgaaggacgtgaagcagacctacctggctcgcgtgttctcctacccggcgggcaatgtcgagtcgactggatcggccggtgaacctctctacgagaactcgccagaattcacgccatacctggaaaccaatctgggacaacctactatccagagcttcgaacaggtgggaaccaaggtcaacgtgacggtcgaggacgaacgcaccctggtgaggcgaaacaatacttttctgtcgctgcgggacgtctttgggaaggacctgatctacactttgtactattggaaatcaagctcatcaggaaagaagtacagcacctcactcgaactgtggtacctctggtccagttctctcagctcgtcgtggctttatttgtacacttccgtggagcgccaagagtggggcagagcaggacgcaggacgccacat

SEQ ID NO: 8840 - DNA, 714 bp, synthetic construct
  misc_feature 1..714: note = source = /note="Description of Artificial Sequence: Synthetic coding sequence"
  source 1..714: mol_type = other DNA
atggagactcctgcatggccacgcgttccacggcccgaaacggccgtggcacgcaccctgttgcttgggtgggtctttgcacaagtcgctggagcctcgggaacgactaacaccgtggcagcgtacaacctcacgtggaaatccaccaacttcaagaccattctcgagtgggaaccgaagcctgtgaaccaggtgtacaccgtgcagatttcgacgaagtccggtgactggaagtccaaatgcttttacacgacggataccgaatgtgacctcactgacgagatcgtgaaggacgtgaaacagacctaccttgcacgcgtgttctcttacccagcaggcaatgtggaatccaccggtagcgctggggagcctctttatgaaaattccccagaattcactccataccttgaaactaaccttgggcaaccgaccattcagtcatttgagcaggtggggactaaggtcaacgtgactgtcgaagatgagcgcaccctggtcagaaggaacaacacctttctttcccttcgggatgtgttcggtaaagatctgatttacactctttactactggaagtcatcgtccagcgggaaaaagtactctacctcacttgagctgtggtatctgtggtccagctcgctcagcagcagctggctttacctgtacacctcagtcgagcgccaagaatggggaagagcgggacggcgcacccctcat

SEQ ID NO: 8841 - DNA, 714 bp, synthetic construct
  misc_feature 1..714: note = source = /note="Description of Artificial Sequence: Synthetic coding sequence"
  source 1..714: mol_type = other DNA
atggagacccctgcttggcccagagtccctaggccagaaaccgccgtcgccaggaccctgctcttgggctgggtttttgctcaggtagctggcgccagcggcacaaccaacactgttgctgcctataacctcacatggaaatccactaacttcaagaccattttggagtgggagcccaaaccagtcaaccaggtctatacagttcagatctctacaaaatctggcgactggaaatctaaatgcttctacaccaccgatacggagtgtgacttgaccgacgagatcgtaaaggatgtgaaacagacataccttgcccgagtgtttagttatccggcaggcaacgttgagagcacagggagcgctggcgagccgctgtatgaaaattctccagagtttaccccatacctggaaaccaacttggggcagccaactatccagagcttcgagcaggtgggaacgaaagtcaacgtcacagtggaggacgagagaactctcgtccggcggaacaacacatttctctccctccgggatgtatttggcaaggatctgatctacaccctctattactggaaatcttcctcttctgggaaaaaatacagcacgtcactggagctctggtacctctggagctccagcctgtccagctcatggctgtatctgtacacctctgttgagcggcaagaatggggaagagctgggcggcggacaccacac

SEQ ID NO: 8842 - DNA, 714 bp, synthetic construct
  misc_feature 1..714: note = source = /note="Description of Artificial Sequence: Synthetic coding sequence"
  source 1..714: mol_type = other DNA
atggaaactccagcatggccaagggtgccacggccagagactgcagtcgcgcgcacgcttctgctgggatgggtgttcgctcaagtggccggagcctcgggaaccaccaatactgtggcagcgtacaacctcacgtggaaaagcaccaactttaagaccattctcgagtgggaacctaagcctgtgaaccaggtgtacaccgtgcaaatctcgaccaaatccggcgattggaagtctaagtgtttttacactacggacaccgaatgcgatttgactgatgagattgtcaaagacgtgaagcaaacctacctcgcccgggtgttttcgtaccctgcagggaacgtggagagcaccggctccgcgggagagccactttacgaaaattccccagagtttactccatacttggaaactaatttggggcaacctaccatccagtcctttgaacaagtgggtactaaagtgaacgtcaccgtcgaagatgaacgaactctggtgagaaggaacaatacctttctctcccttcgcgacgtgttcggtaaggacctcatctacactctgtactactggaagtcgtcgagctcgggtaagaaatactcgacgtcccttgagctctggtacctgtggtcctcgagcctgtcgtcatcatggctctatctttacaccagcgtcgagaggcaagaatggggcagagcgggacgtcgcactcctcac

SEQ ID NO: 8843 - DNA, 1383 bp, synthetic construct
  misc_feature 1..1383: note = source = /note="Description of Artificial Sequence: Synthetic coding sequence"
  source 1..1383: mol_type = other DNA
atgcagagagtgaacatgatcatggccgagtcacccggcctgattaccatatgtctactagggtacctcttgagtgcggagtgcaccgtattcctggatcatgagaatgccaataagatccttaatagaccaaaaaggtacaattcgggcaagctggaggagttcgttcaggggaacctggagagggagtgtatggaagaaaagtgtagtttcgaagaggcccgggaagttttcgagaataccgaaaggactactgaattttggaaacagtacgtggatggcgaccaatgcgagtctaacccttgcctgaatgggggtagctgtaaggacgacataaattcatatgagtgttggtgtccctttggcttcgaaggcaagaactgcgagctggatgtgacatgcaacattaagaacggcaggtgtgagcagttttgtaagaattccgcagataacaaagtggtatgcagctgcacggaaggataccgactcgctgagaatcaaaaatcttgtgaacctgcagttcctttcccgtgcggacgggtgagcgtctcccagacctctaaacttactcgagctgaaacagtgttcccggacgtggattatgtcaacagtacagaggctgagacaatactcgacaacatcacacagagcacccagagctttaacgattttacaagagttgttggcggagaagatgccaaacctgggcaattcccgtggcaggtggtgctgaacggtaaagtggatgctttctgcggcggctcgattgtcaatgagaagtggatcgtgacagccgctcattgcgtggaaactggcgtgaagattactgtggtggcgggtgagcacaacattgaggaaacagagcacacagagcaaaagcgcaatgtgattcgcataattccacatcataattacaacgctgccatcaataaatataatcacgacattgcactgctcgagctggacgagccccttgtgttgaattcatatgtcactccaatctgtatagccgacaaggaatatacaaacatctttctcaagtttggctcgggttacgtatcaggttgggggcgggtcttccataagggaaggagcgcacttgtgctacagtacttacgtgttcccctggttgaccgcgccacctgcctccgatccaccaaatttactatatacaacaatatgttttgcgctggtttccatgagggtgggcgcgactcctgccagggtgattccgggggtccccatgtcacagaagtggaggggacctcctttttgacggggatcatatcctggggagaggaatgcgcaatgaagggcaaatacggtatatatactaaggtgtcccggtacgtgaattggatcaaagaaaaaaccaaactgaca

SEQ ID NO: 8844 - DNA, 1383 bp, synthetic construct
  misc_feature 1..1383: note = source = /note="Description of Artificial Sequence: Synthetic coding sequence"
  source 1..1383: mol_type = other DNA
atgcaacgcgtgaacatgattatggcagaaagcccgggcctcattacgatttgcctgctgggatacctgttgtcggcagaatgtactgtgttcctggatcacgaaaatgccaacaagatcttgaaccgccccaaacggtacaactcaggtaagctcgaagagtttgtccagggcaacctggaaagggagtgcatggaggaaaaatgttcgtttgaggaagcacgggaagtgttcgagaacaccgaacgcaccactgaattttggaagcaatatgtggacggggatcagtgcgagtcaaatccttgcctgaacgggggctcctgcaaggacgacattaactcctatgaatgctggtgtccgtttggattcgaaggaaagaactgcgaactcgacgtgacttgcaatatcaaaaatggacgctgcgaacagttttgtaagaattcagccgacaacaaggtggtgtgctcgtgcactgagggctaccggctcgccgagaatcagaaatcgtgtgagcccgctgtgccgttcccatgcggccgcgtgagcgtgagccagacgagcaaactgacccgcgctgaaaccgttttcccggatgtggactacgtgaacagcacggaagcagaaaccattctggacaacatcacgcaatcaactcaatccttcaatgatttcactcgcgttgtcggaggggaagatgcaaagccgggtcaattcccatggcaggtcgtcttgaacggaaaagtcgatgccttctgcggaggatccatcgtcaacgagaagtggatcgtgaccgcagcgcattgcgtggaaaccggagtgaagatcaccgtggtcgcaggagaacacaacatcgaggaaactgagcatactgagcaaaagcggaatgtgattagaattatcccacaccacaactacaacgcagcgatcaataagtacaatcatgatatcgctctgttggaactcgacgagccgctggtgctcaatagctatgtcactcccatctgcatcgcggacaaagagtacactaacatcttcctgaagttcggatccggatacgtctccggatggggaagagtctttcataaaggaagatcggcacttgtcttgcaatacctccgggtgccgttggtcgaccgcgctacttgcctgcggtcgactaagttcactatctacaacaatatgttctgcgcgggattccatgagggcggacgcgattcgtgccagggtgactccggaggcccccatgtgaccgaagtggagggcaccagctttctcaccggtatcatctcgtggggggaagagtgtgcgatgaagggaaagtacggaatctacacgaaagtctcccggtacgtgaattggatcaaggaaaagactaagctcacc

SEQ ID NO: 8845 - DNA, 1383 bp, synthetic construct
  misc_feature 1..1383: note = source = /note="Description of Artificial Sequence: Synthetic coding sequence"
  source 1..1383: mol_type = other DNA
atgcaaagagtgaacatgatcatggccgagtcccctgggttgatcactatctgtttattagggtacctgctgtccgcggaatgtacggtatttcttgatcacgagaacgcgaacaagattctgaatcgacctaagcggtacaactccggaaaattagaggagtttgtgcagggaaaccttgagagagaatgcatggaagagaaatgctcattcgaggaagcccgggaggtgtttgagaataccgagcgtaccaccgagttctggaaacagtacgttgacggtgaccagtgcgagtctaatccttgtctgaatggaggttcatgcaaggacgacatcaattcttacgaatgctggtgcccattcggatttgagggcaaaaactgcgaactcgatgttacatgtaatattaaaaacggtcgctgcgagcagttctgtaagaacagcgccgataataaggtggtatgtagctgcaccgaagggtatcgtctggctgaaaatcaaaagtcttgcgagccggctgtgccattcccctgcggacgcgtgtctgtttctcagacctccaagctaaccagggccgaaacggtttttccggatgtggactatgtgaactccaccgaagccgagacaatcctggacaacatcactcaatcaacacagtcattcaacgacttcaccagagtcgtaggcggcgaagatgccaagcccggccagtttccttggcaggtggtcctcaatggtaaggtcgacgcattctgcggggggagcatcgtcaacgagaagtggatagtcacggctgctcactgcgtcgagacaggagttaaaataaccgttgttgctggtgaacacaacatcgaagagaccgaacacacagagcagaaacgcaatgttataaggattatcccccatcacaattacaatgcagcaattaacaaatacaaccacgatatcgccctgttggaactcgacgagcccctagttctcaattcttacgtgactcctatttgcattgcagataaggaatacactaacatttttctgaagtttggcagcggatacgtttccggatgggggcgggtcttccataagggacggtctgccttagtgctccaatacctgcgggtacccctggtggatcgtgctacttgcctccggagcacaaagttcaccatctataacaatatgttttgtgcgggctttcacgagggcggacgagatagctgccagggggacagtggcggccctcatgtgacagaggtcgagggtacatctttcctaactggaatcatatcatggggagaagagtgcgccatgaagggtaagtacggtatatatacaaaggtctcccggtatgtcaactggattaaggaaaaaaccaagctcaca

SEQ ID NO: 8846 - DNA, 1383 bp, synthetic construct
  misc_feature 1..1383: note = source = /note="Description of Artificial Sequence: Synthetic coding sequence"
  source 1..1383: mol_type = other DNA
atgcagagagtgaatatgattatggcagagagcccaggacttatcactatctgcctcctgggttacctcctgtccgcagagtgtactgtgtttctggaccacgaaaacgctaataagattcttaatcgccctaagcgatacaatagcggcaaactggaagagtttgtccagggaaatcttgaacgtgaatgtatggaggaaaagtgctcgttcgaggaagcacgagaggtgtttgaaaatactgaaagaactactgaattctggaagcagtacgtcgatggtgatcaatgtgaatcgaacccatgtctgaacggtgggtcatgtaaggacgacatcaattcttacgaatgttggtgtccatttggatttgaaggaaagaactgtgaactcgatgtgacttgtaacattaagaacggacggtgtgaacagttttgtaagaactcggcggataacaaggtcgtgtgtagctgcaccgaaggttaccgcctggcagagaaccagaagtcgtgtgaacctgcggtcccttttccctgtggcagggtttctgtctcgcagacctcaaagctgactcgggcagagactgtgttccctgatgtggattacgtgaatagcactgaagccgaaaccattcttgataacattacccaatcgacgcagtcgtttaacgattttacccgcgtggtggggggcgaagatgccaaaccgggccaatttccttggcaagtggtgctgaatgggaaggtggatgcattctgcggcgggagcattgtgaacgaaaagtggattgtgacggcggcacactgtgtggagactggcgtgaaaatcaccgtggtcgcaggggagcataacattgaagagacggaacataccgagcagaagcggaacgtcataaggataattcctcatcacaactacaacgcagcaattaacaagtacaaccacgacatagcgctgctggaactcgatgaacctctggtgcttaattcgtatgtgactcctatatgcatcgccgataaggaatacaccaacatattcctgaagtttggctcaggctacgtgtcgggctggggaagagtgttccataaaggaaggtccgcactcgtgcttcagtacctcagagtgccactggtggatcgggcaacgtgcctcagatcaactaagtttactatttacaacaacatgttttgcgccggcttccacgaaggaggaagggatagctgtcagggagactccggtgggcctcatgtcactgaagtcgaaggaacctcattccttaccggaatcattagctggggagaagaatgtgcaatgaagggcaagtacggtatttacaccaaagtgtcaaggtacgtgaattggattaaggaaaaaactaaacttacc

SEQ ID NO: 8847 - DNA, 1383 bp, synthetic construct
  misc_feature 1..1383: note = source = /note="Description of Artificial Sequence: Synthetic coding sequence"
  source 1..1383: mol_type = other DNA
atgcagagagtgaacatgatcatggctgaatcgccgggactgatcaccatctgtctgcttggatacctcctgtccgcggaatgtactgtgttcctggaccacgagaatgcaaacaagatcctcaataggcccaaacggtacaatagcggaaaacttgaggaattcgtgcagggaaatctggaaagggagtgcatggaagagaagtgctcatttgaagaggcgcgagaagtgtttgagaacacggagagaactacggagttttggaagcagtacgtggatggcgatcagtgcgagtcaaacccgtgtttgaatgggggaagctgcaaggacgacattaactcatacgagtgctggtgtcccttcggattcgagggaaaaaactgcgaactggatgtcacgtgcaatatcaaaaacgggagatgtgaacaattctgcaagaactcagctgataacaaggtggtgtgctcatgcaccgagggctaccgcctggcagaaaaccaaaagtcgtgtgagccagccgtgccttttccgtgtggacgtgtgtcggtgtcccagacctcgaaactcacccgcgctgagactgtctttccggacgtggattacgtgaattccactgaggcagagactatcctggacaacataactcagtcgactcagtccttcaacgacttcaccagagtcgtgggaggggaagatgcaaaaccgggtcaattcccgtggcaggtggtgctcaatggaaaggttgacgccttctgtggaggaagcatcgtcaacgaaaaatggattgtgaccgcggcgcactgcgtggagactggagtgaaaatcactgtggtggccggagagcacaacattgaagaaactgagcataccgaacaaaagaggaacgtgatccggattatccctcatcacaactacaatgcggccattaacaagtacaatcacgacatcgccctgttggaactcgacgaaccgcttgtgctgaactcatacgtgaccccaatctgtattgcagataaggaatacaccaacatattcctgaagttcggctccggatatgtctccggatggggtcgtgtgttccacaagggaagatcagccctggttctccagtacctgagagtgccactcgtggaccgggcgacttgcctccgctcgacgaagtttactatctacaacaacatgttttgcgccggattccacgagggcgggcgggattcctgccagggagactcgggagggccgcatgtgaccgaggtcgaaggaacctccttcctgactggaatcatctcctggggggaagaatgtgccatgaagggaaagtacggcatctacaccaaggtgtcccgctacgtcaactggattaaggaaaagactaagctgact

SEQ ID NO: 8848 - DNA, 1383 bp, synthetic construct
  misc_feature 1..1383: note = source = /note="Description of Artificial Sequence: Synthetic coding sequence"
  source 1..1383: mol_type = other DNA
atgcagcgtgtgaatatgatcatggcagagtcgccaggtctgataaccatctgcctcctcggataccttttgtcggcagaatgtaccgtatttctggaccatgaaaacgccaacaagattcttaatagacctaagcgctataactcgggaaagctggaagaattcgtccaaggaaacttggaaagagaatgcatggaggagaagtgttcctttgaagaggcacgtgaagtgttcgaaaacactgaacgcactactgaattttggaagcaatacgtggatggtgatcaatgcgagtcgaacccttgcctgaacggaggaagctgtaaggatgacataaactcatacgaatgctggtgcccattcgggtttgagggcaaaaactgtgaactggatgtgacttgcaacatcaaaaacggtagatgtgaacaattttgtaaaaactcagcggacaataaagtcgtgtgtagctgtactgaggggtacagacttgccgaaaatcaaaagagctgtgagccggcagtgccgtttccctgtggccgggtttcggtgagccagacctcgaaacttactcgcgccgagacggtgtttcccgatgtcgattacgtgaactcaaccgaggccgaaaccattctcgataacatcacgcagtccactcaaagtttcaatgatttcacccgtgtcgtgggcggggaagatgctaagccagggcagtttccatggcaagttgtgctgaatgggaaagtggacgcgttttgtggaggttcgattgtgaatgagaagtggattgtgaccgcggcgcactgcgtggaaacgggagtgaagatcacggtcgtcgctggagaacacaatatagaagaaacggagcatactgaacagaagcggaatgtgatccgtattatcccacaccacaattacaacgccgccatcaacaaatacaatcacgacattgccttgctggagctcgacgaaccactcgttctcaacagctacgtgacgcctatctgcatagccgacaaggagtacaccaatatcttcctcaagttcgggagcggttacgtctcaggttggggccgagtctttcacaagggtcgatctgcattggtcctgcagtacctgcgagtccccctggtggatagggcgacctgtctgcgtagcaccaagtttactatatacaacaacatgttttgtgcaggatttcatgagggtggtagggactcctgtcaaggtgatagcggaggaccccatgtcactgaagtggagggtacttcctttcttactggcatcatctcatggggtgaagagtgtgcaatgaagggcaagtatggtatctacaccaaggtttcgagatacgtgaattggatcaaggaaaaaaccaagctgact

SEQ ID NO: 8849 - DNA, 1383 bp, synthetic construct
  misc_feature 1..1383: note = source = /note="Description of Artificial Sequence: Synthetic coding sequence"
  source 1..1383: mol_type = other DNA
atgcaaagagtgaatatgattatggcggagtcccctggtcttattactatttgtttgcttggttaccttctttccgcagaatgtaccgtgtttctcgaccatgaaaacgcgaataagattctgaacagaccaaagcggtacaattcaggaaagctcgaagagtttgtccagggcaatctggagcgcgaatgtatggaggaaaaatgctcgtttgaggaagcaagagaagtgttcgagaacacggaaagaaccactgaattctggaaacaatacgtggatggggatcaatgtgaatccaacccttgccttaatggaggatcatgtaaggatgacattaactcttacgaatgctggtgtcccttcggctttgaagggaagaactgtgagctcgatgttacctgtaacatcaaaaatggcagatgcgaacagttctgcaagaactcagcagacaataaggtcgtctgtagctgtactgaaggataccgccttgcagaaaaccaaaagagctgcgagcctgccgtgccctttccctgtggtagggttagcgtgagccaaacttccaaactcactcgtgcagaaaccgtgtttccggacgttgattacgtgaactcgaccgaggcagaaactattctggacaacattacccaaagcacccaatccttcaacgacttcacccgggtcgtcggaggagaagatgcaaagccgggacaatttccttggcaggtggtgctcaacggtaaggtcgacgccttttgcggaggatcgattgtgaatgagaaatggattgtgaccgctgcccattgtgtggaaacgggtgtcaagatcaccgtcgtggccggggagcataacatagaagaaaccgaacacactgagcaaaaaagaaacgtcatccgcatcatcccccaccacaattacaatgccgcaattaacaagtacaaccatgacattgcgctgctggaacttgatgaaccacttgtgcttaactcctacgtgaccccaatatgcattgctgacaaggaatacaccaacattttcctcaaatttggttcgggatacgtctctggttggggccgcgtgttccataagggacgcagcgcacttgtcctgcaatatctgcgggtgcctctggttgatcgggcaacttgtctgaggagcaccaagtttaccatctataacaacatgttctgcgcaggatttcatgaaggtggacgcgattcctgccaaggtgattcgggtggtccccatgtcaccgaggtggagggcacgtccttccttacggggatcatttcctggggtgaagagtgtgctatgaagggaaagtacggtatatacacgaaggtgtcacggtatgtgaactggatcaaggaaaagaccaagctgact

SEQ ID NO: 8850 - DNA, 1383 bp, synthetic construct
  misc_feature 1..1383: note = source = /note="Description of Artificial Sequence: Synthetic coding sequence"
  source 1..1383: mol_type = other DNA
atgcagcgggtgaacatgattatggctgagagcccaggcttaatcaccatttgcttgctaggatatctcctgtccgccgagtgtacagtgttccttgatcacgaaaacgccaataagatcctgaaccgtcctaaaagatacaacagtggcaagctcgaggagtttgtccaaggtaacctagagcgtgaatgtatggaagaaaagtgcagctttgaagaggctcgtgaggtcttcgaaaacacagagcgtaccaccgaattctggaaacagtacgttgacggtgaccaatgtgaatccaacccgtgcctcaacggtggctcatgtaaggacgatattaatagttatgagtgctggtgccccttcggtttcgagggcaagaattgcgagctcgacgtcacttgcaatatcaagaacggacgatgtgaacagttctgcaagaattctgcagacaacaaggtcgtgtgttcgtgtaccgagggttaccggttggccgagaaccaaaagtcatgcgaaccggctgtccccttcccctgtggacgtgtaagcgtaagccagaccagtaagctcacgcgagcagaaacggtgttcccagatgtcgactacgttaactcaactgaggccgagaccattctggacaatatcacacagtcgacgcagtctttcaacgattttacgagagtagtgggtggtgaagatgccaagcccggacagtttccttggcaggtggttctgaacggtaaggtcgacgccttctgtggcgggtcgatagttaatgaaaagtggatcgtcaccgcagcgcactgcgttgagactggtgtgaagatcacagtggttgcaggtgagcataatatagaagaaaccgaacatacagagcagaagaggaatgtcatccggattatacctcatcataattataacgcagcgattaacaagtataatcatgatattgctttgctcgagctggatgagcccttagtacttaattcatacgtgactccgatctgtatcgccgataaggaatataccaacatctttttgaagttcggttctggctacgtgagcggctggggacgtgtgttccacaagggccgcagcgcccttgttcttcaatacttgagagttcccctagtggatcgagcaacgtgtctacgctctactaagtttacgatttacaataacatgttctgtgcaggatttcatgaaggtggtagagactcgtgtcaaggtgactccgggggccctcatgtcactgaagttgaaggtacgagcttcttgaccggcatcatttcttggggcgaagagtgtgcaatgaagggtaaatacggaatctataccaaggtgagccgatacgtgaattggatcaaggaaaaaacaaagctcaca

SEQ ID NO: 8851 - DNA, 1383 bp, synthetic construct
  misc_feature 1..1383: note = source = /note="Description of Artificial Sequence: Synthetic coding sequence"
  source 1..1383: mol_type = other DNA
atgcagcgagttaacatgattatggccgagtcgccaggactgattacaatctgtctgctaggctacttgctatcggcggaatgtacagtgttccttgatcacgaaaatgccaacaagattctgaatagaccgaaacgctataattcgggaaaactcgaagagttcgtacagggaaatttggaacgcgagtgcatggaagaaaagtgctcctttgaagaggcaagagaggtcttcgaaaatacagaaaggactacggagttctggaagcaatatgtagatggagaccaatgcgagtcaaatccctgcctcaatggcggttcatgtaaagatgacattaattcatatgagtgttggtgcccatttggcttcgaaggaaagaattgtgaactcgatgtcacttgtaacatcaaaaatggtcgatgtgaacagttctgcaaaaactctgctgacaataaggttgtttgttcgtgtaccgagggatacagacttgctgagaatcaaaagtcctgcgagccagccgtaccgttcccatgcgggcgagtttcagttagtcaaacatcgaagttaactcgagcagaaaccgtgtttccggatgtcgattatgtaaattctacggaggcagaaactattcttgataatataacgcaatctacacagagctttaatgacttcacccgagtcgttggaggagaagatgcgaaaccaggacaattcccttggcaagttgtgcttaatggaaaggttgatgctttttgtgggggaagtatcgtcaatgagaagtggatagtgacagctgctcattgtgttgaaacgggggtcaaaattactgttgttgctggagaacataacattgaagaaactgaacatacggaacagaaaagaaacgttattcgaatcattccacatcacaattataacgccgcaattaataaatacaatcatgatattgcattattagaactggacgagccactcgtgctcaattcatacgtcacaccaatttgtatcgccgataaggagtatacgaatatctttctaaagtttggatcaggatatgttagcggttggggacgggtttttcataagggcagatctgcattagtattgcaatatctaagagtaccactggtggatcgagctacttgcctacgttcgactaaatttaccatttataataatatgttctgcgccggattccatgagggtggaagagatagttgtcaaggagactcgggcggaccacatgtgaccgaagttgaaggaacaagttttttgactggaattatttcttggggagaagagtgcgcaatgaagggaaaatacggcatttacacaaaagtttcaagatatgtgaattggattaaggagaaaaccaagttaacg

SEQ ID NO: 8852 - DNA, 1383 bp, synthetic construct
  misc_feature 1..1383: note = source = /note="Description of Artificial Sequence: Synthetic coding sequence"
  source 1..1383: mol_type = other DNA
atgcaacgggtcaatatgatcatggccgagtcgcctggactcatcaccatttgcctccttggatacctcctctcggcagaatgtactgtctttctggaccatgagaacgcaaacaaaatccttaacagaccgaaacggtacaattccgggaagctggaagaatttgtgcaaggaaatctggagagggaatgcatggaggaaaagtgctcattcgaagaggctcgtgaggtgtttgagaacaccgaaaggactaccgagttctggaaacagtacgtcgacggggaccagtgtgaatcgaacccttgcctcaacggaggatcgtgcaaggatgacattaacagctacgaatgctggtgtccgttcggcttcgagggcaagaattgtgaactggacgtcacctgcaacattaagaacggacgctgcgagcagttctgcaagaacagcgccgataacaaagtggtgtgcagctgtactgaaggttacagactggccgaaaatcaaaagtcatgtgaaccagccgtcccgtttccgtgtggaagggtatctgtgtctcagaccagcaaactcactcgcgccgagactgtctttcccgatgtggattacgtgaattcaactgaggctgaaaccatcctggataacatcacgcagagtacgcaatccttcaatgatttcactcgggtggtcgggggagaggacgcgaagccaggacagttcccgtggcaagtggtcctgaacggtaaggtggatgcattttgcggtggttccatcgtgaatgaaaaatggatcgtgaccgccgcacactgtgtggaaaccggagtgaagatcaccgttgtggcaggagaacataacattgaggaaaccgagcatactgaacagaagcgaaacgtcattcggataatccctcaccataactacaacgctgcgatcaataagtacaatcacgacattgctttgctggagctcgacgaaccactggtgcttaactcctacgtcaccccaatctgcatcgccgacaaggagtacactaacatctttctgaaatttggatctggatacgtgtcgggctggggacgagttttccataaggggcggtccgcactggtgctgcagtacttgcgcgtcccgttggtggaccgagccacctgccttaggtccacgaagttcaccatatacaataacatgttctgcgcgggcttccacgaaggcggaagagacagctgccagggcgatagcggcggacctcacgtgactgaagtggaaggaacttcgttcttgactgggatcatctcttggggcgaggagtgcgctatgaagggaaagtacggaatctatactaaggtgagcagatatgtgaattggatcaaggaaaagactaaactgacc

SEQ ID NO: 8853 - DNA, 1383 bp, synthetic construct
  misc_feature 1..1383: note = source = /note="Description of Artificial Sequence: Synthetic coding sequence"
  source 1..1383: mol_type = other DNA
atgcagagagttaatatgattatggccgaatctcctgggctgataacaatatgtttgttagggtaccttctgtccgccgaatgtactgtgttcctagatcatgaaaatgccaacaaaattctgaatcgccctaaacggtacaattcaggaaagctggaagaattcgtacagggaaacctcgagagggaatgtatggaagagaaatgctccttcgaagaagctagggaagtatttgaaaacacagaaagaacaactgaattctggaaacagtatgtggatggagatcagtgtgagagtaacccttgcttgaatggggggtcttgcaaagatgatatcaattcctatgagtgttggtgcccttttggatttgaagggaagaattgtgaattagatgtaacatgtaacatcaaaaacggacggtgtgagcagttttgtaaaaattcagctgataacaaagttgtgtgttcctgtacagaagggtatagattagctgaaaaccagaagtcatgcgaacctgccgtaccgttcccttgtgggcgcgtttctgtctcacagacatcaaaactaactagagcagaaacagtgtttccagacgtagattatgtaaactctactgaagccgaaacaatactggataacataacacaatccacacagtccttcaacgactttacaagagtggtggggggagaggacgctaaacccgggcagtttccttggcaggttgtactaaatggaaaggtggatgccttttgtggaggatctatcgtgaatgaaaaatggatcgttacagctgctcattgtgtggagactggggtgaaaattacagtcgtagccggagaacacaacatcgaagagacagaacacacagaacagaagaggaacgtcataaggattatcccccaccataattataacgctgccataaacaaatataatcatgatattgccctccttgagctagatgaaccactcgtgcttaactcttatgtgactcccatctgtatagcggacaaagaatatacaaatattttcttgaaatttggatcgggatatgtttcaggatgggggagagtttttcataaagggagatctgctctcgtattgcagtatctgagggttccccttgtggacagagctacatgtctccggtctacaaaattcacaatttataacaacatgttctgcgccggatttcatgaaggggggagagactcttgtcagggggattcagggggacctcatgtgactgaggtggagggaacttccttccttacagggataatatcctggggagaggaatgcgcgatgaaaggaaaatacgggatatatactaaagtatctcgatatgtgaactggattaaagaaaaaactaaacttaca

SEQ ID NO: 8854 - DNA, 1383 bp, synthetic construct
  misc_feature 1..1383: note = source = /note="Description of Artificial Sequence: Synthetic coding sequence"
  source 1..1383: mol_type = other DNA
atgcagcgggttaatatgatcatggccgaatccccagggctgatcactatctgcttactgggctacctcctgtcagctgaatgcacagttttccttgatcatgaaaatgcaaacaaaatcctcaacagacccaaacgctataatagcgggaagcttgaagaatttgtacagggcaacttggagcgagagtgtatggaagagaaatgttcttttgaggaggcacgagaagtgttcgagaataccgaaagaacgactgaattttggaagcagtatgttgatggagaccagtgcgaatctaacccttgtctgaatggaggcagctgcaaggacgatatcaattcctacgagtgttggtgccctttcggatttgagggaaagaactgtgagctcgacgtgacgtgcaatattaagaatgggcgatgcgagcaattctgtaagaacagcgccgacaataaagtggtatgttcctgcactgaggggtataggctggcagagaaccagaagtcttgcgagccggccgtgcccttcccctgcgggcgtgtatccgttagtcagacttccaaacttacccgtgcggagacagtgtttccagacgtggactatgttaacagcacggaggccgagaccattctggacaatatcacgcagtcgacccagtcttttaacgatttcactagggtggtcggcggagaagacgccaaacctggccaatttccatggcaagtggttctgaacgggaaggtcgacgccttttgtggtggaagcatcgtaaacgaaaaatggattgtcactgccgctcattgcgtcgagacgggagtcaagatcactgtggtggctggagagcacaacatcgaggaaaccgaacatacagaacagaagagaaacgtgatcaggatcattccacaccacaattacaacgcagcaatcaacaaatacaatcacgacattgcactgctggagctcgacgaacccctggtcttgaattcttacgtcacccccatctgcatcgccgataaggaatacacaaatattttccttaagttcgggagcggttatgtgtctggatggggacgtgtgtttcataagggaaggagtgccctcgttttgcagtatctcagggtacctcttgtagaccgagcaacatgcctgaggagcacaaaattcactatctataacaacatgttctgcgctgggtttcatgagggcggacgagactcctgccagggggactctggcggtccccacgtgacagaagtcgagggcacctccttcctgacagggatcattagctggggagaagaatgcgccatgaaggggaagtacggaatttataccaaggtatctaggtacgtcaattggatcaaagagaaaacgaagttgacc

SEQ ID NO: 8855 - DNA, 1383 bp, synthetic construct
  misc_feature 1..1383: note = source = /note="Description of Artificial Sequence: Synthetic coding sequence"
  source 1..1383: mol_type = other DNA
atgcagcgcgtcaacatgatcatggcagaatccccaggactgatcacaatctgtctcttaggctatctgctatctgctgagtgtacagtttttctcgatcatgagaacgcgaataaaatcctgaacagacctaagagatacaattccggcaaactggaggagtttgtgcagggaaacctggaaagggagtgtatggaggaaaagtgcagctttgaggaagctagagaggtttttgaaaataccgaaagaactaccgaattttggaagcagtacgtggacggcgatcagtgtgaatctaacccctgcttaaatggtggttcctgtaaagacgatatcaactcctacgagtgttggtgtccattcggttttgaggggaaaaactgcgaactcgacgtgacgtgcaatattaaaaacggacgatgtgagcaattttgcaaaaattcagccgataacaaagtcgtctgcagctgcacagagggttatagactggctgaaaaccagaaatcctgtgaacccgcagttccctttccatgcggacgtgtttctgtgagtcagacctctaaactgacaagggccgaaaccgtttttcctgacgttgattatgtgaattcaacggaagccgagaccattctcgacaacataacacagtctacacagtcattcaacgactttaccagagtggtcggcggtgaggacgccaaacctggccagttcccatggcaggtggtcctgaatgggaaggtcgatgcattctgtggtggaagcattgtgaatgagaagtggatcgtaactgcagctcactgtgtggaaacgggcgtgaagatcacagtcgtcgcgggcgaacataatattgaggagacggagcatacagagcagaagagaaatgttatccgcataatcccacaccacaactacaatgcagcgatcaacaaatataatcatgacatcgctctgctggagcttgatgaaccccttgtgttgaactcatacgtcactccaatatgcatcgctgacaaggagtatactaatatttttctcaagtttggctctggttacgtgagcggctggggccgtgtgtttcataaaggccgcagcgccttggtgttacagtatcttagggtacccctggtcgaccgggctacctgtctgcgatcaacaaaatttacaatatacaacaatatgttttgcgcgggcttccacgaaggcggtcgagattcctgccagggcgacagcggtggcccgcatgttaccgaggtagagggtacaagttttctcacaggtattatcagctggggagaagagtgcgctatgaagggcaagtacggtatatatactaaagtgagcagatacgtaaactggattaaggagaagacaaagctgaca

SEQ ID NO: 8856 - DNA, 1383 bp, synthetic construct
  misc_feature 1..1383: note = source = /note="Description of Artificial Sequence: Synthetic coding sequence"
  source 1..1383: mol_type = other DNA
atgcaaagggtgaatatgattatggctgagagtcccggccttataacgatatgcctcctcgggtatctcctgagcgctgaatgcaccgtgttcctcgaccatgagaacgctaataagatcctgaatcggcccaagaggtacaacagcggaaaactcgaggaatttgttcagggcaatttggagcgcgagtgtatggaggaaaaatgttcttttgaagaggcccgggaggtcttcgagaacaccgagagaaccactgagttctggaagcagtatgtggatggcgaccagtgtgaaagcaatccttgtctgaacggcggaagttgtaaggacgacatcaatagttacgaatgttggtgccctttcgggtttgaaggcaaaaactgcgaactggacgttacatgcaatataaaaaacggccggtgcgaacaattctgcaaaaattcagccgacaacaaggtcgtctgttcctgcaccgaagggtatagactggcagagaatcagaagtcctgcgaaccggccgtgcctttcccttgtggccgagtttctgtcagtcagacatcaaaactgacacgggctgagacagtgttccccgatgtggattatgtgaatagcacagaggctgaaaccatactggacaatattactcagtccacccaatccttcaacgattttactagagtagtgggaggggaggatgctaaaccaggtcagttcccgtggcaggtggtactgaacggcaaagtcgacgctttttgtggcgggtcaatcgtcaatgagaaatggattgtcacagcagctcattgcgtcgagaccggcgtgaagattacagtggttgcaggggaacataatatcgaggaaaccgagcacacagaacagaaacggaatgttattagaattataccccatcacaattataatgccgcaatcaacaaatataatcacgacatcgcattgctcgaacttgacgagcccttggtcctgaatagttacgtgactcctatctgcattgccgacaaagagtatactaatatcttcctcaagttcggcagtggatatgtatcaggatggggcagagtgttccacaaaggaagaagtgctctggtccttcaatacttgagggttccactggtggacagagctacttgtctcaggtcaaccaagttcacgatttataataatatgttttgtgccgggttccacgaaggggggagggactcttgtcagggcgacagcggtggtccacacgtgacagaagtggagggtacatccttcctgacaggtattatcagttggggagaggaatgcgcgatgaagggcaaatatggcatatatacgaaggtgtcccgctacgtgaattggattaaggagaaaaccaaacttaca

SEQ ID NO: 8857 - DNA, 1383 bp, synthetic construct
  misc_feature 1..1383: note = source = /note="Description of Artificial Sequence: Synthetic coding sequence"
  source 1..1383: mol_type = other DNA
atgcagagggttaatatgattatggcagaaagtcctggtttgattaccatctgtctgctgggctacctgctgtctgcagagtgtacggtctttctagaccacgagaacgcgaacaaaatcctgaatagacccaagaggtacaattccggtaagctcgaggaattcgtgcagggcaacctcgagcgcgagtgcatggaggaaaaatgttctttcgaggaggcacgcgaggttttcgaaaataccgagcgaacgaccgagttctggaaacagtatgtagacggggaccagtgcgagtcgaatccctgcctgaatggagggtcatgtaaggatgacattaactcctatgagtgctggtgtccattcggattcgagggcaagaattgcgagctcgatgttacctgcaacataaaaaacggacgctgcgagcaattttgcaagaatagcgccgacaataaggtggtttgctcctgtaccgagggctaccgactcgccgaaaatcagaagtcctgcgagcccgccgtgcccttcccctgtggccgggtgagcgtcagtcaaacctctaaattgacaagagcagagactgtttttcccgacgtggactacgtgaactctaccgaggccgaaacgatcctcgacaacattactcagagtacacagtcatttaacgatttcactagagtcgttggaggggaggacgccaagccgggacagtttccctggcaggtggttctgaatggcaaggtggatgccttctgcgggggctccatagtgaatgagaaatggatagtcaccgctgctcactgcgtggagactggggtgaagatcaccgtggtcgcaggcgaacacaacattgaggagaccgaacatacggagcagaaacgcaacgtgataagaataatcccacaccataactataacgcagctattaataagtataatcatgacatcgcgctgttagaactggatgaaccgctggtgctcaattcctacgtgacccccatctgcatcgctgataaggagtacacaaatatcttcctgaagttcggttcaggttacgtgagcggctggggtcgggtattccataaggggcgcagtgctctggtgctgcagtacttgagggtcccacttgtcgaccgggcaacctgtttgaggtctacgaaatttactatctacaataatatgttttgtgctgggttccatgagggggggagagattcctgccagggggactctggagggccgcacgttaccgaggtggaggggacttccttcctgactggcataatctcctggggggaggagtgcgccatgaaaggaaaatatggcatctacacaaaggtaagtaggtacgtaaattggataaaggagaagacaaagctaacc

SEQ ID NO: 8858 - DNA, 1383 bp, synthetic construct
  misc_feature 1..1383: note = source = /note="Description of Artificial Sequence: Synthetic coding sequence"
  source 1..1383: mol_type = other DNA
atgcagcgcgtcaatatgatcatggccgaatcgccggggctcatcaccatttgccttctggggtatctgctctccgcggaatgtacggtgttcctggaccacgaaaacgctaataagatcttgaacaggccgaagcgatacaactcagggaagctcgaggaattcgtgcaggggaatctggagagggagtgcatggaagagaagtgtagcttcgaagaggcccgggaggtgttcgaaaatactgaacggactacggagttctggaagcaatacgtcgacggagatcagtgcgagtctaatccctgcctgaacggaggatcctgcaaggacgacatcaattcgtacgagtgttggtgtccatttggtttcgaaggaaagaactgcgagttggatgtgacctgcaacataaagaatggtcgctgcgaacagttttgcaaaaacagcgccgataacaaggtcgtctgctcctgtactgagggataccgtctggctgaaaaccagaagtcgtgcgagcctgctgtgcctttcccatgcggtagagtctcagtgtcacaaacctctaagctgactcgcgctgagactgttttcccagacgtggattacgtgaactcgaccgaagcagaaaccatcctcgataacatcactcagagcacccagagcttcaacgattttacccgcgtggtgggaggagaggatgcaaagccaggccagttcccttggcaagtagtgctcaatggaaaagtggacgccttctgcgggggttctatcgtgaacgagaagtggatcgtcaccgccgcacactgcgtggagactggagtgaaaatcaccgtcgtcgccggtgaacataacatcgaggaaactgagcacactgaacagaaacggaatgtgattcggatcattccacaccataactacaatgccgctattaacaagtacaaccacgacatcgctctcctggaattggacgagccgctggtgctgaattcctacgtcactccgatctgtatcgcagataaggaatacaccaatatcttcctcaaattcggatcgggctacgtctcgggatggggaagggtctttcataaagggcggtcagcccttgtccttcaatacctcagggtgccacttgtggacagagctacctgtctgcggagcactaagttcaccatctacaacaacatgttctgcgccgggtttcatgagggaggccgtgactcgtgccaaggcgactcgggcggaccgcacgtgactgaggtggaaggcaccagtttcctgaccggaatcatttcctggggggaagaatgtgctatgaagggcaagtacggcatctacaccaaagtctctcgctacgtgaactggatcaaagaaaagaccaagctcact

SEQ ID NO: 8859 - DNA, 1383 bp, synthetic construct
  misc_feature 1..1383: note = source = /note="Description of Artificial Sequence: Synthetic coding sequence"
  source 1..1383: mol_type = other DNA
atgcagagagtaaatatgatcatggccgagagcccgggcctgattaccatttgcctgcttggatacctcctaagcgctgagtgcaccgtgtttctcgatcacgagaacgctaacaaaattcttaacagacccaagagatataacagcggaaaactggaagagtttgtgcaggggaacctggagagggagtgcatggaggagaaatgcagcttcgaagaagcccgggaagtttttgaaaacaccgaaaggaccactgagttttggaagcaatacgttgatggcgaccaatgtgagagtaacccgtgtcttaatggaggaagctgcaaggatgacatcaactcatacgaatgttggtgcccattcggattcgaagggaagaactgcgagctggatgtaacctgcaatatcaaaaacggccgctgtgaacagttctgcaaaaacagcgctgataacaaagttgtgtgcagttgcacagaggggtatcgcctggccgaaaaccaaaaatcctgcgaaccagctgttcccttcccatgtggaagagtgtctgtgtctcagacttccaaactcacacgcgccgagaccgtgtttccagatgtggactatgtgaatagtactgaagcagaaaccattttggataatatcactcaatccacacagtcctttaacgatttcactcgcgtggtcggcggagaggacgccaagcctggacagttcccttggcaagtagtcttgaacggaaaggttgatgccttttgcggaggaagtattgtcaatgaaaagtggattgtgaccgccgcacattgcgtggagaccggtgtgaagatcactgtcgtggctggagagcacaatatcgaagaaacagagcacacagaacaaaagagaaacgtgattagaattattccccatcataactacaacgcggctattaacaaatataaccatgacattgctttgcttgagctcgatgagcctttagtccttaacagctatgtaactcctatctgcatcgctgataaggaatacaccaacatttttctgaaattcgggtctggatatgtttctggatgggggcgagtatttcataaagggcgtagcgctttggtgttacagtacttgcgagttcccctcgttgatcgcgccacctgcttgcgcagtacaaagtttaccatttataacaatatgttttgtgcaggatttcatgagggaggaagagattcttgccagggtgacagtgggggaccccacgtgaccgaagtcgagggtacatcttttttgaccggcatcatctcttggggtgaggagtgtgccatgaagggaaagtacggaatctacaccaaggtctcaaggtacgtcaactggatcaaggagaagaccaaactaacc

SEQ ID NO: 8860 - DNA, 1383 bp, synthetic construct
  misc_feature 1..1383: note = source = /note="Description of Artificial Sequence: Synthetic coding sequence"
  source 1..1383: mol_type = other DNA
atgcagcgcgttaatatgatcatggccgagtccccagggctgatcaccatctgcctacttgggtacctgctcagcgccgagtgtactgtgttcttggatcacgagaacgccaataaaatccttaacaggcctaagcgatataattctggaaaattagaagagttcgttcaaggcaacctggagagggaatgtatggaagaaaagtgctcgttcgaagaagctagagaggtcttcgaaaatacagagcgaacaacagaattctggaaacagtacgttgatggcgatcagtgcgagtctaatccttgtcttaacgggggctcttgtaaggatgacatcaattcatatgagtgttggtgcccttttggctttgaaggcaagaattgcgagctcgacgtcacctgcaacatcaaaaatggtcggtgcgagcaattttgtaagaactccgcggataataaggtggtctgctcatgcactgagggctaccggctcgccgagaaccaaaagtcatgcgagccagcagtgccctttccatgtgggcgcgtctccgtgtctcaaaccagcaaactgacaagagccgagactgtcttccccgacgtggactacgtcaattccacggaggcagaaacaatcctggacaacattacccagtctacccagagctttaatgatttcactcgggtggttgggggcgaggatgcgaagcctggacagttcccttggcaagtggtgcttaacggcaaggtggacgccttttgtggcggtagtatagtcaacgagaagtggatagtgacggctgcccattgtgtggagactggcgtcaagatcactgttgtcgcgggagaacacaatatagaggaaacggaacacaccgagcagaagagaaatgtcatcagaattatacctcaccacaactataatgctgccattaacaagtacaaccatgatatcgccttgctggaattggatgagcctttagtactgaatagctacgtcacccctatttgtatcgcggacaaggagtacaccaacatctttttaaagtttggatctggttacgtaagtggatgggggcgggtgttccacaaaggtcgatcagcactggttttacagtatctgcgagtccctctagtcgacagagccacctgcttacgctccaccaaatttactatttacaacaacatgttctgcgcaggattccatgaaggtggccgcgactcctgtcagggcgattctggtggcccgcacgtgactgaagtggaaggcactagcttccttacaggcattatttcgtggggcgaagaatgcgctatgaaaggtaaatacggaatttacaccaaagtgagccggtatgtcaattggattaaagagaagaccaagctgact

SEQ ID NO: 8861 - DNA, 1383 bp, synthetic construct
  misc_feature 1..1383: note = source = /note="Description of Artificial Sequence: Synthetic coding sequence"
  source 1..1383: mol_type = other DNA
atgcagagagtgaacatgatcatggcggagagtcctgggctcattactatttgcctgctcggttatcttctgtccgctgagtgtaccgtctttctggaccacgagaacgctaacaagatacttaaccgacccaagagatataactcaggcaaattggaagagtttgtccaggggaaccttgaaagagaatgcatggaggagaaatgctcattcgaagaggcccgggaagttttcgagaacacagagcgcaccactgagttttggaagcagtatgtcgatggggaccagtgcgagtcaaacccctgcctcaacggcgggagctgcaaagacgacatcaacagctacgagtgctggtgtcctttcggcttcgagggaaagaattgcgagctggatgttacatgcaatatcaaaaacggaagatgtgaacagttctgcaagaattccgccgacaataaagtagtgtgtagctgcaccgagggttatcgcctggccgaaaatcagaaaagttgcgaaccggcggtgccatttccctgcgggagagtcagcgtgtcacagacttctaaactcactcgggctgagactgttttcccagatgtggattatgttaactcaacagaggcggaaactattttggataatataacccagtccacacagtcttttaatgacttcacccgggtggtaggaggtgaggatgccaagccagggcaatttccttggcaagtggtccttaatgggaaagtagatgccttctgcgggggtagcatcgttaacgagaaatggattgttactgccgcccactgtgtggagaccggcgttaaaattacagttgtggccggtgagcataacattgaagaaactgagcatacggagcaaaagcggaacgttatcaggatcattccacatcacaattataatgccgctatcaacaaatataaccatgatattgccttgctggagttagacgaaccactggtccttaactcatatgttaccccaatttgtattgcagacaaagagtatacaaacattttcttgaagttcggatcaggctatgtttccggctggggccgtgtttttcacaagggaagatcggctctggtcctccaatacctccgggtgcccctagtggatagggccacctgcctcagatccactaagttcacaatttacaataatatgttctgcgctggctttcacgaagggggcagagacagttgtcagggcgacagtggaggccctcatgttaccgaggtcgagggaaccagctttctcactgggataatctcatggggcgaggagtgtgctatgaaggggaaatacggcatctacacaaaagtgagtagatatgtcaattggatcaaggagaagacgaagcttaca

SEQ ID NO: 8862 - DNA, 1383 bp, synthetic construct
  misc_feature 1..1383: note = source = /note="Description of Artificial Sequence: Synthetic coding sequence"
  source 1..1383: mol_type = other DNA
atgcagagggtaaacatgataatggccgaatcacccgggttgattaccatctgtttgcttggctaccttctctcagccgaatgcacagtgtttcttgaccatgaaaatgcaaacaagattctgaaccgaccaaaaaggtataatagtgggaaactagaggaattcgtacagggtaatctcgagcgagaatgcatggaagagaaatgtagctttgaggaagcccgtgaggtgttcgagaacacagagcgaacaaccgaattctggaagcaatatgttgatggtgaccagtgcgagagtaacccctgtctgaatgggggaagttgcaaggatgacataaatagctacgaatgctggtgcccttttgggttcgagggcaagaactgcgagctggacgtcacgtgcaacattaagaatgggcgctgcgagcagttttgtaaaaattcagctgacaataaggtcgtttgtagctgcacagaggggtaccggctggcagagaatcagaagtcctgtgaacctgcggtgccctttccctgtggccgcgtgagtgtgtcgcagacctctaagctcacgcgggccgagactgtatttcctgatgtggattatgtgaattctactgaggcagaaaccatacttgacaatataactcagagtacccagagcttcaatgatttcactcgcgtggtggggggcgaggacgccaaacccggacagtttccttggcaggtggtcctcaatgggaaagttgacgctttttgcggcgggagcattgtcaacgagaagtggatcgtgaccgctgctcattgcgtggagacaggcgtgaaaatcacagtagtggccggtgaacacaatatagaggaaaccgagcacactgaacagaaaaggaatgtgattagaattatcccccatcataactacaatgctgctataaataagtataatcacgacattgcattgcttgaactggacgaacctctggtccttaactcctacgttactccaatttgcattgccgacaaagagtacaccaatatttttcttaaattcgggtcgggttacgtgtcggggtggggccgagtgttccataagggccgatccgcactggtgctgcagtatctgcgggttccccttgtcgatcgggctacatgcctgagatccacaaagtttaccatttacaacaacatgttctgtgcaggtttccacgaggggggtcgggattcctgccagggggacagcggaggccctcatgtgacggaagtggaggggactagctttctgacgggtatcatcagctggggggaagaatgcgctatgaagggcaagtatgggatctacactaaggttagcagatatgtgaactggattaaggaaaagactaaactcact

SEQ ID NO: 8863 - DNA, 1383 bp, synthetic construct
  misc_feature 1..1383: note = source = /note="Description of Artificial Sequence: Synthetic coding sequence"
  source 1..1383: mol_type = other DNA
atgcagcgggtgaacatgatcatggccgaaagccctggactcatcacgatctgcctgctggggtatctgctgtctgccgaatgcaccgtgttcctggaccatgagaacgcaaataagatcctgaaccggcctaagaggtacaatagcggcaaactcgaggaattcgtgcaaggaaacctggaaagggaatgcatggaggagaagtgttccttcgaagaagcccgggaagtgttcgaaaacactgaacgcactaccgaattctggaaacagtacgtggacggggaccaatgcgaatcaaacccctgtcttaatggcggaagctgcaaggatgacattaactcgtatgaatgttggtgcccgtttggattcgaaggaaagaactgtgagctcgacgtgacctgtaacattaagaatggacggtgcgaacagttctgcaagaactcggcagataacaaggtggtgtgttcatgtacggaagggtaccggcttgcagaaaatcagaagtcctgtgagccagccgtgccttttccatgtggtcgggtgtcggtgtcccaaactagtaagctgacccgtgctgagactgtctttccagacgtggattacgtgaactcgactgaagctgaaaccatcctggacaatatcactcaatcaacccaatccttcaatgacttcactcgcgtggtgggaggagaagatgccaagcccggccagtttccgtggcaggtggtgctcaacggcaaagtcgatgcgttctgcggaggttcgatcgtcaatgagaagtggatcgtgactgctgctcattgtgtggaaaccggcgtcaagatcacggttgtggccggagaacacaatatcgaggaaaccgaacataccgaacagaaaagaaatgtcatccgcataatacctcatcataactacaatgccgcgatcaacaagtataaccatgacatcgcgttgttggagctggatgagccgctggttcttaattcctacgtcacccctatctgcatcgccgataaggagtacactaatatcttcctgaaatttggctcaggttacgtctcgggatggggacgggtgttccacaagggacggagcgcgctcgtgttgcagtacttgcgcgtgccgctcgttgatagagccacgtgcctgaggtcgaccaagttcaccatctacaataacatgttttgcgctggcttccatgaaggaggacgcgactcgtgccagggagatagcggagggccacatgtgaccgaggtcgaaggcacctcattcctgaccggcattatctcctggggagaggaatgtgcgatgaaaggaaaatacggaatctacaccaaagtgtcgcggtacgttaactggatcaaggagaaaaccaagctgacc

SEQ ID NO: 8864 - DNA, 1383 bp, synthetic construct
  misc_feature 1..1383: note = source = /note="Description of Artificial Sequence: Synthetic coding sequence"
  source 1..1383: mol_type = other DNA
atgcagcgagtgaacatgatcatggcagagtcacctggcctgatcacaatttgcctgctgggctatctgttgtccgcagagtgcactgtgttcctggatcatgaaaatgcgaacaagatcctgaaccggccgaaacgatataattctgggaagctggaagagtttgtgcaaggtaatctagaaagagaatgtatggaagagaagtgctccttcgaagaggccagggaggtattcgagaacaccgagcgcacaactgaattttggaagcagtatgttgatggagatcagtgcgagagcaacccctgcttgaacggtgggagctgcaaggacgacattaatagctatgaatgctggtgcccgttcggattcgagggcaagaattgtgagcttgatgttacttgtaacatcaagaacgggagatgtgaacaattttgtaagaacagcgcagacaacaaggtggtgtgttcatgtacagaaggatatcgtctggcggagaatcagaagagctgtgagcccgccgttccattcccctgtggcagagtgtctgtctcacagacctcgaagcttactcgcgctgagactgtgttcccagatgtcgactatgttaactctacagaggctgaaactattttggataacattacccagtcaacgcaatcgttcaacgacttcacccgtgtggtgggcggggaggatgccaagccgggccagttcccgtggcaggttgtgctgaacggtaaggttgacgcattctgtggtggctctattgtcaacgaaaagtggatagtgacagccgcccattgcgtggagaccggagtgaagatcaccgtggtcgccggtgagcacaacatagaagagactgagcacacagagcagaaacgcaatgtgatacgtatcattcctcatcacaattataatgccgctatcaataaatataatcacgatatagcgttacttgaattggatgaaccactggtgctcaacagttacgttactcccatatgtatagcagacaaggaatacacaaacatattcctaaaatttggttccggctacgtgtcaggatggggaagggtgttccataaaggacgcagtgccctggttcttcaatacctgcgggtgcctctggttgaccgagccacgtgcctaagatccacaaaatttactatttacaacaatatgttctgcgctggattccacgagggcggacgggactcatgccaaggagactcaggcggtccgcatgtaactgaggtggagggcacgtccttccttaccgggattatctcctggggggaggagtgtgctatgaagggtaagtacggaatttatactaaagtgtctagatatgtcaactggataaaagaaaagaccaagctcact

SEQ ID NO: 8865 - DNA, 1383 bp, synthetic construct
  misc_feature 1..1383: note = source = /note="Description of Artificial Sequence: Synthetic coding sequence"
  source 1..1383: mol_type = other DNA
atgcagcgggtgaacatgatcatggctgagtcgccgggcctcatcactatttgcctgttgggatacctgttgagcgctgaatgcactgtgttcctcgaccatgagaacgccaacaagatcctgaacagaccaaaacgctacaactctggcaagctggaggaattcgtgcaaggcaacctggaacgcgagtgcatggaagaaaagtgcagcttcgaggaggctagggaggtattcgaaaataccgagagaactactgagttttggaaacaatacgtcgacggagatcaatgtgagtcgaatccatgccttaatggcggatcctgcaaggacgatatcaacagctatgaatgctggtgccctttcggtttcgaaggcaaaaactgcgagctggatgtaacctgcaacatcaaaaacggtcgctgcgaacagttttgcaagaactccgcggacaacaaagtggtatgtagctgtaccgaaggatacaggttggcggaaaaccagaaaagctgtgagccagcggtcccgtttccctgcggacgggtgtcggtgagccagacctccaagctcaccagggctgaaaccgtgttccctgacgtggactacgtgaattccaccgaggcagagactattctggataacatcacccagtcaactcagtcgtttaatgatttcactagagtcgtgggaggcgaggacgccaagccgggacaattcccgtggcaggttgtcctcaacgggaaagtggacgcgttttgcgggggatccatcgtgaacgaaaagtggatcgtcactgcggcacactgcgtggagactggtgtgaagatcactgtggtcgcgggagagcacaatatcgaggaaaccgaacacaccgagcagaagcgcaatgttatcaggattataccgcaccacaattacaacgcagccatcaacaaatacaaccatgacatcgctctgcttgaactggatgagccgctcgtgctcaacagctacgtgactccaatctgcattgccgataaagaatacacgaatatcttccttaagtttgggtcgggatatgtgtcggggtggggacgggtgttccacaagggccggtctgcactcgtgctgcagtacttgcgggtgcctctggtggacagagcgacctgcctccgttcaaccaagttcacgatctacaataacatgttctgtgccggatttcatgaaggtggacgcgactcatgtcaaggggactcgggcggaccgcatgtcaccgaggtcgaaggcacgtccttcctcaccgggatcatctcttggggcgaagaatgtgcgatgaagggcaagtacggcatctacacgaaggtgtcaagatacgttaactggatcaaggaaaagactaagctgacc

SEQ ID NO: 8866 - DNA, 1383 bp, synthetic construct
  misc_feature 1..1383: note = source = /note="Description of Artificial Sequence: Synthetic coding sequence"
  source 1..1383: mol_type = other DNA
atgcagagggtgaatatgatcatggcggagtcacctggcctgattaccatctgcttgctgggctacctcctgagcgctgaatgcaccgtgtttctggatcatgagaacgccaataaaatccttaacagaccgaaacggtacaacagcggaaagctcgaagagttcgtccaaggaaacctcgagcgcgaatgcatggaggagaaatgctccttcgaggaagcgagagaggtgttcgaaaacaccgagagaaccacggagttctggaagcagtacgtggatggagatcagtgtgagagcaatccctgtctgaacggagggtcgtgtaaggatgacataaactcgtatgaatgctggtgcccgttcggattcgaaggcaagaactgtgaactggatgttacgtgcaacatcaagaacggccgctgtgaacagttctgcaagaacagcgctgacaataaggtggtatgttcctgcaccgaaggctaccgcttggccgagaatcaaaagtcgtgcgaacctgctgtcccatttccatgcggccgcgtgtcagtctcccaaacttcaaaactcacccgggccgagactgtttttccggacgttgattatgtgaactccactgaagccgaaaccatcctggacaacatcactcagtcgacccagtcgttcaacgacttcactcgggtggtgggcggagaggacgcaaagccgggtcaattcccgtggcaggtcgtgctgaacggtaaggtggacgccttctgcggaggatccatcgtcaacgaaaagtggatcgtgactgccgcacattgtgtggaaactggtgtcaagatcaccgtcgtggccggtgaacacaatatcgaggaaaccgaacacaccgaacaaaaaaggaatgtgattcggatcatcccacaccacaattacaacgcggcgatcaacaaatacaatcacgacattgccctgttggagctcgacgagcccctggtccttaattcgtacgtgaccccaatctgcatcgctgacaaggagtacactaatatttttctcaaattcgggtccgggtacgtgtcgggatgggggcgcgtgtttcataaaggaagatcagcactcgtcctgcagtaccttagggtgccgctggtggatcgagcgacttgcctccggagcacgaagtttactatctacaataacatgttctgcgcaggattccatgaaggaggacgcgactcctgccagggtgattctggaggacctcacgtcaccgaagtggagggaacttcgttcctgaccggcatcatctcatggggggaagaatgcgccatgaagggcaagtacggaatttacaccaaggtgagccgttacgtcaactggatcaaagaaaagacgaagctgact

SEQ ID NO: 8867 - DNA, 1383 bp, synthetic construct
  misc_feature 1..1383: note = source = /note="Description of Artificial Sequence: Synthetic coding sequence"
  source 1..1383: mol_type = other DNA
atgcagcgtgtcaacatgattatggctgaatctccaggtcttattacaatttgcttgcttggatacctgctctctgcagagtgcacagtgttcctggatcatgagaacgctaacaaaattttgaataggcccaaacgttacaattctggcaagctggaagagttcgtacagggcaatctggagagggagtgcatggaggagaagtgttcattcgaggaggcaagggaggtctttgagaacactgagcgcactactgaattttggaaacagtatgtcgacggagaccaatgcgaatccaacccctgcttgaacggtggttcttgcaaagacgacattaattcttacgagtgttggtgtcctttcggtttcgagggcaagaattgcgaattggatgtcacctgtaacattaagaacggtaggtgtgagcaattctgtaagaactctgctgacaacaaggtcgtctgttcatgcacagaaggatacaggctcgccgagaatcaaaagtcttgcgaacctgccgtaccatttccctgtggcagagtcagcgtttctcagacctctaaactcactcgtgccgaaactgtgttccctgatgtcgactatgtgaattcaacagaggccgaaacaatcctggataacatcactcagtctacccaatcctttaacgactttacacgtgtcgtcggtggagaagacgccaagcccggtcagttcccttggcaggttgtgctgaacggcaaagtcgatgcattctgtggtggatccatcgtcaacgagaagtggattgtgaccgctgctcattgtgtggaaaccggcgtgaaaatcactgttgtcgctggcgagcataacatcgaggagaccgaacacaccgagcagaaaaggaacgtgatccgcatcatccctcaccataactacaacgctgcaataaataagtacaatcatgacattgcacttctcgagctggacgaaccattggtgttgaatagctacgtgactcccatttgtatcgccgataaggagtacaccaacatctttctcaagttcggcagcggatatgtctccggatggggccgtgtttttcacaaaggccgctctgccctcgtcctccagtacctgcgtgtgcccctcgttgatcgcgctacctgccttcgctctactaagttcactatctacaacaatatgttctgcgctggatttcatgaaggcggtagagactcttgtcagggcgattccggtggtcctcatgtgaccgaggtggaaggcacatccttcttgacaggtatcattagctggggagaggaatgtgccatgaaaggcaagtatggcatctacactaaagtcagtcgctacgtcaattggatcaaggagaagaccaagcttacc

SEQ ID NO: 8868 - DNA, 1383 bp, synthetic construct
  misc_feature 1..1383: note = source = /note="Description of Artificial Sequence: Synthetic coding sequence"
  source 1..1383: mol_type = other DNA
atgcagcgggtgaatatgatcatggctgaatccccgggtctgatcaccatttgcctgctggggtaccttctcagcgccgagtgcactgtgttcctggaccacgaaaacgccaacaaaatcctcaaccggccaaaaagatacaattcgggcaagctcgaggaattcgtgcagggtaacctggaaagagaatgcatggaggagaagtgctcgttcgaagaagctcgcgaagtgttcgagaatactgaacggactaccgaattttggaaacagtacgtcgatggagatcagtgcgaatcgaacccatgcctcaacgggggcagctgcaaggatgatatcaattcctatgagtgttggtgtccgttcggctttgaaggaaagaattgcgagctcgatgtgacttgcaacattaagaacggccgctgcgagcaattctgcaagaacagcgccgacaataaagtcgtgtgctcatgtaccgagggatacaggctggctgaaaaccaaaagtcctgtgagccggccgtgccgttcccgtgcgggcgggtgtcggtttctcagacttcgaaactgactagggccgaaaccgtgttcccggatgtggactacgtgaattcgactgaggcagaaaccatcctggacaatatcactcagtcaacccaatcgttcaacgacttcactcgcgtggtgggaggtgaagatgcgaagcccggtcagttcccgtggcaagtggtgctgaacggcaaggtcgatgcattctgcggcggctccattgtgaatgagaagtggatcgtcaccgcggctcactgcgtcgaaactggtgtcaagatcaccgtcgtggccggagaacacaatatcgaagagactgaacacactgaacagaaacggaatgtgattcgcattatcccacatcacaattacaacgccgcgatcaacaagtacaatcacgacatcgccctgctggaactggacgagccgttggtcctcaacagctacgtcacccccatttgcatcgcagataaggaatataccaatatctttctcaagttcggcagtggatacgtctcgggttggggaagagtgttccataagggccggtcagcactcgtgctccaatacctgcgcgtcccgttggtggatcgcgctacttgcttgaggtcaactaagttcaccatctacaataacatgttctgcgcgggattccatgaaggaggacgcgactcgtgtcaaggggattccggcggaccgcacgtcaccgaggtggaaggaacctccttcctgaccggtatcattagctggggagaggagtgcgcaatgaagggtaagtacggtatctacactaaagtctcgcgctacgtgaactggatcaaggaaaagacgaagctgacc

SEQ ID NO: 8869 - DNA, 1383 bp, synthetic construct
  misc_feature 1..1383: note = source = /note="Description of Artificial Sequence: Synthetic coding sequence"
  source 1..1383: mol_type = other DNA
atgcagcgcgtcaacatgatcatggccgaaagtccaggacttattactatctgtttgctcggctatctgctctccgcagagtgcaccgtctttctggatcatgagaacgcgaacaaaattctgaatcgccctaaacgctacaactcaggtaagctggaggaatttgttcagggtaacctggagcgagaatgtatggaggaaaaatgtagctttgaagaagctagagaagtgttcgaaaacaccgagcgcaccaccgagttttggaaacaatacgtggatggtgatcagtgtgagtcaaatccgtgtctcaatggcgggtcgtgtaaggatgacatcaattcctacgaatgttggtgtccatttggttttgaggggaagaactgcgagctggacgtgacctgtaacattaagaacggccgttgtgagcagttctgtaagaatagcgcagataacaaagtggtctgttcgtgcactgaaggatacagactcgcagaaaaccaaaagagctgtgagcccgcagtgccatttccttgcgggcgggtgtcggtgtctcagacctccaagctcacccgcgccgaaacggtctttcctgacgtcgactacgttaactccaccgaagcagaaactatacttgataacattactcaatctactcagagctttaatgacttcactcgcgtggtcggcggagaagatgcaaaaccaggtcagttcccatggcaggtggtccttaatggaaaagtggacgcattctgtggcgggtccattgtgaatgagaagtggatagtgactgctgcacattgcgtggaaaccggagttaagatcacggtggtggcaggggaacataacattgaagagactgaacataccgaacaaaagcgaaatgtgattagaataatccctcaccacaactacaatgcagcaatcaacaagtacaatcacgatattgctctgttggaactggacgaaccattggtgctgaattcgtacgtcaccccaatctgtatcgcggacaaggaatacaccaacatctttcttaagtttggaagcggttacgttagcggttggggccgcgtgttccataaaggcagatccgcgcttgtcctccaatacttgcgcgtcccactggtggatcgcgctacgtgtcttaggtcaaccaagtttaccatttacaacaatatgttttgtgccggatttcatgagggcggaagagacagctgccaaggggactcgggcgggccccacgtaactgaagtcgaaggtactagcttccttacggggattatcagctggggcgaagaatgcgctatgaagggaaagtacggaatctacactaaagtgtcaagatacgtgaattggataaaagaaaagactaagctgacc

SEQ ID NO: 8870 - DNA, 1383 bp, synthetic construct
  misc_feature 1..1383: note = source = /note="Description of Artificial Sequence: Synthetic coding sequence"
  source 1..1383: mol_type = other DNA
atgcagagagtgaatatgatcatggctgaatcccccgggttgatcactatttgtctgcttggatatctcctttccgcagaatgcactgtctttctcgatcatgaaaatgccaacaaaatcttgaacaggcctaagaggtataactcaggaaaactcgaagaattcgtccaggggaatctggagagagaatgcatggaagaaaaatgttcattcgaagaagctagggaagtgtttgaaaacacagaacggacaactgagttttggaaacagtacgttgatggagatcagtgtgaatcaaacccctgcctgaatggaggatcttgcaaggacgatataaattcctacgaatgttggtgtcccttcggatttgaagggaagaactgcgaattagatgttacttgtaacatcaagaatgggaggtgtgagcagttttgtaaaaattcagctgataacaaagtcgtctgttcttgtactgaaggatatcggctcgccgaaaatcagaaatcttgcgaacctgctgtgccatttccatgtggaagagtctcagtatcccagacaagtaaattaactagggccgagacagtgttcccagatgtggattacgtcaattcgactgaagccgaaactatacttgataatatcactcagtcaactcagtctttcaatgattttacacgcgtggtgggaggggaggatgccaaacccgggcagttcccttggcaggtagtgttaaatggaaaagtcgatgctttctgtggagggtccatcgtcaacgaaaaatggatcgtcacagctgcacattgcgtggaaactggggtgaaaataacggtagtggctggagagcataatatcgaagaaacagagcacactgagcagaaacggaacgttatacgaatcatcccacatcacaactacaacgccgcaattaacaaatataatcacgacatagcccttctagaactcgatgaaccactggtgcttaattcctatgtgactcctatctgcatagccgataaggaatatacaaatattttcctcaagttcggatccgggtatgtctctgggtgggggcgagtgttccataaagggagatctgctcttgtgctccagtacctacgggtgcctctcgtagatagagccacttgtctcaggagtactaaattcactatatataacaatatgttctgtgctggatttcatgaagggggaagggattcatgtcaaggagattccgggggacctcacgtgactgaagttgaaggaacttcgttcctcacagggattatatcttggggagaggaatgcgcaatgaaagggaaatatggaatttatacaaaagtctcccggtatgtcaattggataaaagagaagactaaactcaca

SEQ ID NO: 8871 - DNA, 1383 bp, synthetic construct
  misc_feature 1..1383: note = source = /note="Description of Artificial Sequence: Synthetic coding sequence"
  source 1..1383: mol_type = other DNA
atgcagcgcgtcaatatgatcatggctgaaagcccgggcctcattaccatctgcctgctgggatacttgctttccgcagagtgtaccgtctttcttgaccatgagaatgccaacaagatactcaatcggccgaagcggtacaactcgggaaagctcgaggaattcgtgcagggaaatctggaacgcgagtgcatggaagagaagtgttcattcgaagaggcacgggaagtgttcgaaaacaccgaacggacgactgagttttggaagcagtacgtggacggcgatcaatgcgagtcgaacccttgcctgaacggcggcagctgcaaagatgatatcaacagctacgaatgttggtgccctttcggttttgaaggtaagaactgcgaacttgacgtgacctgcaatatcaagaacggaaggtgcgagcagttctgcaaaaactccgctgacaacaaggtggtgtgttcctgcactgaaggttatcgcctggccgaaaaccagaagtcctgcgagccagccgtgccgttcccttgtggacgtgtgtcggtgtcccagacctcgaagctcacccgtgctgaaactgtgtttccggacgtggattacgtgaactcaactgaggccgaaactattctggacaacatcacccagtccacccagtcgtttaatgacttcactcgggtcgtcggtggggaggatgcgaagcctgggcaattcccgtggcaagtggtgctcaatggcaaggtggatgccttctgcggaggttcgatcgtgaacgagaaatggattgtgactgccgcgcattgtgtcgagactggagtcaaaatcacggtggtggcgggcgaacacaatatcgaggagactgaacataccgaacagaagcgcaatgtcattcggatcatccctcaccacaactacaatgccgcgatcaataagtacaaccacgatatcgcgctgcttgagctggacgaaccattggtcctgaactcgtacgtgacgccaatctgcatcgcggacaaggagtacacgaacatcttcctgaagttcgggtccggatacgtgtcgggctggggccgcgtgtttcacaagggccgcagcgcactggtgctccaatacctcagggtcccgctcgtggaccgggcaacttgccttcggtccaccaagttcaccatctataacaacatgttctgcgccggattccacgaaggggggcgcgattcctgccagggcgactcaggtggcccgcacgtgaccgaagtcgaaggaacgtccttcctcaccggaatcatttcatggggcgaggagtgcgctatgaagggaaagtacgggatttacacgaaagtgtcacggtacgtcaattggatcaaggaaaagaccaagctcacc

SEQ ID NO: 8872 - DNA, 1383 bp, synthetic construct
  misc_feature 1..1383: note = source = /note="Description of Artificial Sequence: Synthetic coding sequence"
  source 1..1383: mol_type = other DNA
atgcaacgggtgaacatgattatggctgagagccccggcctgatcacaatatgtctccttgggtacctgctgagcgctgaatgtaccgtattcctagaccacgaaaatgccaataagattttaaaccggccgaaaagatacaactctgggaaactggaagagttcgttcaaggcaatcttgaacgcgaatgtatggaggagaagtgctctttcgaggaggcaagggaggtatttgagaacaccgagcgcaccaccgagttctggaagcagtatgtggatggggatcaatgtgagtcaaatccgtgtctgaacggtggatcttgcaaagacgacattaacagctacgaatgttggtgccctttcggctttgagggaaagaattgcgagttagatgtgacatgtaacataaaaaatggacggtgcgaacagttttgtaaaaactcggccgataataaagtggtatgttcctgcaccgaggggtacaggcttgctgagaaccagaagagctgtgaacccgcagtgcctttcccctgcgggagagtcagtgtgtctcagacctccaaactgaccagagcagagacagttttcccggacgtggactacgtcaacagcactgaggcagagaccatcctggacaacataactcagagcactcagagtttcaatgactttaccagagtggtaggcggagaggatgctaagccgggccagtttccatggcaggtggtcctgaacggtaaagtggatgccttttgtgggggctccatcgtgaacgaaaagtggatcgtaaccgcggcccactgtgtagagaccggcgtaaaaataacagtggtcgccggggagcataacatcgaagagaccgagcacacagagcaaaaacggaacgtgatcagaattatacctcaccacaactataatgcggccatcaataagtataaccatgacatcgcactgctggaactggacgaaccactggtgctcaatagttacgtgactcctatttgtatcgccgacaaggaatacacaaatatttttctgaagttcggcagtggttacgtgtccggatggggacgtgtcttccataaaggaaggagcgcccttgttctccaatacctgagagtgccacttgtagaccgcgcgacttgcctacgaagtaccaagttcacaatctacaacaacatgttttgcgctggatttcatgagggcgggcgggactcctgccagggagatagcggaggcccgcacgtcacagaggtcgagggtacttcattccttactggcatcataagctggggagaggaatgcgccatgaagggcaagtacggcatttatacaaaggtaagtagatacgtcaactggatcaaagaaaaaacgaaattaaca

SEQ ID NO: 8873 - DNA, 1383 bp, synthetic construct
  misc_feature 1..1383: note = source = /note="Description of Artificial Sequence: Synthetic coding sequence"
  source 1..1383: mol_type = other DNA
atgcaacgtgttaacatgattatggcagaaagtccaggacttataacaatatgccttcttggatatcttttatcagcagaatgtactgtgtttcttgatcatgaaaatgctaacaagattttgaatagacctaaacgttataactctggaaaattagaagaatttgttcaaggaaatcttgaaagagaatgtatggaagaaaaatgttcatttgaagaagctcgtgaagtttttgaaaatacagaaagaacaactgaattctggaaacaatatgttgatggagatcaatgtgaaagtaatccatgtttgaatggaggatcatgtaaggatgacatcaattcatatgaatgttggtgtccatttggttttgaaggaaaaaattgtgaattagatgttacctgtaatataaaaaatggacgttgtgagcaattttgtaaaaactcagcagataataaggttgtttgttcatgcacagaaggatatagattagcagaaaatcaaaaaagttgtgaaccagcagttccatttccttgtggaagagtatcagtatcacaaactagtaagttaacaagagcagaaactgttttcccagacgttgattacgttaattccacagaagctgaaactattttagataatattacacaaagtacacaaagttttaatgattttactcgtgttgtaggaggggaagatgcaaaacctggacaatttccatggcaagttgttcttaatggaaaagttgatgcattttgtggtggaagtattgttaatgaaaaatggattgttacagctgcacattgcgttgaaacaggtgttaaaataactgttgttgctggagaacataatattgaagaaacagaacatacagaacaaaaaagaaatgtaatacgaattattccacaccataattataatgctgctattaataaatataatcatgatatagcattgttagaactagatgaacctttagttttgaattcttacgttactcctatttgcattgctgataaagaatatactaatatctttcttaaattcggaagtgggtatgtttcaggttggggtagagtatttcataaggggcgttcagctttagtattacaatatttaagagttcctttagttgatagagctacatgccttagaagtacaaagttcacaatttataataatatgttttgtgcaggtttccatgaaggaggtagagattcatgtcaaggagatagtgggggaccacatgtcactgaagtagaaggaactagttttttaactggtataatttcatggggagaagaatgtgctatgaaaggaaagtatggaatatacactaaggtgtcacgttatgttaattggattaaggaaaaaacaaaactaaca

SEQ ID NO: 8874 - DNA, 1383 bp, synthetic construct
  misc_feature 1..1383: note = source = /note="Description of Artificial Sequence: Synthetic coding sequence"
  source 1..1383: mol_type = other DNA
atgcagagagtgaatatgattatggcggaatcgcctggcctgataactatttgccttcttgggtacctcttgtccgccgagtgcaccgttttccttgaccatgaaaatgcaaacaagattctgaataggccgaaaagatacaactcaggcaaattggaggagtttgtgcagggaaatcttgagagagaatgcatggaggagaagtgttcgttcgaagaggcccgcgaggtctttgaaaatactgagaggactactgagttctggaagcagtatgtcgacggggaccaatgtgagtccaacccttgtctgaatgggggcagctgtaaggacgatatcaattcatacgaatgttggtgcccctttggttttgaagggaagaattgtgaacttgacgttacgtgtaacattaagaatggacgttgcgagcaattctgcaagaactccgcagataacaaggtcgtgtgctcctgtactgaaggttaccggctggctgagaaccagaagagctgtgagcccgctgtgcctttcccatgtggccgcgtgagtgtttcgcaaaccagtaagttgactagagcagaaaccgtgtttcccgatgtggattacgtgaactctactgaagccgagacgatccttgataacataactcagtcgacccagagcttcaatgattttacgcgggtcgtgggtggagaggacgcaaaaccaggacaatttccttggcaggtcgtgctgaacgggaaagtggatgccttttgcggtggatcgatcgtgaacgaaaaatggatcgtaaccgcggcgcattgtgtcgaaacgggcgtgaagataaccgtggtcgcaggggaacataacatagaggaaacggaacacaccgaacaaaagcggaatgttattcgcattatcccacaccacaactacaacgcggctattaacaagtacaaccatgatatcgcccttctcgagctggacgaacccctggttcttaacagctacgtgacgccaatctgtatcgcagacaaggaatacactaacatatttctcaagtttggtagcggatatgtctcgggatggggtagggtgtttcataaggggagaagcgccctcgtgctccagtacctgcgcgtgcctctcgtggatcgcgcaacctgtctgaggtcgaccaagtttactatctacaataacatgttttgcgcaggcttccacgaaggcggtcgggattcgtgtcagggtgattcaggtggccctcatgtgactgaagtggaagggacctcttttctgactggtatcatttcatggggagaggaatgcgcaatgaagggcaagtacggaatttacactaaagtctcgcgatacgtgaactggattaaggaaaaaaccaaactgacc

SEQ ID NO: 8875 - DNA, 1383 bp, synthetic construct
  misc_feature 1..1383: note = source = /note="Description of Artificial Sequence: Synthetic coding sequence"
  source 1..1383: mol_type = other DNA
atgcagagggtaaatatgataatggccgagtcccccggtttgataacgatttgtttgctcgggtaccttctgtctgcggagtgcacagttttcctggatcatgaaaacgcgaacaagattctaaaccgacccaaacgatacaactctggcaagctggaggagttcgttcagggaaaccttgaaagggagtgtatggaagaaaaatgctccttcgaggaagcgagagaggttttcgaaaacacagaacgtactactgagttttggaagcagtacgtggacggcgaccagtgcgagagtaacccctgcttaaacggaggctcctgcaaagatgatattaactcatacgaatgttggtgcccatttggattcgagggcaagaattgcgaattggatgtgacctgcaacataaaaaacgggaggtgcgaacagttctgtaagaattcagccgataacaaggtggtctgttcatgtaccgaaggctaccgactggcagagaatcagaagagttgtgagcctgccgtcccattcccctgcggcagagtgagcgtctcccagacgagcaaacttacacgggctgagacagtcttccccgatgtggattatgtcaactccaccgaggcagaaacaattttagacaacattacacagtctacccagtcgtttaatgacttcactcgagtcgtcggaggggaagacgctaaaccaggccagtttccctggcaagtggtgttgaatggcaaagtagatgcattttgtggtggatcaattgtaaatgagaagtggatcgttaccgccgcccactgcgttgaaactggagtcaagatcactgtggttgctggggaacataacatagaagaaacggaacacaccgagcagaaaaggaatgttattcgaataattcctcatcacaactataatgcagcaattaacaagtataatcacgacatcgcactactggagctcgatgagccactcgttctaaactcgtacgttacgcctatatgcatagctgataaagaatatacaaacattttccttaaattcggaagtggctatgtgtccgggtggggcagggtgttccacaagggacgtagcgcgctggtcctgcagtacttgagggtgccattggtcgacagagccacctgcctgaggtcgaccaaatttaccatttataacaatatgttttgcgccgggtttcatgagggcggcagagatagctgccagggagacagcggcggtcctcacgtaaccgaagtcgagggcacttcattcctgacaggtattatttcttggggggaggaatgtgctatgaaggggaaatatggcatctacacaaaagtcagtaggtacgtgaattggatcaaagaaaaaacaaagctcact

SEQ ID NO: 8876 - DNA, 1383 bp, synthetic construct
  misc_feature 1..1383: note = source = /note="Description of Artificial Sequence: Synthetic coding sequence"
  source 1..1383: mol_type = other DNA
atgcagagagtcaatatgatcatggccgagtcacccgggctgataaccatctgccttctgggatacttgctgtccgccgagtgcaccgtgttcttggaccacgagaatgcaaacaagattctgaatcgccccaaaaggtacaatagcggaaagctggaagagttcgtgcagggaaacctggaacgtgaatgcatggaggaaaagtgctcgttcgaagaggcgagagaggtattcgagaataccgaacggaccactgaattctggaagcagtacgtggatggggaccagtgcgagtcgaacccttgtctgaacggcggatcctgcaaggacgacatcaacagctacgaatgttggtgtccgttcggatttgaaggaaaaaactgtgagctcgatgtcacttgcaacatcaagaacggacgctgcgagcagttttgcaagaattcggcggacaacaaggtggtgtgctcttgtacggaaggatatcgcctggctgagaaccagaagtcatgcgagcctgccgtgccgtttccgtgcggcagggtgtcggtgagccagacctcgaagttgacccgcgcagagactgtgttccccgacgtggactacgtgaactcaacggaggcagaaactatcttggataacatcactcagtcgactcaatcattcaacgacttcacccgggtggtcggaggcgaagatgccaagccaggacagttcccgtggcaagtcgtgcttaacggcaaggtcgatgccttttgcggcggaagcatcgtgaacgaaaagtggatcgtgaccgccgcgcactgtgtggaaaccggagtcaaaatcaccgtggtggcaggcgaacacaatatcgaggaaaccgaacacaccgaacagaagcgcaatgtgattcgcatcatcccacatcacaactacaacgccgccatcaacaagtacaaccatgacattgccctcctcgagctcgatgaacccctggtgctgaactcctacgtgaccccaatctgtatcgctgacaaggaatacaccaacatcttcctgaagtttgggtccggctacgtgtctggttggggtcgggtgttccataagggtaggagcgcgctggtgctgcagtacctgcgcgtgccactggtggatcgagccacttgcctgcgctcgaccaagttcaccatctacaacaatatgttctgcgcgggcttccatgaaggcggacgggattcatgtcaaggggactccggaggacctcatgtgaccgaggtggagggcaccagcttcctcaccgggatcatttcctggggagaggagtgcgcgatgaaaggcaaatacggaatctacactaaggtgtccaggtacgtgaactggatcaaggaaaagacgaaacttacc

SEQ ID NO: 8877 - DNA, 1383 bp, synthetic construct
  misc_feature 1..1383: note = source = /note="Description of Artificial Sequence: Synthetic coding sequence"
  source 1..1383: mol_type = other DNA
atgcagagagttaacatgatcatggcagagagtcccgggctgatcactatctgcctgctgggctacctcctgagcgcggaatgcacagttttcttggatcatgagaacgccaataagatcctgaaccggccaaaacgctacaatagcggcaaactagaggagttcgtccagggtaatctggagcgtgagtgcatggaggagaagtgcagttttgaagaggcacgagaggtattcgagaacaccgagcggacaacggaattctggaagcagtatgtagacggcgatcagtgcgagtcaaatccctgcctaaacggcggatcctgcaaggatgatatcaacagctatgaatgctggtgcccgttcggttttgagggcaaaaattgcgaattggatgtgacgtgcaacataaaaaatggccgctgcgagcagttttgcaagaatagcgccgataataaggtggtgtgttcttgtacagagggttaccgtcttgcggaaaatcagaagagttgcgagccggctgtaccatttccgtgcggacgcgtgtcagtgtcacagaccagcaagctgactagagctgagaccgtattcccagatgtcgattacgtgaattcaacagaggccgaaactatcctggacaatattactcagtccactcagagcttcaatgactttacgcgcgtggtggggggcgaggatgcaaagccgggccagtttccctggcaggtcgtcctgaatggaaaagtggacgccttctgtggcggaagcatcgttaatgagaagtggattgtgaccgccgctcactgcgtggaaacaggggtgaaaattaccgtggtggccggcgagcacaatatcgaagaaaccgagcacaccgagcaaaagcgaaatgtgatacgcattattccacaccataactacaacgcagcaattaataagtacaaccatgacatcgccctgctcgagctggatgagcccttggtcctgaattcgtacgttacgcctatttgcatagcggacaaggagtacaccaatattttcctaaagtttggttcgggttacgtgtcgggctggggacgagtttttcacaagggacgctccgccctggtcctgcagtacctgcgcgttcccctcgtggacagagccacctgcctccgaagtaccaagtttaccatttacaataacatgttctgcgctggctttcacgagggcggacgtgatagctgccagggtgattccgggggaccccatgtaacagaagtggaaggcacgtccttcctaactggcattatatcgtggggagaagagtgcgcgatgaagggaaagtatggaatatacaccaaagtctcgcgctacgtgaattggattaaggaaaagactaagctgacc

SEQ ID NO: 8878 - DNA, 1383 bp, synthetic construct
  misc_feature 1..1383: note = source = /note="Description of Artificial Sequence: Synthetic coding sequence"
  source 1..1383: mol_type = other DNA
atgcagagagttaacatgatcatggctgagtcccctggactcatcaccatttgcctattggggtacctcctgagtgcagagtgcaccgtgttcctggaccatgagaatgccaataaaattttgaaccgtcccaaaaggtacaactccggcaaactagaagaattcgtgcaaggtaacctggagagagaatgcatggaggagaagtgcagtttcgaagaggctcgagaggttttcgagaacaccgaaaggacaactgaattctggaagcagtatgttgacggagatcagtgtgagagcaatccttgcctcaacggcgggtcttgtaaagacgatattaatagctacgaatgctggtgcccctttggcttcgaaggcaagaattgtgaactcgacgtgacgtgcaacatcaagaatggccgatgcgagcagttttgcaaaaattcagctgataacaaggtcgtttgctcatgcacggagggttaccgactggcagagaaccagaagagctgcgaaccggcagttccgtttccgtgcggacgtgtgagcgtctcccagaccagcaagttaaccagggcagagacagttttccccgacgtggattacgtcaacagtactgaggcagaaaccatactggacaacatcacacaatccacccagtcattcaacgacttcacccgtgtagtgggcggagaagacgcaaagcctggccaattcccctggcaagtcgtcctgaacggaaaggtggacgcgttctgcggaggttcaatcgtgaacgagaagtggatcgtcacggccgctcattgcgttgagactggcgtgaaaataaccgtggtggcaggggaacacaatatagaagagacagaacatacggaacagaagagaaatgtcatccggatcattccccaccacaattataacgctgccattaacaagtacaaccacgatattgcactcttagagctggacgagcctctcgttctaaatagctacgttacaccaatttgcattgctgataaagagtacacgaacatcttcttgaaattcggctcaggttacgtgtccggctggggcagagtttttcacaaaggaagatcagctctggtgctgcagtaccttcgtgtgcctttggttgatcgtgccacttgcctaagatccactaagttcaccatctataataacatgttctgcgcaggctttcacgagggcgggcgggattcctgccagggagactctggaggtcctcacgtgacagaggtggaaggtacttcgttcctcacaggcataataagctggggagaagaatgcgcaatgaagggtaagtatgggatttacaccaaagtgtctcgctacgttaactggattaaggaaaaaacaaaactgact

SEQ ID NO: 8879 - DNA, 1383 bp, synthetic construct
  misc_feature 1..1383: note = source = /note="Description of Artificial Sequence: Synthetic coding sequence"
  source 1..1383: mol_type = other DNA
atgcaacgcgtgaatatgatcatggccgagtcgcctgggttgataacgatttgtctgctgggatacctgctctccgcggagtgtactgtgtttctggatcatgagaatgcgaacaaaattctgaacagacctaaacggtacaatagcggtaaattggaggaattcgtgcaaggaaatctcgaacgagaatgcatggaagagaagtgctcattcgaagaagcaagggaggtgttcgaaaataccgagcgcacgactgaattctggaagcaatacgtcgacggagatcaatgtgagtccaatccatgcctcaacggagggtcctgcaaggatgacatcaattcatacgaatgttggtgtccatttggattcgaaggaaaaaactgcgagctcgatgtgacctgcaacatcaagaacggacgctgcgagcagttttgtaaaaactccgcagacaacaaggttgtgtgtagctgtactgaagggtacagactggcagagaaccagaagtcctgtgaaccagcagtacctttcccctgtggcagagtgtccgtatcgcagacttcgaagctgactcgggctgagactgtctttcctgatgtggactacgtgaactcgaccgaagcagagactattcttgataacataacgcagtccactcaatcattcaacgattttaccagggtggtgggaggtgaagatgctaagccgggacaatttccctggcaggtcgtgctgaacgggaaggtggatgctttttgtgggggatctattgtcaacgaaaagtggatagtgaccgcagcccactgcgtggagactggtgtgaagattactgtggtggccggtgaacataacattgaagaaactgagcataccgaacaaaaaaggaatgtaattcgtatcatcccacatcataactacaacgcagcgattaacaagtacaatcacgacatagcccttcttgaacttgatgagcctctggtgcttaactcgtatgtgacccccatttgcatcgcagacaaggaatacaccaatatctttctcaagtttggcagcggatacgtgtcggggtggggacgggtctttcataagggccgttcggccctggtgctccaataccttagagtgccacttgttgatagagcaacctgtcttagatctacgaaattcaccatttacaataacatgttctgtgctgggtttcacgaagggggccgggacagctgtcagggggattcaggtggtcctcacgttaccgaagtcgaaggcacgtcgtttcttaccggaattatcagctggggcgaagagtgtgcaatgaaaggaaagtacggtatctacactaaagtttcacgatatgtcaattggataaaggaaaagacgaagctcacc

SEQ ID NO: 8880 - DNA, 1383 bp, synthetic construct
  misc_feature 1..1383: note = source = /note="Description of Artificial Sequence: Synthetic coding sequence"
  source 1..1383: mol_type = other DNA
atgcaaagagtgaatatgataatggctgaaagccccggattaatcacaatttgccttcttggctacctgctaagcgccgaatgtaccgtcttcctggatcacgagaacgctaataagatactgaaccgacccaagcgctacaatagtggtaagctggaagagttcgttcagggtaacttggaacgagagtgtatggaagaaaagtgcagttttgaggaggctagggaggtatttgagaatacagagcgaacaacagagttctggaaacaatatgtggatggggaccaatgtgaaagcaatccctgcttaaacggcggctcatgtaaagacgatataaacagctatgaatgttggtgtccctttggattcgagggaaaaaattgcgaactcgacgtgacatgcaatatcaagaacgggcggtgcgaacagttttgtaaaaacagcgcggacaacaaagtggtgtgttcgtgtacagaggggtacagactggcagagaaccaaaagtcttgtgagccagccgtgccctttccttgcggacgggtgagcgtgtcacagacatcgaaactgacgcgggcggaaacagtgttcccggatgtggattacgttaattctaccgaagctgaaaccatactggataacattacacagtccacacagagcttcaacgactttactcgggtggtgggaggagaagacgccaaacctggacagttcccctggcaggtggtgctcaatggaaaagtcgacgccttctgtggaggttctatcgtgaatgagaagtggattgtcaccgcagcccactgtgttgaaacaggggtgaaaattacagtcgtagccggcgagcataacatagaggagactgaacacacagagcagaagcgaaacgtaataagaatcattccacaccacaactacaacgctgcaattaataagtacaaccacgatatcgccctgcttgaactagacgaacccctcgtgcttaactcctacgttacgcccatctgtattgccgataaagagtataccaatatcttccttaagtttggctctgggtacgtgtcggggtggggcagagttttccacaaggggcgttcagccctggtgttgcagtacctccgcgtgcctctggtcgatcgggcaacatgcctaagaagcactaagttcaccatttacaataatatgttctgcgcggggttccacgaagggggacgcgatagctgccaaggggattccgggggaccacatgtgaccgaggtggaaggaacctccttcctcaccgggattataagttggggggaagagtgtgccatgaagggaaagtatggcatatacacgaaggtctcgagatacgtgaactggatcaaggaaaaaaccaagctaact

SEQ ID NO: 8881 - DNA, 1383 bp, synthetic construct
  misc_feature 1..1383: note = source = /note="Description of Artificial Sequence: Synthetic coding sequence"
  source 1..1383: mol_type = other DNA
atgcagcgcgtcaatatgatcatggctgagtctccaggtctgataaccatctgcctccttggatatttattatccgctgagtgtaccgttttcctggaccatgagaatgccaataagattttaaaccgacctaagaggtataacagtggcaaactcgaagaatttgtgcaaggaaacttggaaagagagtgcatggaggaaaaatgttcgttcgaagaagcccgggaggtgtttgaaaatactgagcgaactactgaattctggaaacagtatgtggacggcgatcaatgcgaaagcaacccttgcctgaacggcggctcttgtaaagacgacataaactcttatgagtgttggtgcccctttggcttcgagggcaaaaactgtgagctcgacgtgacttgtaatatcaaaaacggaaggtgcgaacagttttgcaagaatagtgcagacaataaggtggtgtgctcctgcaccgagggttaccggttagccgaaaatcagaagagttgcgaacccgcggtgccctttccttgtggacgcgtcagtgtcagccagaccagcaaactcacccgcgccgagacagtgtttcctgatgtggattatgtgaatagtacggaggctgagacaatacttgacaatatcacacagtcaacccagagcttcaatgactttaccagagtcgtaggcggagaggacgcaaaacccgggcaatttccttggcaggtggtgctcaatggtaaggtcgacgctttctgcggtggctctatagtcaacgaaaagtggatcgtcacagcggcacactgtgtcgaaacaggagtgaaaattacggtggtggccggtgagcacaatattgaagaaacagaacatacagagcaaaagcggaacgtcatacgaatcatcccacatcacaattataacgccgccattaataagtacaatcatgatatagcgctgctcgaacttgacgaacccctcgtcctcaactcatacgtaacacctatctgtattgccgacaaagagtacactaatattttcctgaaattcggaagcggctacgtctctggttgggggagagtctttcataaggggcgatcagccttggtgctccaatacctccgggtccctctcgttgatagagccacctgcttgcgctccaccaagttcacaatctacaataatatgttctgcgcaggattccatgagggaggcagagatagctgccaaggggattctggcgggccccacgtgactgaagtcgaaggaacttcctttttgactggcataattagttggggagaagagtgcgctatgaagggcaaatatggcatctatacgaaggtgagccgctatgtaaattggataaaggagaaaacaaagcttact

SEQ ID NO: 8882 - DNA, 1383 bp, synthetic construct
  misc_feature 1..1383: note = source = /note="Description of Artificial Sequence: Synthetic coding sequence"
  source 1..1383: mol_type = other DNA
atgcagcgggtcaatatgattatggccgaatctcctgggctgattaccatctgcctgctgggctatctcctcagtgccgaatgcacggttttcctggatcatgaaaacgcgaataagatactgaataggcccaaaagatataatagtggcaagctggaggagttcgttcagggaaacctggagcgcgagtgcatggaggagaaatgctcatttgaagaagccagggaagtttttgagaatacggagaggacgactgaattctggaagcagtacgtggatggagatcaatgtgagagcaacccctgcttgaacggtggatcctgtaaggacgacataaatagctacgagtgctggtgtccctttggattcgagggaaaaaactgtgagcttgacgtcacctgcaacattaagaatgggcgctgtgaacagttttgcaaaaactccgccgacaataaggtggtctgttcatgcacagaaggctacagactcgctgagaatcagaagtcatgtgaaccagccgtcccatttccctgcgggcgcgtgtccgtgtcccagacttccaagctcacccgagcagagaccgtgtttccagacgtggattatgtaaattccactgaggcggagaccatacttgacaatattacccagagcacccagagctttaacgatttcactcgggtagtgggcggtgaggatgctaaaccgggacagttcccgtggcaggttgtcctgaacggcaaagtggatgctttctgtggtggaagtatagtgaatgaaaaatggatcgtcacagccgcgcattgtgtcgaaactggagtcaagataacagttgtcgccggcgagcacaatatcgaagaaaccgaacatacggagcagaagcgaaacgttataagaattataccacaccataattacaacgccgccattaataagtacaatcacgacatcgcccttctggaactcgacgaacctctggtcttgaacagctacgtcactcccatctgcattgcagacaaggagtatacgaacatattcctgaagttcgggtccggatatgtgagcggttgggggcgggtgtttcacaagggaagatctgctctcgtactgcagtacctccgggtgcctctggtggatagagctacttgcctgcgatccacgaagtttacgatttataacaatatgttttgcgcaggattccacgaagggggccgcgactcctgccagggggatagcggtgggccgcatgtgaccgaggtagaagggacctcatttctgactgggattataagttggggggaggaatgtgccatgaagggtaagtacggtatttatacaaaagtcagtcgatatgtgaactggataaaggaaaaaactaaactgaca

SEQ ID NO: 8883 - DNA, 1383 bp, synthetic construct
  misc_feature 1..1383: note = source = /note="Description of Artificial Sequence: Synthetic coding sequence"
  source 1..1383: mol_type = other DNA
atgcagcgggtgaatatgatcatggctgagtctcccggcctgataacaatctgcctcctgggctatctgctgagcgctgagtgcacagtctttctcgatcacgaaaacgctaataaaatcctgaaccgtcccaagaggtacaacagcgggaagctggaagagttcgtgcaaggaaaccttgagcgagaatgtatggaagaaaagtgttcattcgaggaggctcgtgaggtattcgagaatactgaacggaccaccgaattctggaaacagtacgtggacggcgatcaatgtgaatctaacccatgcctcaatggtggaagttgcaaggatgacattaacagttatgaatgctggtgtccttttggttttgagggaaagaattgcgaacttgatgtgacctgtaatattaagaacgggcggtgtgagcagttctgcaagaattctgcagacaataaagtcgtgtgctcgtgcacagaagggtatagactggctgagaaccagaagtcttgtgagcctgccgttccgttcccatgtggccgcgtgtctgtttcccaaacatcaaaacttacaagagcagaaacggtattccctgatgtagactatgtgaactctaccgaggccgagaccatactggataacattacacagagcacccagagtttcaatgactttacaagggtcgtaggaggagaggatgccaaacctggccagttcccatggcaagtggtactgaacggaaaggtggacgctttctgtggaggaagtatagtgaatgagaaatggatcgtgaccgccgctcactgtgttgagacgggagtcaagataaccgtggtggccggggagcacaatatcgaggagaccgagcacactgaacagaaacgcaatgtgataaggattattcctcaccataactacaacgccgctatcaacaaatacaaccatgacatcgccctgcttgaacttgatgagccattggtactgaactcgtacgttactcctatctgtatcgccgacaaagaatacacaaatatcttcctgaagtttggctccgggtacgtcagcgggtggggaagggtgttccacaaaggacgcagcgcgcttgtgctacagtatctgagagtacccctcgtggaccgggcaacttgcctcaggtctacgaagttcacgatctacaataacatgttctgcgccggttttcatgaggggggtcgggattcctgtcaaggcgatagtgggggacctcacgttactgaggttgagggcacttcctttttgaccgggattatcagttggggcgaggagtgcgccatgaagggtaagtacggcatctacacaaaagtctctcgatatgtcaactggattaaagaaaagacaaagctgacg

SEQ ID NO: 8884 - DNA, 1383 bp, synthetic construct
  misc_feature 1..1383: note = source = /note="Description of Artificial Sequence: Synthetic coding sequence"
  source 1..1383: mol_type = other DNA
atgcaaagggtgaacatgatcatggctgaatcaccagggctgatcactatctgtctcctgggataccttttaagcgcagaatgtaccgttttccttgaccatgaaaatgctaacaagatactgaatagacctaaaagatataactctggaaaactcgaggaattcgtgcagggcaatctggagcgcgaatgtatggaagagaaatgttcatttgaggaggcacgggaggtattcgagaatacagaaagaaccacggagttctggaagcagtatgtagacggggatcaatgtgagagtaatccatgtctgaacgggggttcctgtaaggatgacattaattcatacgaatgttggtgcccattcggtttcgagggaaagaactgtgaactcgacgtcacctgcaacatcaaaaacggacgctgcgaacaattttgtaaaaacagcgccgataataaagtggtgtgttcttgtaccgaagggtaccggctcgcggagaaccagaaatcttgcgaacccgccgttccgttcccttgcggccgagtgtcagtgagtcagacatccaaactgaccagggctgagacagtattcccggacgtggattacgtaaattccacggaggctgaaacaattcttgacaatatcactcagtctacacagtcttttaacgacttcacacgggtcgtagggggagaggatgccaagcccggacagtttccctggcaggtggtactgaacggaaaggtggacgctttctgcgggggatctatagtgaatgagaaatggatcgtgacagctgcccattgcgtggaaacgggcgtcaagataactgttgtggctggggagcataatatcgaggagacggagcacaccgagcagaagaggaacgtaatacgcatcatccctcaccacaactacaatgctgcgatcaacaaatacaaccatgatattgccctcctggaactggatgaaccgttggtgctgaactcgtacgtgacccctatttgcattgccgacaaggaatacactaatatctttctaaagttcggatccgggtacgtgtccgggtggggtagggtgtttcataaaggtaggagcgccctggtgctccaatacttgagagtgcctctggtagaccgagccacctgcctgcgcagtacaaagtttacaatctataacaatatgttctgcgccggctttcacgaaggcggaagggactcctgccagggagactcaggcgggccgcatgtgacggaagtggaaggcactagcttccttaccgggattatctcatggggagaagagtgcgccatgaaaggcaagtatgggatttataccaaggtttcccgatatgtaaactggattaaagagaagacaaaactcacc

SEQ ID NO: 8885 - DNA, 1383 bp, synthetic construct
  misc_feature 1..1383: note = source = /note="Description of Artificial Sequence: Synthetic coding sequence"
  source 1..1383: mol_type = other DNA
atgcagcgggtaaatatgataatggccgaaagtccgggcctcatcaccatctgtctcctcggctatcttctaagcgctgagtgcaccgtgttcttggaccatgaaaatgcgaacaaaatccttaaccgtcctaaaaggtataactccggcaagttggaggagttcgtgcagggaaacctggagcgagaatgtatggaggagaagtgctcctttgaggaagctcgggaggtattcgagaatacagaacggacaacggagttttggaaacagtacgtagatggggaccagtgcgaatcgaacccttgcctcaacggggggtcctgcaaggacgacatcaactcgtatgagtgttggtgccctttcggtttcgaaggcaagaactgtgaattggatgtgacatgtaacataaaaaacggcaggtgtgagcaattctgcaagaactccgcagataataaggttgtctgcagctgcactgagggttaccggctcgctgaaaatcagaagagttgcgaacccgctgtccctttcccttgtggccgtgtgtcggtttctcagacaagtaaactgactcgcgctgaaacagtattcccggatgtagactacgttaatagtacggaggccgagacaattttagataacatcacccagtccactcagtctttcaatgacttcaccagggtggttggtggcgaggatgccaagcctgggcagtttccctggcaggtggtcctcaatggtaaggtcgacgcattttgcggcgggtctatcgtgaacgaaaagtggattgtgaccgctgcccactgcgtggagacaggtgtgaagataacagtagtggcaggcgagcacaatattgaggaaacagaacacacagaacaaaagcgcaatgtgatacggattatcccacaccacaactacaatgctgcaatcaataagtataatcatgatattgccctgctggagttggacgagcctctggtccttaattcctacgttacgcccatctgtatagcagacaaagaatatacgaatatattcctcaagttcggctctggctacgtgagcggctggggacgggtttttcacaaaggtcgaagcgctctggtgctacagtatctgcgcgtccctctggtcgatagggccacatgtctacgatctacaaaattcaccatttacaataatatgttctgcgctgggttccacgaaggcggaagagattcctgccagggcgattcggggggacctcatgtgactgaggtagaagggacctcctttctcaccgggatcatctcttggggggaagaatgcgccatgaaaggcaagtatggaatttacacgaaagtctctcgctatgttaactggataaaagagaagaccaagctaacc

SEQ ID NO: 8886 - DNA, 1383 bp, synthetic construct
  misc_feature 1..1383: note = source = /note="Description of Artificial Sequence: Synthetic coding sequence"
  source 1..1383: mol_type = other DNA
atgcagcgggtaaacatgataatggccgaatcccccgggctaatcactatctgtctcctgggatatttgctgtcagccgagtgcacagttttccttgaccacgagaatgcaaacaagatcctgaaccgccctaaaaggtataactctggtaagctcgaagagttcgttcagggaaatctcgagcgtgaatgcatggaagaaaagtgctcttttgaagaggccagggaagtctttgaaaacacggaaagaaccaccgaattttggaaacagtacgtcgacggagatcagtgcgagtccaatccctgtctcaatggaggaagttgcaaagatgatatcaactcctacgaatgctggtgccctttcggatttgaggggaagaactgtgagctggacgtcacctgtaacatcaaaaatggtcgctgcgagcagttctgcaagaattccgctgacaataaggtcgtctgttcctgcacagaggggtacagactggctgaaaatcagaaaagttgcgagcctgcagtgcctttcccttgtggcagagtgagtgttagccagaccagcaaattgacgcgggccgaaactgtgtttccggacgtcgattacgtgaactcaacggaggctgagacaattctcgacaacatcacacagagcactcaatcatttaacgatttcacgcgagtggtcggcggcgaagacgcaaagcccggccagtttccctggcaggtcgtcctgaacggcaaggtggatgccttctgcggggggtctattgtgaacgagaaatggatcgtgacagccgctcactgtgtagagaccggggtcaagataactgtcgtggcgggagagcacaacatagaggaaaccgagcacactgaacagaaacggaatgtgatacgaatcataccccatcacaattacaacgccgcaattaataaatacaaccacgatattgctttgctggagctggacgaacctttggtactgaactcctacgtgaccccaatctgtatcgcagataaagaatacaccaatatatttttgaagtttggctctggatacgttagcggctgggggcgtgtatttcataaaggtcgtagtgcgttagtactgcagtacctgagggttccactggttgatcgcgcaacctgcttgcgctcgaccaagtttaccatctacaataacatgttttgcgcgggattccatgaaggtggtagggattcttgccagggtgattcaggcggtccgcacgtcaccgaagtagaggggacatcctttcttaccggtatcatcagctggggcgaggagtgtgctatgaaggggaagtacggaatttacaccaaggtgtcaaggtatgttaattggataaaagagaaaacaaagctgacc

SEQ ID NO: 8887 - DNA, 1383 bp, synthetic construct; identical to SEQ ID NO: 8883
  misc_feature 1..1383: note = source = /note="Description of Artificial Sequence: Synthetic coding sequence"
  source 1..1383: mol_type = other DNA

SEQ ID NO: 8888 - DNA, 1383 bp, synthetic construct
  misc_feature 1..1383: note = source = /note="Description of Artificial Sequence: Synthetic coding sequence"
  source 1..1383: mol_type = other DNA
atgcagcgggtgaacatgatcatggccgagtccccgggtctgatcactatttgtctgctggggtacctgcttagcgcggaatgtacggtgtttctcgatcatgagaacgctaacaaaatcctgaacaggccgaagagatacaattcggggaagctggaggagtttgtccaaggaaacctggagcgggaatgcatggaagaaaaatgctcgttcgaagaggcccgcgaagtgttcgaaaataccgaacgtacgaccgaattttggaagcagtacgtggacggagatcagtgcgaatctaacccgtgtctgaacggagggtcatgcaaggatgacatcaactcgtacgaatgctggtgcccgttcggatttgaggggaagaactgcgaactggatgtaacttgtaatatcaaaaacggaaggtgtgagcagttctgcaaaaactccgctgacaataaggtggtctgctcatgcaccgaaggataccgcctcgccgaaaaccagaagtcgtgcgagcctgcggtccctttcccatgcggaagagtctcggtcagccagacctccaagctcactagagcagagactgtgttcccagatgtggactacgtgaactccaccgaagccgaaaccatcttggataacatcacgcagagcacgcagtcctttaatgacttcactcgcgtggtgggaggagaggatgccaaacccggccagttcccgtggcaagtggtgctgaacggaaaagtcgacgcgttctgtggaggatccatcgtcaatgaaaagtggatcgtgactgcagcccactgcgtcgaaaccggagtcaaaatcaccgtggtggccggagaacacaatatcgaggaaaccgagcataccgagcagaaaagaaacgtcatcaggatcatcccgcaccataactacaacgcagcaatcaacaagtacaatcacgatatcgctctgctcgagctggacgagcccctcgtgttgaattcatacgtgaccccgatttgcattgccgataaagaatatacgaatatcttccttaagttcggctctggctacgtgtcggggtggggaagggtctttcataagggacggtccgcactggtgctgcagtaccttcgcgtccccttggtcgaccgcgccacgtgtctcaggagcacgaagtttactatttacaacaacatgttctgtgcgggattccacgaaggagggagagacagctgccagggtgactccggcggaccgcatgtcaccgaagtcgaaggtacctcgtttcttactggaattatcagctggggagaggagtgcgcaatgaagggaaagtacggaatctacaccaaagtgagccgctacgtgaactggatcaaagaaaagactaaactcacc

SEQ ID NO: 8889 - DNA, 1383 bp, synthetic construct
  misc_feature 1..1383: note = source = /note="Description of Artificial Sequence: Synthetic coding sequence"
  source 1..1383: mol_type = other DNA
atgcagagggtcaatatgatcatggcggagagtcctggtctgatcacaatctgcctcctcggttacctcttgtctgccgagtgcacagtttttctggaccacgagaatgctaacaagattctcaacagaccgaagcgctacaattctggcaaactcgaggagttcgtgcagggcaatctggagagagagtgcatggaagagaaatgctcatttgaggaggcaagggaagtcttcgaaaacactgaaagaaccacggagttttggaagcagtacgtcgatggtgaccagtgcgagtctaacccatgtcttaacggaggatcttgcaaagacgatatcaactcttacgagtgctggtgtccttttggattcgaaggaaagaactgcgagctggacgttacctgcaacatcaaaaacggtagatgcgagcagttttgcaagaacagcgcagataacaaggtggtgtgctcatgcacggagggctacagactcgctgagaaccagaagagctgcgagcctgctgtcccattcccctgcggaagggtcagcgtcagccagaccagtaagcttacccgcgctgagacagtgtttccggacgttgattacgtcaactctactgaagctgagaccatactggataacatcacccaatctactcagagctttaacgattttacaagagtcgtaggcggagaagatgctaagcccggtcaattcccctggcaagtcgttttgaacggaaaagtcgacgccttctgcggtggctctattgtcaatgaaaagtggattgttaccgctgcccactgcgtagagacaggcgtcaagataaccgttgttgccggtgagcacaacattgaagagacggagcacacggaacagaagaggaacgtaatccgcatcatccctcaccacaactacaacgccgcgatcaataagtacaaccacgacatcgcccttctggagctggatgaacccctcgtgctgaactcatacgtgacccctatatgtatcgccgataaggagtacacaaacatctttcttaagtttggaagcggatacgtgtcaggctggggccgcgtgtttcacaaaggcaggagcgctctggttttgcaatacttgagggtgcctctcgttgaccgcgctacctgtctgcgctcaactaagttcacaatctacaacaacatgttctgtgcgggttttcacgagggcggcagggattcctgtcaaggcgattccggcggcccccacgtgacggaggttgaaggaaccagcttcctcacaggaatcatctcttggggtgaggagtgcgcgatgaagggaaaatacggcatttacaccaaggtgtctcgctacgtgaactggatcaaggaaaaaaccaagttgacg

SEQ ID NO: 8890 - DNA, 1383 bp, synthetic construct
  misc_feature 1..1383: note = source = /note="Description of Artificial Sequence: Synthetic coding sequence"
  source 1..1383: mol_type = other DNA
atgcaaagagtgaacatgataatggcggaatccccgggtctgattactatctgcctgcttggctacctcctttcggcagaatgtaccgtgtttctggatcatgaaaacgctaacaagatcctcaaccgcccgaaacgctacaacagcggaaagctcgaagaatttgtgcaaggaaatctggagcgggagtgcatggaagaaaagtgttcctttgaggaagcaagagaagtgtttgaaaacaccgaacgaactactgaattttggaagcagtatgtggatggtgatcagtgtgaatccaacccgtgtctgaatggagggagctgtaaggatgacattaactcctatgaatgttggtgtcctttcggtttcgaaggaaagaattgcgaactcgacgtgacctgtaatatcaaaaacggaagatgtgaacaattctgcaagaatagcgccgataacaaggtggtctgtagctgcaccgaaggatatagactggcagaaaatcagaaatcgtgcgagcccgccgtgccatttccttgcggtcgcgtctcagtttcacagacttcgaaacttacgagagcggaaactgtctttccagacgtcgactacgtcaacagcacggaagcagaaactattctggacaatatcacgcaatccactcaatcctttaatgatttcaccagagttgtgggtggcgaagatgccaaacctgggcagtttccttggcaagtcgtgctgaatggaaaagtggacgcattttgtggagggagcattgtgaatgaaaagtggattgtcaccgcggcacattgtgtggaaaccggcgtgaagatcaccgtcgtggctggggaacacaatatcgaagaaaccgagcacacggaacaaaagcgtaacgttatccggatcattccccatcacaactacaacgcagcaatcaataagtacaatcatgatattgctttgctcgagctggatgagcccctggttctgaattcgtacgtgactcctatatgtatcgccgacaaggaatacactaacatttttctgaaatttgggagcggttacgtgagcggttggggtcgtgtctttcacaagggcagatccgcacttgtcctccagtacttgcgcgtccctcttgtcgacagagcaacctgcctgcggtccaccaagtttactatctacaacaacatgttttgtgcagggtttcatgagggaggcagggatagctgtcaaggagatagcgggggcccacatgtgaccgaggtcgagggaactagcttcctgaccggaattatctcctggggagaagaatgcgcaatgaagggaaaatacgggatttacaccaaggtatcccggtacgtcaactggattaaagagaaaactaagctgacc

SEQ ID NO: 8891 - DNA, 1383 bp, synthetic construct
  misc_feature 1..1383: note = source = /note="Description of Artificial Sequence: Synthetic coding sequence"
  source 1..1383: mol_type = other DNA
atgcagcgtgtgaatatgataatggctgaaagtcctggtctgattaccatctgcttactggggtacctgttatccgccgaatgtaccgtctttctcgaccatgagaacgctaataagatcctgaatcggccaaagaggtacaacagcggaaaactggaagagttcgtacagggtaatctggagagggaatgtatggaagagaaatgtagttttgaggaagctagggaagtgttcgagaataccgagcgcaccactgaattttggaaacagtacgtcgacggagaccaatgcgaatctaacccgtgcctgaatggtgggtcctgtaaagacgatattaactcctacgagtgctggtgccccttcggctttgaagggaaaaattgtgaactggacgtgacttgcaatattaagaacgggaggtgtgagcagttttgcaaaaattccgcagacaacaaagtggtctgcagctgcaccgaggggtatcgattggcagagaaccagaagtcatgcgagccagcggtgccatttccttgtggtagggtgagcgtgtcacaaaccagcaaacttacaagggcggagacggtgttcccagacgtggactacgtcaatagcaccgaagctgagacaatccttgataacattacccagtccacacagtcctttaatgattttactagggttgtaggcggagaagatgccaaaccgggccagttcccctggcaagtcgtgctgaacggaaaagtcgatgctttctgcggcggcagcatcgtaaacgagaagtggattgtcaccgcagcccattgtgtggagactggagtaaagattacggtggttgctggtgagcataatatcgaggagacagagcatacagaacaaaagcggaacgtaattcgaatcataccccaccataactataacgcggctattaacaagtacaatcatgatattgcgctgctcgaactggacgagcctctggttctgaacagttacgttacaccaatttgcatcgccgataaggagtataccaacatcttcctgaagtttggctcaggatatgtatctgggtgggggagagtcttccataagggtcgatcagcattagtgctccaatatctgcgagtgccattagtcgaccgagcaacctgcctgcgatctacaaagttcacaatatataacaatatgttctgtgctgggttccacgaaggcggcagggactcctgccagggggacagtggcgggcctcacgttactgaagtagaagggacgtctttcctgaccggaattataagctggggggaggagtgcgcaatgaagggtaagtatggcatttatactaaagtatctaggtacgttaattggataaaggagaagactaagttgacg

SEQ ID NO: 8892 - DNA, 1383 bp, synthetic construct
  misc_feature 1..1383: note = source = /note="Description of Artificial Sequence: Synthetic coding sequence"
  source 1..1383: mol_type = other DNA
atgcaacgggtgaacatgatcatggcggagagccccggtcttattaccatttgtctgctcggatacctgctttccgcagaatgtaccgtctttctggatcatgagaacgcgaacaaaatcctcaacagaccaaagagatacaactcgggtaagctggaagaatttgtgcaaggcaatctcgagcgggaatgtatggaggagaagtgttcattcgaggaagcaagagaggtgtttgaaaacaccgaacgtacgactgaattttggaaacaatacgtggatggagatcaatgcgaaagcaacccttgcctgaatggcggctcgtgtaaggatgatatcaattcctacgaatgctggtgtccctttggatttgagggcaagaattgtgaactggatgtcacgtgtaacataaagaacggacgctgcgaacaattttgtaagaattcggcagacaataaggtggtgtgttcgtgcaccgaaggatacagattggcagaaaatcaaaagagctgtgagcccgcagtccccttcccctgtggtagggtttccgtgtcgcagactagcaagctcacgcgtgcagaaactgtgttccccgatgtggattacgtgaactccactgaggcggagacgattcttgataacattacccagtcaacccagtcgtttaacgatttcactagggttgtgggaggagaagatgccaaacctggtcagtttccttggcaagtggtcctgaatgggaaggtggatgccttttgcggtggctcaattgttaacgagaaatggattgtgaccgccgcgcattgtgtggaaactggagtcaagattacggtcgtggcaggagaacataacattgaggagactgagcacaccgagcaaaagagaaacgtgatccgcatcattcctcatcataactacaacgcagccatcaacaagtacaatcatgacattgcacttcttgaacttgacgaacccctggtgctgaactcctatgttacgccaatttgtattgccgataaggagtacaccaacatcttcctcaagtttggctcaggatatgtgtctggatggggcagagtgtttcataaggggaggtccgcactggtgcttcaatacctcagagtgccacttgtggaccgggctacttgtctccgttcgaccaagtttaccatctataacaacatgttttgtgcaggatttcatgagggtggtcgggacagctgccagggcgactccgggggacctcacgtgaccgaagtggagggaacttcctttctgaccggaattatctcctggggagaagaatgtgcaatgaaagggaaatacggaatttacactaaggtcagtagatacgtgaactggatcaaagaaaagactaagctgacg

SEQ ID NO: 8893 - DNA, 1383 bp, synthetic construct
  misc_feature 1..1383: note = source = /note="Description of Artificial Sequence: Synthetic coding sequence"
  source 1..1383: mol_type = other DNA
atgcaacgtgtgaacatgattatggcagaatcgccgggacttataacgatttgcctccttggatacctcttgtccgcagaatgtaccgtctttcttgatcatgagaacgcaaacaagatacttaaccgccctaagagatacaacagcggtaagttggaagaattcgtccaaggtaatctggaacgcgaatgcatggaggagaagtgcagtttcgaagaagcaagggaagtgtttgaaaataccgagagaacgactgaattctggaagcaatatgtggatggtgaccaatgtgaaagcaatccatgtctgaatggtggttcgtgcaaggatgacataaacagttacgaatgttggtgtccattcggattcgaagggaagaattgcgagctcgacgtgacctgtaacattaagaacggtagatgcgagcaattttgtaagaacagcgcagacaataaggtcgtgtgctcgtgcaccgagggataccgtcttgcagaaaaccaaaagtcgtgtgagcccgcagtgcctttcccgtgtggaagagtgtcagtcagccagacgtccaaacttaccagggcagaaaccgtctttcctgacgtcgattacgtgaatagcaccgaagccgaaactatcctggacaatatcacccaatccactcaatcatttaacgattttactcgagtggtgggaggggaagatgccaaacctggtcagtttccatggcaagtggtgctgaacggtaaggtcgacgcattctgcggaggctcgattgtgaatgagaagtggatcgtgaccgcggcacattgcgtcgaaacgggagtgaagattacggtggtggccggtgaacataacattgaggaaactgaacatactgaacagaaaaggaacgtcattcgaattatccctcatcacaactacaacgcagcaataaacaagtacaatcacgatatagccctgcttgaactcgacgaacctcttgtgctcaactcctacgtgaccccaatctgtattgccgacaaggaatacaccaatatctttctgaagttcggttcaggatatgtcagcggctggggtagggtgtttcataagggaagatcggcactcgtcctgcaataccttcgggtccccctggtggacagggccacttgtctgcgtagcaccaagtttactatctacaacaatatgttttgtgctggattccatgaaggtggacgggattcctgccagggagactcgggagggccccacgtcactgaggtggaaggaacttcctttctcaccggaattatctcctggggtgaagagtgtgcgatgaaaggaaagtacgggatttacactaaagtgagcagatatgtgaattggatcaaggaaaagaccaaactcact

SEQ ID NO: 8894 - DNA, 1383 bp, synthetic construct
  misc_feature 1..1383: note = source = /note="Description of Artificial Sequence: Synthetic coding sequence"
  source 1..1383: mol_type = other DNA
atgcagagggttaatatgatcatggcagagagcccaggactaataaccatctgtctcttgggctatctgctgagcgctgaatgtactgtcttcttagatcatgagaatgccaacaagatcctgaatcggcctaagcgatacaactccgggaagctagaggagttcgtgcaaggtaacctggaaagggaatgtatggaagagaaatgcagctttgaggaagcacgggaagtgtttgagaataccgagaggaccactgaattctggaagcagtacgtggacggtgatcagtgtgagtcgaatccttgcctgaacggcggtagctgtaaagacgatatcaattcctatgagtgttggtgcccctttggctttgaaggcaaaaactgtgaactggatgtcacctgcaacatcaagaacggtaggtgtgagcaattttgtaaaaacagcgcagacaataaagtcgtgtgtagttgcaccgagggctacaggttggccgagaaccagaagtcctgcgagcctgcggttccattcccatgcggtcgcgtctctgtatctcagacttccaaactgacccgagcagaaacagtgtttccagatgtcgactatgttaatagcactgaagctgagactatcctggacaatatcactcagtccacacagtcttttaacgacttcacgcgtgttgtgggcggggaggacgcgaagcctggtcagttcccttggcaagtcgttctcaatggaaaggtggacgctttctgcgggggttccatcgtgaatgaaaagtggattgtgacagcggcccactgcgttgagactggggtcaagattacagtggtggccggggaacataatatagaggagaccgaacataccgagcagaaacgcaatgtgatcaggattatcccccaccacaattataacgccgctatcaataagtacaaccatgacatcgccctattggaactggacgagccgcttgtcctgaacagctatgttactccaatctgtatcgctgataaggaatacaccaacatattcctaaaatttgggtccggttatgtctcaggttggggcagagtcttccacaagggtaggagtgcactggtgctgcaatacctgcgtgtgccactggtagacagggccacctgcctgaggtccactaaattcacgatctacaacaacatgttctgcgccgggttccacgaaggcggaagagatagctgtcagggtgattctggagggccacatgtgaccgaggtcgaagggacaagtttcctcactggcatcatctcttggggcgaagaatgcgcaatgaagggcaagtatgggatatatactaaagtgagccggtatgtgaactggatcaaggagaaaacaaagctgacc

SEQ ID NO: 8895 - DNA, 1383 bp, synthetic construct
  misc_feature 1..1383: note = source = /note="Description of Artificial Sequence: Synthetic coding sequence"
  source 1..1383: mol_type = other DNA
atgcagcgcgtgaacatgattatggccgaaagcccgggactgatcactatatgtctgctgggctacctgttgagcgcagagtgcaccgtgttcttggaccatgaaaacgctaacaagatcctcaatagacctaagagatacaacagcgggaagctcgaggaatttgtccagggaaatctggaacgcgaatgcatggaggaaaagtgttctttcgaggaggctcgggaggtgttcgaaaacactgaacggaccacggagttttggaagcagtacgtcgatggtgaccagtgcgaatcaaatccatgcctcaacggaggtagctgtaaagacgatatcaacagctacgagtgctggtgtccgttcgggttcgaaggaaagaattgcgaactcgatgtgacttgcaacatcaaaaatgggagatgcgagcagttttgtaagaactctgcagataacaaagtggtgtgctcgtgcactgaaggctacagactcgccgaaaatcaaaagtcgtgcgaaccagcggtgcccttcccttgtggcagagtgtcagtctcccagacttcaaagctcactcgcgctgagactgttttcccggatgtggactacgtcaattcgacggaggcggaaactatccttgacaacatcacgcagtctacccagtcgttcaacgacttcactcgcgtggtgggaggtgaagatgccaagccaggacagttcccttggcaagtcgtgttgaacggtaaggtcgacgccttttgcggcggttccatcgtgaacgagaagtggattgtgaccgccgctcactgcgtggaaaccggagtgaagatcaccgtggtggccggagagcacaatattgaggagactgagcacactgagcaaaaacgaaacgtcatccggattatcccgcaccacaactacaacgcagccatcaacaaatacaatcatgacatcgcccttctcgaactggatgagccactggttctgaattcatatgtcactccgatctgcatcgccgacaaagaatacacgaacatctttctgaagttcggatcgggatacgtgtccggatggggtcgggtgttccacaaaggtcgctccgcgcttgtgctgcagtaccttcgggtcccactggtggaccgggcgacttgcctcagatccacgaagtttacgatctataacaatatgttctgcgctggatttcatgaaggaggcagggactcctgtcaaggagattcgggaggcccgcatgtgaccgaggtggaggggaccagcttcctgactggaatcatctcctggggtgaagagtgtgcgatgaagggcaaatacggcatctacactaaagtctcccgatacgtgaactggatcaaggaaaaaaccaagctgact

SEQ ID NO: 8896 - DNA, 1383 bp, synthetic construct
  misc_feature 1..1383: note = source = /note="Description of Artificial Sequence: Synthetic coding sequence"
  source 1..1383: mol_type = other DNA
atgcaacgggtgaatatgattatggccgaatcacctgggctgatcactatctgcttgcttggataccttctctcagccgagtgcactgtgtttcttgatcatgaaaacgcgaacaagattcttaaccgccctaagagatacaattccggaaagctggaggagtttgtccaaggcaaccttgagcgagaatgtatggaagaaaagtgtagttttgaggaagcgagagaagtgttcgaaaacaccgaacgcaccactgagttctggaagcaatacgtggacggagatcagtgtgagagtaatccatgtttgaatgggggatcctgcaaggatgacataaactcctacgaatgctggtgtccctttgggttcgaaggtaagaactgtgaactggatgtgacctgtaatatcaaaaatggacgatgcgaacagttctgtaagaatagcgcagacaacaaggtggtgtgctcctgtactgagggatacagactggctgagaatcaaaaatcatgtgaacccgcagtcccatttccctgtggacgggtgtcggtgtcacagacctccaagctgaccagagcagaaaccgtgtttccagacgtggattacgtgaatagcaccgaagcagagactattctggataacatcactcaatctactcaatccttcaatgactttacccgagtcgtgggaggcgaggatgcaaaaccaggtcagttcccatggcaggttgtgctgaatggtaaagtggatgccttctgtggtggaagcattgtcaacgaaaagtggattgtgactgccgcccactgcgtggaaaccggcgtcaagattacggtcgtggcgggcgaacataacattgaagagactgaacataccgaacagaagagaaatgtgatcagaatcattcctcatcataactacaacgcagcaatcaacaagtataaccatgacatagcgctcctcgagctggatgaacccctcgtgctgaattcctacgtgacccctatctgcatagcagataaagaatacactaacattttcctgaagttcggctccggctatgtgtcgggatggggcagggtgtttcataagggaagatcagccctcgtgctccaatacctccgcgtgcctctggtggatcgcgccacttgtctccgttcgaccaaattcactatctacaataacatgttttgtgcaggtttccatgaaggtggacgcgattcatgtcagggcgacagcggtggaccccatgtgactgaagtggaaggtacttcgttcttgacgggaatcataagctggggtgaagaatgcgcaatgaagggaaagtacggtatctacacgaaagtctcaagatacgtgaattggatcaaagaaaagaccaaacttact

SEQ ID NO: 8897 - DNA, 1383 bp, synthetic construct
  misc_feature 1..1383: note = source = /note="Description of Artificial Sequence: Synthetic coding sequence"
  source 1..1383: mol_type = other DNA
atgcagcgcgtaaacatgatcatggccgagtctccagggctgattacaatctgcctgttgggatatcttctgtccgccgagtgcactgtgttcctcgaccacgagaacgccaataaaatcctgaatcgccccaagagatacaattcaggcaagctagaagagtttgtgcagggcaatttagaacgggagtgtatggaagagaagtgctcttttgaagaagcacgggaagtgtttgagaatacggagaggaccaccgagttttggaagcagtatgttgatggtgaccagtgtgagagcaacccctgccttaacggaggaagttgtaaggacgacatcaacagctacgaatgctggtgcccctttggatttgagggcaagaactgtgaattagacgtcacatgcaacattaagaacggccgctgcgaacaattttgtaagaattcagcagacaacaaggtggtgtgtagctgcacagaaggctaccgtctcgctgagaaccagaagagttgcgagcccgccgttccattcccatgtggtagagtcagcgtatcccagacctctaagctgaccagggctgagaccgtatttcccgacgtggactacgttaactcgactgaagccgagactattcttgataatatcactcagagtacacaaagctttaatgattttaccagagtcgttggcggagaggacgccaagccaggacagttcccctggcaagtcgtgctgaacggtaaagtggacgcattctgcgggggatccatcgtcaatgaaaaatggatcgtgacagctgcccactgtgttgaaacgggcgtgaagatcacggtggtggcgggcgagcacaacatcgaggagacagaacacacagaacaaaaacgaaacgtcatccgcattatcccacatcacaactataacgcagcaatcaataaatataatcatgacatcgcactgctggagcttgacgagcccctggtactgaactcgtacgtcactcccatttgtatcgcagacaaagaatacaccaatatcttcctgaagttcggatccggctatgtgtccgggtggggacgggtgtttcataagggcagatcagcacttgtgctacagtacctgagggtgcctcttgtagatcgggccacctgtctgcggagtaccaagttcactatatacaataatatgttttgtgccggcttccacgagggcgggcgtgattcatgccagggagatagcggcggcccccacgtaacagaggtggaaggaacgtccttcctgaccggtatcattagctggggcgaagaatgtgccatgaaagggaagtatgggatttacacaaaagtgtcccgttatgtcaattggatcaaagaaaaaactaagctcacg

SEQ ID NO: 8898 - DNA, 1383 bp, synthetic construct
  misc_feature 1..1383: note = source = /note="Description of Artificial Sequence: Synthetic coding sequence"
  source 1..1383: mol_type = other DNA
atgcagcgcgtgaacatgattatggcagaatcgccaggcctcattaccatctgtctcctgggttatctgcttagcgccgaatgtactgtctttttggatcatgagaacgcaaataagattcttaacaggcctaagaggtacaactccggcaagctggaagaatttgtccaggggaatctggagcgggaatgtatggaagaaaagtgctcctttgaggaagctcgcgaagtgtttgaaaacacggagagaactaccgaattctggaaacaatacgtggatggtgaccaatgtgagtcaaacccttgcttgaacggtggatcatgtaaagatgacatcaatagctacgagtgctggtgtccttttggatttgagggtaagaactgtgaactcgacgtgacttgtaacatcaaaaatgggagatgcgaacagttctgtaaaaactccgcagacaataaagtggtctgctcgtgtactgaggggtaccgccttgcagaaaaccagaagtcctgtgaaccagcagtgcctttcccttgcggacgggtatccgtgtcgcagaccagcaagctgacgagggctgaaacggtgtttcccgatgtcgattacgtgaatagcactgaagcagaaaccatcctggataacattactcagtcgacccagtcgtttaatgacttcaccagagtggtgggtggagaggacgctaaaccaggccaatttccctggcaagtggtgcttaatgggaaggtggatgcattttgtgggggcagtattgttaatgaaaagtggatcgtgacggcagcccattgcgtggaaactggcgtgaagatcacggtcgtggctggcgagcacaatatcgaagaaacggagcatactgaacaaaagcggaacgtgatacgcatcattccgcatcataactacaatgccgcgatcaataagtacaaccatgacattgcgctcctggaacttgatgagccactggtgctcaacagctacgtgactcccatatgcatcgccgataaagaatacactaacattttcctgaaattcggaagcggatacgtctccggttggggccgagtctttcacaagggacggtcagcactcgtgctccaatacctgagggtcccactcgtggatcgggccacctgtcttaggagcacgaagtttactatatacaataacatgttttgtgccggattccatgaaggaggacgggactcatgtcaaggagattccggtggaccacacgtgaccgaggtggaaggcacttcatttctcactgggatcatttcctggggagaggaatgcgcaatgaaaggaaaatacggaatctacaccaaggtatctaggtacgttaactggattaaagaaaaaactaaacttact

SEQ ID NO: 8899 - DNA, 1383 bp, synthetic construct
  misc_feature 1..1383: note = source = /note="Description of Artificial Sequence: Synthetic coding sequence"
  source 1..1383: mol_type = other DNA
atgcagcgtgtcaatatgattatggctgaaagccctggattaataacaatctgtttgttaggataccttttatcggcagagtgtacggtttttcttgaccatgagaacgcaaacaaaatcttaaacagacctaaacgctacaatagtggaaaactcgaagaattcgtccagggcaatttagagcgcgaatgtatggaggagaagtgtagctttgaagaggctcgagaagtttttgaaaacacagagagaaccacagaattttggaaacaatatgtggatggagatcagtgtgagtctaatccttgtctgaacggaggcagttgcaaagacgatattaactcttatgaatgctggtgcccttttggcttcgaaggtaagaactgtgaactagatgtgacgtgcaacatcaaaaatggccgttgtgaacagttttgcaagaactcagcggataacaaagtagtctgttcatgcactgaaggctatcgacttgcggagaaccaaaaatcatgtgaacctgcggtaccgtttccgtgcggtcgagtcagcgtgtctcaaacgtcgaaacttacacgagctgaaacagtctttcctgatgttgattatgtgaatagtactgaggcggaaactattcttgataatatcacgcagagcactcaaagctttaacgattttactcgggtagttggtggtgaagatgccaaacctggccagtttccttggcaagtagttctgaacggcaaggtagatgcgttctgcggcggatcgattgttaacgaaaagtggatagtcacggcagcgcattgtgtagaaacaggggtgaaaatcacggttgtggcaggggaacataatatcgaggagacagaacatacggaacagaaaagaaatgttattcgcatcatcccccatcataattataatgctgccattaacaagtataatcatgatattgctctgctagagttggatgaaccgcttgtcctcaactcatatgtgactccgatctgtattgcagacaaggaatacacaaacatttttcttaaatttggttcaggatatgtgagcggctggggcagagttttccataaaggccgttctgctctggtactgcaataccttagggtcccgttagttgatcgtgcaacgtgcctgcgctcgactaaatttacaatatataataatatgttctgcgcgggtttccatgagggaggtagagatagttgccagggtgattctggtggcccccacgtaacagaagtggaaggaacaagcttcttgacaggaataatcagctggggagaagaatgcgcaatgaaaggaaaatacggaatatatacgaaggtctcgcggtatgtaaattggatcaaagaaaagactaagcttacc

SEQ ID NO: 8900 - DNA, 1383 bp, synthetic construct
  misc_feature 1..1383: note = source = /note="Description of Artificial Sequence: Synthetic coding sequence"
  source 1..1383: mol_type = other DNA
atgcagcgcgtgaatatgattatggcagaatccccaggattgattacaatttgtctgctgggctatctgctttctgccgagtgtactgtatttctggatcatgagaatgcaaacaagatactgaatcgtcccaaacgctataatagcggtaaactagaggagttcgtccaaggcaatctggaaagagaatgcatggaggagaagtgcagcttcgaagaagcgagggaggtctttgaaaacacagagcgtactaccgagttttggaagcaatacgtggacggggatcagtgcgaatccaacccctgtcttaacggaggttcttgcaaggacgacattaactcttacgagtgttggtgtccgttcgggttcgagggtaaaaactgtgaacttgacgtgacctgcaatatcaagaatgggagatgtgaacagttttgcaagaactcagcagacaacaaagttgtctgttcatgcactgagggttacagactggctgagaatcagaaaagctgcgagccagccgtcccattcccttgtggccgcgtttcagtgtcccaaacaagtaagctcactcgcgcagaaaccgtgttccctgatgtcgactatgtgaattctacagaggcagagacaattctagataacatcacgcagtctacccagtcgtttaacgacttcactagagtcgtgggcggcgaggacgcaaagcctggccagtttccgtggcaggtggtgctgaacggcaaagtcgacgccttctgcgggggcagcattgttaatgaaaagtggattgtaacggctgcgcactgtgtcgagactggcgtgaagatcacagtggtggcaggagagcacaacattgaggagaccgaacacactgaacagaagaggaatgttatacggattattcctcatcataattacaatgctgccatcaacaaatataatcacgatatcgcgctactcgagctggacgagcctttggtgctgaacagctatgtcacccccatttgcattgcagacaaggaatataccaatattttccttaagttcgggtcgggctacgttagcggttggggtcgcgtcttccacaagggaaggagcgcgctggttctgcagtaccttagagtgccactggtggatcgggcaacttgtctcaggagcacgaaattcactatttacaataacatgttttgtgccggctttcacgagggcggtcgtgatagctgccagggcgatagcggcggtccacacgtcaccgaggtcgagggcacaagttttctaaccgggattatttcctggggagaggagtgcgccatgaaaggaaagtacggaatctatacaaaagtatctcggtatgtcaattggattaaggagaagaccaaacttaca

SEQ ID NO: 8901 - DNA, 1383 bp, synthetic construct
  misc_feature 1..1383: note = source = /note="Description of Artificial Sequence: Synthetic coding sequence"
  source 1..1383: mol_type = other DNA
atgcagcgtgtaaatatgattatggctgagtctcctggccttattaccatttgcttacttggatatctgctgtccgctgaatgtaccgtctttctggaccacgagaatgcaaataaaattcttaataggcctaaaagatataattctggcaaattagaggaattcgtgcaagggaatctggaacgagagtgtatggaggaaaaatgcagtttcgaagaggctcgagaagtattcgagaacacagaacgtacaacggaattctggaagcagtacgttgatggagaccagtgcgagtccaatccgtgtctcaacggagggtcctgtaaagatgatatcaactcgtatgaatgttggtgcccctttgggtttgagggcaaaaactgtgaattggatgtaacatgtaacatcaaaaatggcagatgcgagcagttttgcaaaaacagcgccgacaataaagttgtgtgctcgtgtactgaggggtataggcttgctgagaaccaaaaatcatgcgagcccgccgtgcctttcccttgtgggcgggtgagtgtctcccagaccagcaagctgactagggcggagactgtgttccccgatgtggactatgttaactccaccgaggctgagacgatactggataatatcactcagtctactcagagtttcaatgactttactcgcgttgtgggcggggaggacgccaagcctggccagttcccatggcaggtggtcctcaacggcaaagttgacgcattctgcggagggtctatcgtgaacgagaagtggatcgtcaccgcagcccactgtgtggagaccggggttaagattacggttgtggccggggagcataacatagaggaaaccgaacacaccgaacagaaaaggaacgtcattcgcataattcctcatcacaactacaatgccgctataaacaaatacaatcatgacatcgccctgcttgaactggatgagcccctcgttctcaattcatacgttactcctatatgtattgcagacaaggagtacaccaacatattcctgaaattcggttctgggtatgtaagcggttggggccgggtgtttcataagggtagaagcgcattagtgcttcaataccttagggttccactggtggatcgcgcgacgtgcttgcgctcaactaaatttaccatttataacaatatgttctgcgcaggcttccacgagggaggccgggattcctgccagggcgacagcggggggcctcacgtaaccgaggtggagggcacatcattccttactggaattattagctggggggaggagtgtgccatgaaagggaagtacggaatatatactaaagtctcccgttatgtgaactggattaaagagaaaaccaaactcacc

SEQ ID NO: 8902 - DNA, 1383 bp, synthetic construct
  misc_feature 1..1383: note = source = /note="Description of Artificial Sequence: Synthetic coding sequence"
  source 1..1383: mol_type = other DNA
atgcagagagtcaatatgatcatggctgagtcgccgggcttgatcactatctgtctgcttggctatctactttctgccgaatgtaccgtgttcctggaccacgagaatgccaataagatattgaatagacccaaacggtataattccgggaagctcgaggaattcgtgcagggcaatctggaacgcgagtgcatggaggagaagtgttcattcgaggaggctcgagaggtcttcgagaacacagagcgcaccacagagttctggaaacaatatgtggatggggatcagtgtgagagtaatccttgcctcaacgggggatcctgcaaagatgacatcaattcctacgagtgttggtgcccattcggctttgagggaaagaactgtgaacttgacgtgacctgtaacataaagaacggtcgctgcgaacagttttgtaaaaacagcgccgacaacaaagtggtttgctcatgtactgaagggtatcgactggcagaaaatcagaagagctgtgagcctgcagtgccgtttccatgtggtcgggtcagcgtgtcacagaccagcaaattgacaagagcagagactgtatttccagacgtggactacgttaactcaacagaagctgagacgatcctggacaatataactcagtcaactcagtcatttaacgatttcactagggtagtgggaggggaggatgctaagccggggcaattcccctggcaggtagtcctgaacggtaaagtggatgccttctgcggtgggagtatagtgaacgagaaatggatcgttacagccgctcactgtgtagaaacgggggtgaaaataacagtcgttgcgggggagcacaacattgaggaaactgaacatacagagcagaaacgaaatgttatccgaatcatccctcatcataactataacgctgcaattaataaatacaaccacgatatcgcgctgcttgagttagatgagcctctcgtgctcaactcctacgttacccccatctgtatcgccgataaagagtataccaatattttccttaagttcgggtcaggctacgtctccggatggggacgagtgttccacaagggccgcagcgcacttgtcctgcagtacctgagagtgccattagtcgacagggcaacctgcctgcggtccactaaattcacgatctacaataacatgttctgcgccggttttcatgagggcggacgagatagctgtcaaggcgatagtggtggccctcatgtaaccgaagtggagggaacatccttcctgacaggcattattagctggggggaggagtgtgctatgaaggggaagtacggcatctacacaaaggttagtaggtacgtaaattggatcaaggagaagactaaactcact

SEQ ID NO: 8903 - DNA, 1383 bp, synthetic construct
  misc_feature 1..1383: note = source = /note="Description of Artificial Sequence: Synthetic coding sequence"
  source 1..1383: mol_type = other DNA
atgcagagagtgaatatgatcatggccgagtccccgggcctgattaccatctgtctgcttggttacctgctgtcggcggagtgtactgtctttcttgatcacgaaaacgcaaacaagattcttaaccgaccaaagagatacaactccggcaaacttgaagaatttgtccaaggaaatctcgagcgagagtgtatggaagagaagtgctccttcgaagaggcaagagaagtctttgaaaacaccgagaggactaccgaattctggaagcaatacgtggatggagatcaatgcgagtcaaatccttgccttaacggaggttcgtgcaaggatgacatcaactcgtatgaatgttggtgcccttttggctttgagggcaagaattgcgagcttgacgtgacttgtaacattaagaacggacgttgtgagcaattttgtaaaaactcggcagacaataaagtggtgtgttcgtgtacggagggttacaggcttgcagagaatcaaaagtcctgtgaacccgcagtgccatttccctgtggccgcgtgtcagtctcgcaaacgtccaaacttactcgcgcagaaactgtgtttcctgacgtggattatgtgaatagtaccgaagcggaaaccattcttgataacatcacccagtccacccaatcctttaatgattttaccagggttgtcggaggtgaggatgcaaaaccaggacagtttccgtggcaggtggtgttgaatggaaaggtggatgccttctgcggggggtcaatcgtgaacgaaaagtggatagtgactgcagcacattgtgtggaaaccggagtcaagataaccgtggtggccggagaacacaacatcgaggagactgagcacaccgagcagaaaagaaacgtcatacgaatcatacctcatcataactacaacgcagccataaacaagtacaaccatgatatagccttgctggaactggatgaaccgttggtgctcaactcatacgtgactcctatctgcatcgcagacaaggaatacaccaacatattcctgaaattcggatccgggtacgtgtccggctggggtagagtgttccataagggccggtctgcactggtgcttcaatacctgagagtgcctcttgtggatagggcaacttgtctgagatccaccaagtttaccatttacaacaatatgttctgcgcgggattccacgagggtgggcgggatagctgtcagggagattcaggcggaccccatgtgacggaagtggaaggaacttcctttctcactggcatcatttcatggggcgaggagtgtgcgatgaagggaaaatacggtatttacaccaaggtgtcgcggtacgtcaactggattaaggaaaagaccaaacttacc

SEQ ID NO: 8904 - DNA, 1383 bp, synthetic construct
  misc_feature 1..1383: note = source = /note="Description of Artificial Sequence: Synthetic coding sequence"
  source 1..1383: mol_type = other DNA
atgcagagagtcaatatgataatggcggaatcacctgggctcattaccatctgcctgctgggttacctgctttcggcagagtgtactgtctttctggatcatgaaaacgccaacaagatcttgaaccgccctaaaagatacaatagcggtaagctggaggaattcgtgcaaggaaatttggaacgcgaatgcatggaagaaaaatgttcatttgaagaagcgcgtgaggtgtttgaaaacactgagagaacgacggagttctggaagcagtacgtggatggtgaccaatgcgaaagcaatccttgtctcaatggaggctcatgtaaagatgatatcaactcgtacgaatgctggtgtccttttggattcgaaggtaagaactgtgaacttgacgtcacctgcaacatcaaaaacggtcgttgtgagcagttttgtaagaattccgcagataacaaggtcgtgtgttcatgtactgaaggataccggctcgcagagaaccaaaagtcttgcgagcctgcagtcccttttccctgtggacgagttagcgtgtcccaaaccagcaagctgacccgtgccgaaactgtgtttccggacgtggactacgtgaactccactgaagcggaaaccatcttggataacatcactcaatccacccaatcgttcaacgattttactagggtggtcggtggtgaagatgcaaaacctggccagtttccctggcaagtggtgttgaacggcaaggtggacgcgttttgtggcggttccatagtgaatgagaagtggatcgtgacggctgcacattgtgtcgaaaccggcgttaagataacggtcgtggcaggcgagcacaacattgaagagactgaacataccgaacagaagcgaaacgtgataaggattattcctcaccataactacaacgcagcaataaacaagtacaatcacgacatcgcccttctcgaattggatgagccgcttgtgcttaatagctacgtcactcctatctgtatagcagacaaagagtacactaacattttcctgaagtttggctccggatacgtgagcggctgggggcgggttttccataaggggagatctgcactggtcctgcagtaccttagggtgccgcttgtcgatcgggccacctgtctccgctccaccaaattcaccatatacaacaacatgttttgtgctgggtttcatgagggcggaagagattcctgtcagggcgattccggaggacctcacgtgactgaggtagaaggtacttcgttcctgaccgggattatctcctggggagaagaatgcgcgatgaagggaaagtacggaatctacacgaaggtgtcaaggtacgtgaattggataaaggaaaagaccaagctgacc

SEQ ID NO: 8905 - DNA, 1383 bp, synthetic construct
  misc_feature 1..1383: note = source = /note="Description of Artificial Sequence: Synthetic coding sequence"
  source 1..1383: mol_type = other DNA
atgcaacgcgtgaacatgatcatggcggagtccccgggactgatcaccatctgcctgctcggatacctcctgagcgcggagtgtactgtgttcttggaccacgaaaatgccaacaaaatcctcaaccgcccgaaaagatacaactctggaaagctggaggaattcgtgcaaggaaacttggaacgagagtgcatggaagagaagtgctcattcgaagaggcccgggaggtttttgagaataccgagaggacgaccgagttttggaagcaatacgtggacggtgaccaatgcgagtcgaacccgtgcctcaacggaggatcatgcaaagatgacatcaattcgtatgagtgctggtgcccgtttggatttgaggggaagaattgcgaactggacgtcacttgcaacatcaaaaatggtcgatgcgagcagttctgcaagaattccgccgacaacaaagtggtgtgttcgtgtactgagggatacagactggccgaaaaccaaaagtcatgtgagccagcagtcccttttccgtgcgggcgcgtgtccgtgagccaaacctcaaagctgacgagggcggagactgtgttccctgatgtggactacgtcaattccaccgaggctgaaactattctcgacaacattacccagtcgactcagtcgttcaacgatttcactcgggtggtgggcggagaggacgccaagccaggacagttcccctggcaggtcgtgttgaacggaaaagtggacgcattctgcggcggctcgatcgtgaacgagaaatggattgtgactgccgcccactgcgtggaaacgggtgttaagatcaccgtcgtggcgggcgaacacaacatcgaagaaaccgagcacactgaacaaaagaggaatgtgatccgcatcatcccccatcataactacaatgctgccatcaacaaatacaatcacgatatcgcactcctggaactcgatgaaccgctcgtgctgaactcgtatgtcactccgatctgtattgcagacaaggaatacactaatatctttctgaagttcggatcgggctacgtctcgggatggggacgggtgtttcataagggaagaagcgccctggtgctgcaatacctccgggtgccgttggtggatcgtgcgacttgcctcaggtcaaccaagtttaccatttacaacaacatgttctgcgcgggtttccatgagggagggcgcgactcatgccagggcgattcgggtggaccccacgtcaccgaagtcgaggggactagcttcctgaccggaatcatctcttggggagaagaatgcgccatgaagggaaagtacggcatttacactaaggtgtccagatatgtgaactggatcaaggagaaaacgaaacttact

SEQ ID NO: 8906 - DNA, 1383 bp, synthetic construct
  misc_feature 1..1383: note = source = /note="Description of Artificial Sequence: Synthetic coding sequence"
  source 1..1383: mol_type = other DNA
atgcagcgcgtcaatatgatcatggctgaatcccccggcctgatcactatctgcctgctcggatacctgctgtctgccgagtgcactgtgttcctggaccacgagaacgcgaacaaaatcctgaatcggccaaagagatacaactcaggaaagttggaggagtttgtgcaggggaacttggaaagagaatgcatggaagagaagtgcagcttcgaggaggcacgcgaggtattcgagaacaccgaacgcactacggagttttggaagcaatacgtggacggcgaccagtgcgaatcaaacccgtgcctgaacggaggatcgtgcaaggacgacataaacagctacgaatgttggtgcccattcgggttcgaaggaaagaactgcgaactggatgtgacctgcaacattaagaacggtcgctgtgaacagttctgcaaaaacagcgcagataacaaggtcgtctgcagttgcactgaaggataccgcctggccgagaatcaaaagtcttgtgaaccggcggtgccttttccgtgcggccgggtgtcggtgtcccagacctcgaaacttacgcgggctgagactgtattccctgacgtggactacgtcaactcgacggaggcggaaactatcctcgacaatatcacccagtccacccaatcctttaatgatttcaccagggtggtgggaggagaggatgccaagccaggacagttcccatggcaagtcgtcctgaacggaaaagtggacgccttctgtggtggatcgatcgtgaacgaaaaatggatcgtgaccgcggcgcattgtgtggagacgggagtgaagatcactgtcgtggctggcgagcataacatcgaagaaaccgagcacactgaacaaaagcgcaatgtgatccgcatcatcccgcaccacaactacaatgccgcaataaacaagtataaccatgatatcgccctgcttgagctggacgagccactggtcctcaactcctacgtgactccgatctgcatcgcagacaaggagtacacgaatatctttctgaagttcggctcgggttacgtctcgggatggggtagagtctttcacaagggcagatcggccctggtgctccagtatctgcgcgtcccgcttgttgatcgggcgacctgcctcagatccaccaaattcaccatttacaacaacatgttctgcgctggatttcatgaaggaggaagggactcctgccaaggagactccggtggtccgcacgtgaccgaggtggagggcacttccttcctgaccggaatcatctcgtggggagaagagtgcgccatgaagggaaaatacggtatctacaccaaggtttccagatacgtgaactggattaaggaaaaaaccaaactgact

SEQ ID NO: 8907 - DNA, 1383 bp, synthetic construct
  misc_feature 1..1383: note = source = /note="Description of Artificial Sequence: Synthetic coding sequence"
  source 1..1383: mol_type = other DNA
atgcaacgagttaatatgataatggcggaatcgccgggtttaataacgatatgtctattaggttatttactatcggcggaatgtacggtatttctagatcatgaaaatgcgaataaaatattaaatcgaccgaaacgttataattcgggtaaactagaagaatttgtacaaggtaatttagaacgtgaatgtatggaagaaaaatgttcgtttgaagaagcgcgtgaagtatttgaaaatacggaacgaacgacggaattttggaaacaatatgtagatggtgatcaatgtgaatcgaatccgtgtttaaatggtggttcgtgtaaagatgatataaattcgtatgaatgttggtgtccgtttggttttgaaggtaaaaattgtgaactagatgttacgtgtaatataaaaaatggtcgttgtgaacaattttgtaaaaattcggcggataataaagtagtttgttcgtgtacggaaggttatcgtctagcggaaaatcaaaaatcgtgtgaaccggcggttccgtttccgtgtggtcgtgtatcggtatcgcaaacgtcgaaattaacgcgtgcggaaacggtttttccggatgtagattatgttaattcgacggaagcggaaacgatactagataatataacgcaatcgacgcaatcgtttaatgattttacgcgtgttgtaggtggtgaagatgcgaaaccgggtcaatttccgtggcaagttgtactaaatggtaaagtagatgcgttttgtggtggttcgatagtaaatgaaaaatggatagttacggcggcgcattgtgttgaaacgggtgtaaaaataacggtagtagcgggtgaacataatatagaagaaacggaacatacggaacaaaaacgaaatgtaatacgaataataccgcatcataattataatgcggcgataaataaatataatcatgatatagcgttattagaattagatgaaccgttagttttaaattcgtatgtaacgccgatatgtatagcggataaagaatatacgaatatatttttaaaatttggttcgggttatgtatcgggttggggtcgagtttttcataaaggtcgttcggcgctagtattacaatatttacgagtaccgttagtagatcgtgcgacgtgtttacgttcgacgaaatttacgatatataataatatgttttgtgcgggttttcatgaaggtggtcgagattcgtgtcaaggtgattcgggtggtccgcatgtaacggaagtagaaggtacgtcgtttctaacgggtataatatcgtggggtgaagaatgtgcgatgaaaggtaaatatggtatatatacgaaagtatcgcgttatgtaaattggataaaagaaaaaacgaaattaacg

SEQ ID NO: 8908 - DNA, 1383 bp, synthetic construct
  misc_feature 1..1383: note = source = /note="Description of Artificial Sequence: Synthetic coding sequence"
  source 1..1383: mol_type = other DNA
atgcagagggtgaatatgatcatggccgagtcccccggcttgatcactatctgtctgttgggatatctgctgtcagccgagtgtactgtgttccttgaccacgaaaacgccaacaagattctgaaccggcctaagcggtacaacagcggaaaactggaggaatttgtgcagggaaatctggaacgggagtgcatggaagaaaagtgctccttcgaggaggcccgggaagtgttcgaaaacactgagcggactacggaattctggaagcaatacgtggatggagatcaatgtgagtcaaatccgtgccttaatggcgggtcctgcaaggacgatatcaacagctatgagtgctggtgtcccttcggttttgagggcaaaaactgcgagcttgacgtgacctgcaacatcaaaaatggccgctgtgaacagttctgcaagaattcggccgacaacaaggtggtgtgctcatgcaccgagggatacagactcgcggagaatcaaaaatcttgcgaaccggccgtgccgttcccttgcggacgcgtgtcagtctcacagacctcgaagctcacgagagcagaaactgtgttcccggacgtcgattatgtgaattccactgaggcggaaaccattctggacaacattacccagtcgactcagagctttaatgatttcacccgggttgtgggaggagaagatgccaagccgggacaattcccatggcaggtcgtactgaacggcaaggtcgacgctttttgtggcggatcaatcgtgaacgaaaagtggatagtgaccgccgctcattgtgtggaaaccggcgtgaagatcactgtggtggcaggagagcacaatatcgaagaaacggagcataccgaacagaaacgcaatgtcatcagaatcatcccgcaccataactacaatgcagccatcaataagtacaatcacgatatcgccctgctcgaactggacgaaccgctcgtcctgaattcatacgtgactccaatctgcatcgccgacaaagaatacaccaatatcttcctgaaatttgggagcgggtacgtgtcgggatggggaagagtattccacaaggggaggtctgccctggtgctgcagtatctccgcgtcccccttgtggacagagctacctgccttcggtccacgaaattcaccatctacaacaacatgttttgcgcaggattccacgagggaggtagagactcgtgtcaaggagactccgggggtccccatgtgaccgaagtggaaggcacctccttcctcactggaatcatttcctggggcgaagaatgcgctatgaaggggaagtacgggatctacactaaggtgtcgcggtacgttaactggatcaaggagaaaacgaaactcact

SEQ ID NO: 8909 - DNA, 1383 bp, synthetic construct
  misc_feature 1..1383: note = source = /note="Description of Artificial Sequence: Synthetic coding sequence"
  source 1..1383: mol_type = other DNA
atgcagcgcgtgaacatgatcatggcagagtcgccaggtttgatcactatctgcttgctcggatacttgctttcggccgaatgtactgtctttttggaccatgaaaacgcgaataagatcctgaaccgtccgaagcgctacaacagcggaaagctcgaggaattcgtccaaggcaatctggaacgggagtgcatggaggagaagtgtagcttcgaggaagcaagagaagtgtttgaaaacaccgaaagaaccactgaattttggaagcagtacgtggatggtgaccaatgcgaatcgaacccatgcctcaacggcggatcctgcaaagatgacattaactcctacgagtgttggtgccccttcggatttgaaggcaagaattgcgaactcgatgttacttgcaacattaagaatggacgctgcgagcagttctgtaagaattccgcggataacaaggtagtgtgtagctgcactgagggataccggctggccgaaaatcaaaaatcctgcgaacctgctgtgccgttcccctgcggtcgggtttctgtgtcccaaacttccaaactgaccagggccgagactgtgtttccggacgtggactatgtgaactcgactgaagccgaaaccatcctggacaatatcactcagtcgactcagtcgttcaatgacttcacgagggtcgtgggtggagaagacgctaagccaggacagttcccgtggcaggtggtgctgaacggtaaagtcgatgcattttgcggtggatcaatcgtgaacgaaaaatggatcgtcaccgcagcccactgcgtggagactggcgtgaaaatcacggtggttgccggagagcacaacatcgaagagactgaacacaccgagcagaaacggaacgtgatcagaatcatcccacaccataactataacgccgccatcaacaaatacaaccacgacattgccctgctcgagctggacgaaccgctggtgctgaatagttacgttactccgatctgcatcgcggacaaagagtacaccaatatctttctcaagttcggatcaggatacgtctccgggtgggggcgtgtgtttcataagggccggtccgcacttgtgctccagtaccttagggtcccgctggttgatcgggcaacgtgtttgagaagcactaagttcactatatacaataacatgttctgcgctggcttccatgaaggcggacgcgacagctgccagggagattcaggaggaccacacgtcaccgaggtcgaaggcacttccttcctcactggaattatctcctggggagaggagtgcgccatgaaaggaaaatacggaatctataccaaggtttccagatacgtgaactggattaaggagaagacgaagctgact

SEQ ID NO: 8910 - DNA, 1383 bp, synthetic construct
  misc_feature 1..1383: note = source = /note="Description of Artificial Sequence: Synthetic coding sequence"
  source 1..1383: mol_type = other DNA
atgcagcgcgtgaacatgatcatggcggagtcccctggactgatcactatctgcctgctgggatacctgctgtccgcggagtgcaccgtgttccttgaccacgagaacgcgaacaagatcctgaaccgcccaaagagatacaactcgggtaaactggaagaattcgtccaggggaacctcgagagagagtgcatggaagaaaaatgctccttcgaggaggcccgggaagtgttcgaaaatactgaacggaccactgagttctggaaacaatacgtggacggggatcagtgcgagtccaacccttgcctgaacgggggatcgtgcaaggatgacatcaattcatacgaatgctggtgtccattcggtttcgaaggaaagaactgcgaattggatgtgacttgcaatatcaagaatgggcggtgcgaacagttctgcaagaactccgccgacaacaaggtcgtgtgctcctgcacggaaggctacaggctggccgaaaaccagaagagctgtgagccagcagtgccgttcccgtgcggtcgcgtctccgtgtcacagaccagcaaattgacgagagcggagactgtgttcccggacgtggattacgtgaattccactgaagccgaaaccatcctggacaacatcacccagtcaacgcaatcgttcaatgatttcaccagagtcgtcggtggggaagatgcaaagccgggacaattcccgtggcaagtggttctgaatggcaaggtggacgccttctgtggagggtctatcgtgaacgagaagtggatcgtcactgctgcacattgtgtggaaactggcgtgaagatcactgtcgtggcaggggaacacaacatcgaggaaactgagcacactgaacagaagcgaaatgtgattcgcattatcccgcatcacaactacaatgcagccatcaataagtacaatcacgacatcgcgctccttgaactcgacgagccactcgtgctcaactcctacgtcactcctatttgtatcgccgacaaagagtacacgaacatctttcttaagttcggatccggatacgtgtcaggctggggtcgggtgtttcacaagggacgaagcgctctggtgctgcaataccttagggtgcccctggtcgacagagcgacgtgccttcgaagcaccaagtttactatctacaacaatatgttctgtgcgggatttcatgagggcggacgggacagctgccagggagactcaggcggcccgcacgtgactgaggtggagggcacctcattcctgactggaattatctcttggggggaggagtgcgctatgaagggaaagtacggaatctacaccaaagtctcccgatacgtcaactggatcaaggaaaaaactaagctgacc

SEQ ID NO: 8911 - DNA, 1383 bp, synthetic construct
  misc_feature 1..1383: note = source = /note="Description of Artificial Sequence: Synthetic coding sequence"
  source 1..1383: mol_type = other DNA
atgcaacgagtgaacatgataatggctgagagcccaggtctgattacgatttgcctgttgggctacctgctgtcagccgaatgtaccgtatttctcgatcacgagaacgcgaacaagatccttaatcggcccaagaggtataattctgggaagctggaggaatttgtccaggggaacctggagcgggagtgtatggaagagaagtgctcctttgaggaggcacgcgaggttttcgagaacaccgaaaggaccaccgaattctggaaacaatatgtagacggagatcagtgtgagtcaaacccatgcctgaatggagggagctgtaaggatgacatcaatagttacgaatgctggtgcccatttggatttgaggggaagaattgcgaattggacgtgacatgcaatattaagaatgggcgatgcgaacaattctgtaagaattcagctgataacaaagtggtctgttcctgcactgaaggctaccgcttggccgagaatcaaaagtcctgtgagcctgccgtgcctttcccctgtggacgggtgtctgtctcccagacttccaagctgactagagcggagaccgtgttccccgacgtggattacgtgaattctaccgaagcggaaaccattttggataacattacgcagtccactcaatcttttaacgactttactagagttgtggggggagaagatgcaaaacccggccaattcccttggcaagtggtcctgaacggcaaggtggacgccttctgcggcggatccatcgtgaatgagaaatggatagtgaccgctgcccattgcgtagaaaccggggtcaagatcaccgtggtggccggcgagcataacattgaagaaaccgagcacaccgagcagaagcggaatgtcatacggatcatcccacatcacaactacaatgcagccatcaacaagtataaccatgacatcgccctccttgagctggacgagccacttgtgctgaatagttatgtgacccctatctgtatcgccgataaggaatacacgaacattttcctcaagttcggttcaggatacgtgagcggttgggggcgcgtgtttcacaaaggaagaagcgcactggtgctgcagtatctgcgggtgccactggtggatagagctacttgccttagaagtaccaaattcaccatttacaacaacatgttctgtgctggcttccacgagggagggcgcgattcatgccagggggacagcggaggccctcatgtcacagaagttgaagggactagtttcttgaccggtatcattagctggggggaagaatgtgccatgaaaggcaagtacggtatctatactaaggtgagtcgctacgttaattggataaaggagaagactaagctgaca

SEQ ID NO: 8912 - DNA, 1383 bp, synthetic construct
  misc_feature 1..1383: note = source = /note="Description of Artificial Sequence: Synthetic coding sequence"
  source 1..1383: mol_type = other DNA
atgcagcgtgtcaacatgatcatggcggagtctcccggactcatcacaatttgcctgctgggatacctgctgtctgccgagtgtactgtgttcttagaccatgaaaacgctaataagattctgaataggcctaagcgctacaattctgggaagttggaggaatttgtgcaaggaaaccttgagcgtgaatgcatggaagaaaaatgcagctttgaagaggcgagggaggtattcgagaacaccgagaggaccactgagttctggaagcaatacgttgatggagatcagtgtgagagtaatccttgtttgaacggcggtagttgcaaggatgacatcaatagttacgagtgttggtgtccttttggtttcgagggcaaaaactgcgagcttgatgtgacttgtaatattaaaaacggccgatgtgagcagttctgtaaaaactctgctgataataaagtggtgtgctcttgcaccgagggatatcgcttggctgagaaccagaaaagctgcgaaccagccgtcccctttccctgcggcagagtcagcgtctctcagaccagcaaactgacaagggctgagacagtgtttcccgatgtggattacgtcaactctaccgaggctgaaacgatactcgacaacataacccaatccacccagagcttcaacgatttcacccgagtggtgggaggagaagacgcaaagccaggacagtttccctggcaggtcgtcctcaatggaaaggttgacgcattttgcggcggatcaatcgtgaatgagaaatggatcgtcaccgctgcccactgtgtggagacgggagtgaagatcaccgttgtcgctggagagcacaacatcgaagagactgagcacactgaacagaagagaaacgttataaggataattccacaccataactacaacgcagccatcaataaatacaaccacgatatagcactcctggagctggatgaaccccttgtgcttaactcttacgtcaccccaatctgcatcgcagataaagagtacacaaatatctttctcaaatttggatcaggctacgtctctggctggggcagagtgttccacaaagggaggtctgctctggttctccagtatttaagggtgccccttgtggacagggccacttgcctccggtctacaaagttcacaatctataacaacatgttttgcgcaggattccatgaggggggcagagactcctgtcagggagattccggcggccctcatgtgaccgaagttgagggcactagttttctgactggcatcattagctggggagaggaatgcgctatgaaaggaaaatatgggatctacacaaaagtcagccgctacgtgaactggattaaggagaaaaccaaactgaca

SEQ ID NO: 8913 - DNA, 1383 bp, synthetic construct
  misc_feature 1..1383: note = source = /note="Description of Artificial Sequence: Synthetic coding sequence"
  source 1..1383: mol_type = other DNA
atgcagcgcgttaatatgatcatggccgaatcaccaggactgatcactatatgcttactggggtacctgttgtcagctgagtgtactgtgttcctcgaccacgaaaatgcaaacaagatcctgaaccgccccaaaaggtataacagtggcaagctggaagaatttgtccaaggcaatctggaaagggagtgtatggaagagaagtgcagcttcgaagaggcccgggaggtctttgaaaataccgagagaaccacagaattttggaagcagtacgtggacggcgaccagtgcgagtccaatccctgtctcaacgggggttcctgtaaagatgacatcaatagctatgagtgttggtgtcctttcgggtttgaaggcaagaactgtgaactggacgtaacatgcaatatcaaaaatgggaggtgcgagcagttctgtaagaatagcgcagacaataaggtcgtgtgttcatgcaccgaaggttataggctcgccgagaatcagaagtcatgcgaacccgctgtgccatttccttgtgggagagtgtctgtttcacagacctccaaactgacccgtgcagagaccgtctttccggatgttgattatgtaaatagcacggaagcagagactatcctggataacattactcagagcactcagtccttcaatgatttcacccgggtggttggcggcgaggacgccaagccagggcaattcccttggcaggttgtcctcaatggaaaggtagatgccttctgtggcgggagcatcgtcaatgagaagtggatcgttactgctgcacactgcgtggaaacaggtgttaagatcacggtagtagctggggaacacaacattgaggaaaccgaacacacagagcagaaacgcaacgtgatccgaattattcctcaccacaattacaacgccgcaatcaacaaatataatcacgacatcgctctgctcgaactggacgaaccactggttcttaactcttatgtgacacctatctgcatcgccgacaaggagtatacgaacatatttttgaaattcggaagcggctatgtcagcggatggggacgcgtgttccataagggccggagtgcacttgtcctgcaatacctgagagtgccgttggtcgacagagccacttgtctgcggtccaccaagttcactatttataataacatgttttgtgcaggattccacgaaggtggacgggattcttgtcagggggacagcggtgggccccacgtcacagaggttgaaggcacttctttcctaactgggatcatcagttggggcgaagagtgtgctatgaaaggtaagtatgggatatatacgaaagtttcccggtacgtgaattggataaaggaaaagacaaagcttact

SEQ ID NO: 8914 - DNA, 1383 bp, synthetic construct
  misc_feature 1..1383: note = source = /note="Description of Artificial Sequence: Synthetic coding sequence"
  source 1..1383: mol_type = other DNA
atgcagagagtcaacatgataatggcggaatcacctggcctcatcactatctgtctgctgggataccttctgtcggcggaatgcaccgtctttctcgatcatgagaatgcaaacaagatactgaataggccaaagcgctacaactccggaaaacttgaggagttcgtccaaggcaaccttgaaagggaatgtatggaagagaagtgcagctttgaagaggcgagagaggtgtttgaaaataccgagcgtactaccgaattctggaagcagtacgttgatggggaccagtgtgaatcgaacccttgtcttaatggaggatcatgcaaggatgacattaacagttatgagtgttggtgtcccttcggctttgaaggcaagaactgtgagcttgacgtgacttgcaacatcaagaatggtagatgtgaacagttctgtaagaattcggcagataacaaagtagtgtgtagctgtacggagggctatagactcgccgaaaaccaaaagtcatgtgaaccagccgtcccgttcccgtgtggtcgcgtgtccgtttcgcaaacctcgaagttgactagggcggagactgtctttcccgacgtggattacgtgaatagtaccgaagcagaaactattctcgacaacataacccaatcgactcagagcttcaacgattttacgcgtgtagtgggcggagaggatgctaagcctggacagtttccgtggcaggtcgtgttgaatggaaaagtggatgcattctgtggaggatcgatcgtgaacgaaaaatggatcgtgaccgcagcccattgtgtggaaaccggtgtcaagattacggtggtggccggggaacataacattgaagaaactgaacacacggagcaaaagcgcaacgtgattcggattatcccacaccataactacaatgcagccatcaataagtacaatcatgacattgcacttctggaacttgatgagccactggtgttgaattcttacgtgacgcctatttgcattgcagacaaggagtacactaacatctttctgaaatttggctcagggtatgtgtccggctggggccgagtctttcacaaaggaaggtcagcacttgtgttgcaatacctgcgggtaccactggtcgaccgtgccacttgcttgcggtccactaaattcaccatctacaacaacatgttttgcgctggattccacgaaggggggagagattcctgccaaggagattcaggtggacctcatgtgaccgaagtcgagggtaccagctttcttaccggtatcatttcctggggtgaagaatgcgcaatgaaaggaaaatacggtatatacaccaaggtgagcaggtacgtgaattggattaaggaaaaaactaaactcacc

SEQ ID NO: 8915 - DNA, 1383 bp, synthetic construct
  misc_feature 1..1383: note = source = /note="Description of Artificial Sequence: Synthetic coding sequence"
  source 1..1383: mol_type = other DNA
atgcagcgggtcaatatgattatggccgagtcgccaggtctgatcactatctgcctgctgggatacctgctctccgcggaatgtaccgtctttctggatcacgaaaacgcaaataagatcctgaatcgccccaagagatataacagcgggaagctggaggagttcgtgcaaggcaatctggaaagggagtgcatggaagaaaagtgttcctttgaggaggcccgcgaagtgtttgaaaacactgaacgcaccaccgaattttggaagcagtacgtggacggtgatcagtgcgaatcgaatccgtgcctcaacgggggctcttgcaaggacgatatcaactcctacgagtgctggtgtccgttcggcttcgaggggaaaaactgcgaactcgatgtgacttgtaacatcaagaacggtagatgcgaacaattttgcaagaactcagcagataacaaggtggtctgcagctgcactgagggctacaggctggcggagaaccagaagtcatgtgaacctgcggtgcctttcccatgcggtcgggtgtccgtgtcccagacgtcaaagctgacccgagccgaaaccgtctttccggacgtggactacgtgaactcgacggaagccgaaaccatcctcgacaacatcactcaatcgactcagtcgtttaacgacttcacccgggtggttggaggagaagatgccaagccgggtcagtttccatggcaggtggtcttgaacgggaaggtagacgccttctgtggaggatccattgtcaatgaaaagtggatcgtcactgccgcccattgcgtggaaaccggagtgaaaatcaccgtcgtggccggagaacataacatcgaggaaactgaacacactgagcaaaaacgcaacgtgatccgcatcatcccccatcacaactacaacgcggcaatcaacaagtacaaccatgacatcgcattgctggaactggacgagccactggtcttgaactcctacgtcacgccgatctgcatcgcggacaaggaatatactaacatcttcctgaaattcggttccggatacgtgagcgggtggggaagagttttccataagggacggtcagccttggtgttgcagtacctgcgggtgcccctcgttgacagggccacctgtctgcgctccactaagtttaccatctacaacaacatgttttgcgccggttttcacgagggaggccgcgatagctgccagggcgacagcggcggaccgcacgtgactgaggttgaaggaacttcgttcctcactgggattatctcgtggggagaagagtgcgcgatgaaaggcaagtatggaatttacacgaaagtcagcagatacgttaactggatcaaggagaaaaccaagctgact

SEQ ID NO: 8916 - DNA, 1383 bp, synthetic construct
  misc_feature 1..1383: note = source = /note="Description of Artificial Sequence: Synthetic coding sequence"
  source 1..1383: mol_type = other DNA
atgcagcgtgtcaatatgattatggcggagagtcctggtctcataacaatctgcctgctcggatatttgcttagcgccgagtgcacggtattcctggaccacgagaatgccaacaagattcttaataggccaaaacgttataatagtggaaagctcgaggagtttgttcaaggtaatctggaacgagaatgcatggaagagaaatgttctttcgaagaagcgagggaggtgtttgagaatacggagagaacaacggagttctggaagcaatacgtcgacggggatcaatgcgagtctaacccctgcttgaacggcgggtcttgcaaagatgatattaacagctatgaatgttggtgcccgttcggatttgaagggaagaattgtgaactcgacgtgacttgcaacataaagaacgggcggtgcgaacaattctgcaaaaattcagccgataacaaggtcgtttgttcctgtaccgagggctaccggcttgcagaaaaccagaaatcatgtgagccggccgtgccatttccgtgtgggcgtgtttccgtgtcgcagacttccaaactgactagggctgagaccgtattccccgacgtggactatgtgaacagtacagaagccgagacaatcctagataatatcactcaaagcacccagtcgttcaacgacttcactcgggttgtcggtggggaagacgctaagccagggcagtttccgtggcaggtggtcctcaacggcaaggtcgacgccttttgtggggggtccatcgtcaacgagaagtggatcgtaaccgccgcacattgtgtcgagacgggcgttaaaatcacggtcgtcgccggagagcataacattgaggagacagagcatacagagcaaaaacgaaatgtcatccgcatcatcccccatcacaattacaacgctgcaattaataagtacaaccacgatattgcactgcttgaattggacgaacctctggttctcaatagctatgttactcctatctgcatagcggacaaagaatacactaatatcttcctgaagttcggctccgggtatgtctccggttggggcagggtctttcataaggggcgatctgccttagttctgcagtatctgagggtcccactcgtggatagggcgacttgcttgagaagtacgaaattcactatttacaataatatgttttgtgcaggatttcatgagggcggacgtgatagctgccagggcgacagtggaggccctcacgtgaccgaagtcgagggcacaagcttccttactggcatcatctcctggggcgaagaatgtgctatgaaaggcaagtatggcatttataccaaggtctctcgatatgtgaactggataaaagaaaaaaccaagcttacc

SEQ ID NO: 8917 - DNA, 1383 bp, synthetic construct
  misc_feature 1..1383: note = source = /note="Description of Artificial Sequence: Synthetic coding sequence"
  source 1..1383: mol_type = other DNA
atgcagcgcgtgaacatgattatggccgagtcccctggacttattaccatctgtctcctcgggtacctgctgtcggccgaatgcaccgtgttcctggatcatgaaaacgcaaacaaaattcttaaccgaccgaaaagatacaattcgggaaagttggaagaatttgtgcagggtaatcttgaacgggagtgcatggaggaaaaatgtagctttgaagaagcccgtgaagtgttcgagaatacggagcgcactaccgaattctggaaacaatacgtcgatggtgaccagtgcgaatccaacccatgtttgaatggagggtcgtgtaaggatgatatcaattcgtatgagtgttggtgccctttcggtttcgagggtaagaactgtgaacttgacgtgacctgcaacataaagaacggaagatgtgaacaattttgcaagaactccgcagataacaaagttgtgtgttcctgtaccgaaggatacagacttgctgagaatcaaaaaagctgcgagccggcagtcccttttccctgtggacgggtatccgtgtcgcagacgtctaaacttaccagggcggagactgtgtttcccgacgtggattacgtcaacagcactgaagcggaaaccatccttgacaacatcactcagtcgacgcaatcctttaacgactttaccagggtggtcggcggagaagatgccaagccgggacagttcccatggcaagtggttctcaacggaaaggtcgatgccttttgtggaggaagcattgttaacgagaagtggatagtgaccgcagcacattgtgtggagacgggtgtcaaaatcactgtcgtggcgggagaacataacattgaagaaaccgaacataccgaacaaaagagaaatgttattcgcattatcccacatcacaattacaacgcagcgatcaacaagtataatcatgatatcgcccttctggaacttgatgaacctctcgtgctgaactcctacgtcacgcccatctgcatcgcagataaagagtacactaacattttcttgaagttcggttcagggtacgtgtcaggctggggtcgcgtgtttcacaagggtcggtctgcacttgtgctgcagtatctccgcgtgcctctcgtggacagagcgacttgtcttaggtcgactaagttcactatttacaacaacatgttctgtgcagggtttcatgaaggaggtcgcgattcctgtcagggagattccggaggacctcacgtcactgaggtggaagggacctcgtttctgactgggatcattagctggggtgaagaatgtgcaatgaaaggaaagtacgggatttacactaaggtgtcgcgatacgtcaattggattaaagaaaagactaagctcact

SEQ ID NO: 8918 - DNA, 1383 bp, synthetic construct
  misc_feature 1..1383: note = source = /note="Description of Artificial Sequence: Synthetic coding sequence"
  source 1..1383: mol_type = other DNA
atgcagagagtgaacatgattatggccgagtctccagggctaatcacaatttgtctcctggggtatctcctctcagccgagtgcactgtgtttcttgaccatgaaaacgccaataaaatcctgaacaggcccaaaaggtacaactcggggaaacttgaggaattcgtgcaggggaatctggaacgcgagtgtatggaggagaaatgctcttttgaggaggctagggaggtgttcgagaataccgagagaactactgagttttggaaacagtacgtggacggagatcaatgtgagtctaacccgtgcctgaatggaggcagctgcaaagatgacattaacagctatgaatgctggtgccccttcggattcgaaggcaagaactgtgagcttgatgtaacgtgtaatataaagaatggacggtgtgaacagttttgcaaaaacagtgcagacaataaagtcgtttgtagttgtactgaagggtatcgtttggccgagaaccagaagtcatgtgaacccgccgtccctttcccatgcggacgagtatcggtttcccagactagtaagttaacccgtgccgagactgtgtttccagacgttgactacgttaattcgacagaggcagaaaccattctcgataacattacccaatctacccagtcctttaatgactttacacgcgtggtgggcggtgaggacgccaaaccaggacaatttccctggcaggttgtgctcaacggaaaagtcgatgctttttgtgggggatctatcgtcaatgagaaatggattgttaccgcagcccattgtgtagaaaccggtgttaaaattaccgtggtggctggggagcataacattgaggagactgaacacacggagcagaagcggaatgtaatcaggatcataccccaccacaattacaatgcagcgattaataaatacaatcacgatattgcattactggagttagatgaaccactggtgcttaattcctatgtgactcctatttgcatagctgacaaggagtacaccaatatcttcctgaagttcgggtctggatacgtgagtgggtggggacgtgtgttccataagggacgttctgctctggtcctgcaatacctaagggtccccctggtggatagagccacttgcctgcgaagcaccaagtttacaatctataataatatgttctgcgcaggatttcacgaggggggcagggactcatgccagggcgattccggcgggccccatgtgaccgaggtcgagggcacttcctttctgaccggtatcatttcttggggggaagaatgcgcaatgaaaggaaagtacgggatctacactaaagtgagcaggtacgtcaattggataaaagaaaagacaaagcttaca

SEQ ID NO: 8919 - DNA, 1383 bp, synthetic construct
  misc_feature 1..1383: note = source = /note="Description of Artificial Sequence: Synthetic coding sequence"
  source 1..1383: mol_type = other DNA
atgcagcgtgttaacatgataatggcggagtctcccggtttgattacaatctgcctgctcggctacctgctgtccgccgaatgtactgtgttcctggaccacgagaacgccaataagatcctaaaccggcccaagaggtacaacagtgggaagctggaagagttcgtgcagggcaatttggaacgcgagtgtatggaggagaagtgttctttcgaagaggctagagaggtgttcgagaacactgaaagaacaacagaattctggaagcagtatgttgatggtgatcagtgtgaatccaatccctgcttgaacggtgggtcttgtaaggacgacataaattcctacgagtgctggtgccccttcggttttgagggtaagaactgcgagttggacgttacgtgcaacatcaaaaacggccggtgcgagcagttctgcaagaatagcgccgataacaaagtggtgtgctcctgcaccgaggggtatcgactggcagaaaatcagaagtcttgcgagccggctgtgcccttcccctgcggtagggtgagtgtcagccagactagtaagctgaccagagccgagacggttttccctgacgtcgactatgtgaactccactgaagctgagaccattctggacaacataactcagtctacgcaatctttcaatgatttcaccagagtggttggaggcgaagacgccaaacccggacaattcccctggcaggtcgttcttaacggaaaggtggatgcgttttgcgggggctctatagtgaacgaaaaatggattgttaccgccgctcactgtgtggagactggagtcaagattacagtcgtggctggggaacacaatatcgaggagactgaacataccgagcaaaagcgaaacgtcatccggatcatccctcaccataattacaatgctgctattaataagtacaaccatgatattgccttgttggagcttgatgaacccttggtcttgaattcttacgtgacaccaatctgcattgccgacaaagagtataccaacattttcctgaagttcggtagcggctacgtgagcggctgggggagggtgttccacaaaggaagatcagctctggtgctccagtacctaagggtccctctggtagatagagcaacgtgcctccgaagcactaaatttaccatctacaataacatgttttgcgctggattccatgaggggggtcgggattcatgtcagggcgattcgggcggcccccacgtgacggaagtagaggggacgagcttcctgacaggaataatcagttggggagaagagtgcgccatgaaaggtaaatatggcatctacactaaggtcagtaggtatgtgaactggatcaaggagaaaaccaaactgacg

SEQ ID NO: 8920 - DNA, 1383 bp, synthetic construct
  misc_feature 1..1383: note = source = /note="Description of Artificial Sequence: Synthetic coding sequence"
  source 1..1383: mol_type = other DNA
atgcaacgggtaaacatgatcatggctgaaagcccgggactcatcaccatctgcctccttggatacctcctgagcgctgaatgtaccgtgtttctcgatcatgaaaacgccaacaagatcttgaatcgccctaaaagatataacagtggaaagctcgaggaattcgtccagggaaacctcgaaagagaatgcatggaggaaaagtgcagcttcgaagaggcacgggaggtgtttgagaataccgagcgcactaccgagttctggaagcagtacgtggacggagatcaatgcgagtcgaatccgtgtctcaacggaggatcttgtaaggacgatatcaactcctacgaatgttggtgcccgttcggcttcgaggggaagaattgcgagctggacgtgacttgcaacataaagaatggccgctgcgagcagttctgcaagaattcggcggacaacaaggtcgtgtgttcttgcactgaaggctatcgcctggccgaaaatcaaaaatcatgcgagccggccgtgcctttcccatgtgggagggtgtcagtgtcgcagaccagcaagctcactcgggcggaaaccgtttttcctgacgtggattacgttaattcaaccgaggctgaaactatcctggataacataacccaatccactcaatcattcaacgatttcactcgcgtcgtggggggagaagatgcaaagcctggccaatttccgtggcaggttgtgcttaatgggaaggttgacgccttctgtggcggaagcattgtgaatgagaagtggatcgtgaccgcggcccactgcgtggaaactggtgtcaaaatcacggtggtggcgggagaacacaacatcgaggaaactgagcacactgaacagaagaggaacgtcattagaattatcccacatcacaattacaacgcggcaatcaataagtacaaccacgatatcgcactgctggagctcgacgagcccttggtgctgaacagctacgtgacccctatctgcattgccgacaaggagtacaccaacatcttccttaagttcggatccggatacgtgtctggatggggtcgggtctttcataaaggtcgctcagcattggtcctccagtacctgcgcgtcccgctggtggaccgggcaacttgcctgagatcaaccaagttcactatctacaataacatgttctgcgccggatttcacgagggagggagggactcgtgccagggagattcgggaggaccgcacgtgacggaagtagaggggacttccttcctgaccggtatcatcagctggggggaagagtgcgcaatgaagggaaaatacggtatctacacgaaagtctccagatacgtgaactggatcaaagaaaaaacgaaactgacc

SEQ ID NO: 8921 - DNA, 1383 bp, synthetic construct
  misc_feature 1..1383: note = source = /note="Description of Artificial Sequence: Synthetic coding sequence"
  source 1..1383: mol_type = other DNA
atgcagcgcgtgaacatgattatggctgaaagcccggggctgatcaccatttgtctgctgggttatcttctctccgctgagtgtaccgtgttcctggaccatgaaaatgcgaataagatcttaaaccggcctaaacgctacaactcgggcaaactggaggagttcgtccaaggcaacctggagcgcgagtgtatggaggagaagtgttcctttgaggaagcccgcgaagtgtttgaaaacacggaacgcactacggagttttggaagcagtacgttgacggagaccagtgcgaatctaatccgtgtctgaacggtggtagctgtaaggatgacattaatagctatgagtgctggtgtccatttggtttcgaaggcaaaaattgcgagctggacgtcacctgcaatatcaagaacggccgatgcgaacaattttgtaaaaactcagcagacaacaaagtggtctgttcctgtactgaaggctaccgcttggccgaaaaccagaaatcttgcgagccggcggtgcccttcccatgcggcagggtcagcgtctctcagaccagcaagctaactagagccgaaacggtttttccggatgttgattacgtcaatagtacggaggccgaaacgattctggacaatattacgcagtcgacgcaaagctttaatgatttcacgcgcgttgtcggcggagaggatgctaagccaggccaatttccgtggcaggtcgttttgaacggtaaggtcgatgcattttgcggcggctccatcgtgaatgaaaagtggatagtgacggcggcacactgcgtggagactggtgtgaaaatcacagtcgtcgctggagaacacaatattgaagagacggaacacaccgaacagaagcggaatgtgattcgcattattccacaccacaattataatgcagccattaataaatataaccacgacattgctttgctggagctcgatgagcctctggtcttgaactcttacgtgacgccaatttgtatcgccgataaagagtacacaaacatcttcctcaagttcggctcgggctacgtcagcggctggggccgggttttccacaaaggccgcagcgccctggtcctacagtatctgcgtgttccgctcgtggatcgcgccacttgtttgcggagcacgaaatttaccatttataataacatgttttgcgcgggtttccatgagggcgggagggatagctgccagggcgactccgggggtccacacgttactgaggtggaaggcacaagcttcctcacgggtattatcagctggggtgaggaatgcgcgatgaaaggcaagtacggcatttatacgaaagttagccgctacgtaaattggattaaggagaagacgaaactcaca

SEQ ID NO: 8922 - DNA, 1383 bp, synthetic construct
  misc_feature 1..1383: note = source = /note="Description of Artificial Sequence: Synthetic coding sequence"
  source 1..1383: mol_type = other DNA
atgcaacgggttaacatgatcatggcagaatcaccaggtttaatcaccatctgccttcttggttatttattgtctgccgaatgcactgtgttcctagatcatgaaaatgcaaataagatccttaataggcccaagcgttataactccgggaagctcgaggagttcgtccagggtaatttggaaagggaatgtatggaagaaaagtgctcattcgaagaggctcgtgaagttttcgaaaatacagagcgaacaactgaattctggaaacagtacgtggacggtgatcaatgcgaatcaaacccttgccttaacggtgggagctgtaaagacgatatcaattcctacgaatgttggtgcccttttggttttgagggaaaaaattgcgaactcgacgtgacttgtaatatcaaaaacggtagatgcgaacagttttgtaaaaactcagctgataataaggttgtctgtagttgtactgaaggatataggttggcggagaaccagaaaagttgcgaaccagccgttcccttcccatgcggtagagtttctgtgtcccaaactagtaagcttacaagggctgagaccgtctttccagatgtcgattacgtgaattccacagaggctgaaactattctcgacaatattactcaatcaacccagagtttcaatgatttcacgcgggtggttggaggcgaagatgctaaacctgggcagttcccttggcaagttgtactaaatggaaaggtcgacgctttttgcggaggatcaattgtgaatgagaagtggattgttactgctgctcactgcgtggagaccggtgttaaaatcaccgttgtcgctggcgaacataacattgaagagaccgagcacactgaacaaaagcgaaatgtgattcgaataattccacaccataactacaatgctgctattaataagtacaaccatgacatcgctcttttagagctagatgaacccttggtgttgaactcatatgttacgccaatctgcattgctgacaaagaatataccaacatctttttgaaatttggaagtggctatgtttcaggttggggtagggtgtttcataagggccgatccgctcttgttttacaataccttagggttcctcttgtcgatagagctacttgcctaaggagtacgaaattcaccatatacaataacatgttttgcgctggttttcatgaaggtggacgggacagctgtcaaggcgattcgggaggtccacatgttaccgaggttgaaggcacgtccttcttgacaggcatcatcagctggggagaagagtgcgccatgaagggaaaatatggtatctatactaaagtctctcgatacgtaaattggattaaggaaaagaccaaactgact

SEQ ID NO: 8923 - DNA, 1383 bp, synthetic construct
  misc_feature 1..1383: note = source = /note="Description of Artificial Sequence: Synthetic coding sequence"
  source 1..1383: mol_type = other DNA
atgcagcgcgttaacatgatcatggctgaaagcccaggattaatcaccatttgcctgttaggctacctcctgagtgctgagtgcacagtcttcctggaccatgaaaacgccaacaagatattgaacagacctaagcgatacaattcggggaaactggaagagttcgtgcaaggcaatctggaacgtgagtgcatggaagagaagtgtagcttcgaagaggccagggaggtattcgaaaataccgaacggactactgagttctggaaacagtacgttgacggtgatcagtgtgaatccaatccatgcctgaatggtggcagttgcaaagacgatattaattcttacgaatgctggtgcccattcggtttcgaaggaaagaattgcgagctggatgtgacttgcaacatcaaaaacggccggtgtgaacaattttgtaaaaatagcgctgataacaaagtggtttgttcttgcacagaggggtaccgtctggccgagaaccaaaagagctgcgagccagccgtcccattcccatgtggcagggtttctgtgagccaaacatctaaactaacacgcgcggagacggtcttcccagatgtggactacgtcaatagtacagaggccgagaccatcctggacaatatcactcaatctacacaaagttttaacgatttcactagggtggtcgggggagaggacgccaaaccaggtcagttcccgtggcaagtggtcctgaatggaaaagtagatgctttttgcgggggaagcattgtgaacgaaaaatggatcgtgactgccgctcactgcgtagaaacgggcgtcaagataacagtggtggcaggagagcacaacatcgaggagaccgagcacaccgaacagaagcgtaacgtgatcaggatcattccacaccacaactataacgccgcaataaataaatataaccatgatatcgctctgctggagcttgatgagcccctcgtgcttaacagctacgtgacccctatttgcatcgctgacaaagagtacaccaatatcttcttgaagttcggatctggctatgtgtccggctggggccgcgtcttccataagggtcgcagcgctctggtcctgcagtacctccgagtgcctcttgtggaccgagccacatgcctccgttcaactaagtttactatctataacaatatgttctgtgcggggttccatgagggaggcagggattcatgtcaaggtgactcaggtggcccgcatgtgaccgaggtggaaggcacaagctttctgaccggaattatttcctggggcgaggagtgcgctatgaagggtaaatacggcatctataccaaagtctctaggtacgtgaattggatcaaggagaagacaaaactgacc

SEQ ID NO: 8924 - DNA, 1383 bp, synthetic construct
  misc_feature 1..1383: note = source = /note="Description of Artificial Sequence: Synthetic coding sequence"
  source 1..1383: mol_type = other DNA
atgcagagggtgaacatgataatggcagaatcccctggtctgatcactatctgtctgctggggtatctgctgtccgctgagtgcaccgtgttcctagaccacgagaatgcaaataagatcttgaaccgcccaaaaaggtacaactctggcaagttggaggagttcgttcagggaaatttggaaagagaatgtatggaagagaagtgttccttcgaagaagctagggaggttttcgaaaataccgagcgcaccaccgagttttggaagcagtacgtagacggcgaccagtgtgaatccaacccctgcctgaacggcgggtcgtgtaaggacgatattaattcttacgagtgttggtgtcctttcgggttcgaaggaaagaattgtgagcttgacgttacctgcaatataaagaatgggcgttgtgagcagttttgcaagaatagcgcggacaacaaggtagtgtgtagttgtacagagggatacaggttagcagaaaaccagaagagctgcgagccagccgtgccatttccttgcgggcgggtatctgtcagtcagacttccaaactcacacgcgcagagactgtgtttcccgatgtcgactacgttaattccaccgaagccgaaacaatccttgacaacatcacccagtctactcaatctttcaatgactttaccagagtcgtaggtggcgaggatgcaaaacccgggcaattcccgtggcaagtggttctgaatggaaaggttgacgcattttgtggagggtcgattgtgaatgagaagtggattgtgacagctgcgcactgcgtagagactggtgtgaaaatcactgtcgtcgccggggagcacaacatcgaagagaccgagcacaccgaacaaaaacggaacgttatccggattattccccaccacaattataatgctgccatcaataagtacaaccatgacatcgcactgctggaactcgatgagcccctggtactgaatagctatgtcacaccaatttgcatcgcggacaaggagtacacgaatatcttccttaagttcggatcaggctatgtgtcgggctggggcagggtgttccataagggacgcagtgcattggtcctgcagtatctgcgtgtgccactcgtagatagggccacctgcttgaggagcactaaatttaccatatacaataacatgttttgcgcgggtttccacgaggggggaagagacagttgccagggagactcaggcggcccacacgtgacggaggttgaagggacaagttttcttacaggcataatttcatggggcgaagagtgcgctatgaaaggaaagtatgggatctacaccaaagtgtcgaggtacgtgaactggattaaggagaaaacaaaactcacc

SEQ ID NO: 8925 - DNA, 1383 bp, synthetic construct
  misc_feature 1..1383: note = source = /note="Description of Artificial Sequence: Synthetic coding sequence"
  source 1..1383: mol_type = other DNA
atgcaacgagtgaacatgattatggcagagagccctgggctgatcactatctgtctcctgggttatctcctttccgcagagtgtaccgttttcttggaccacgaaaacgcgaacaagattcttaacaggcctaagcgatacaatagcggtaagctcgaggaatttgtccaaggcaacctggaacgcgagtgcatggaggagaaatgttcctttgaggaagcccgcgaagtgttcgaaaatactgaaaggactacggaattctggaaacaatacgtggacggcgatcagtgtgagtcgaatccctgccttaacggaggaagctgtaaagatgacataaactcgtatgaatgctggtgtcccttcggctttgaaggtaagaactgtgaacttgacgtcacctgtaacatcaagaacggtcgatgcgaacaattttgcaagaattcagcagacaataaggtcgtctgttcgtgtactgagggctaccggctggcagagaaccagaaatcatgcgaaccagcagtcccttttccgtgtggcagagtctccgtgtcccaaacctctaagttgacgcgggcagaaaccgtctttcctgacgtggattacgtcaattccaccgaagccgagactatccttgataacattacccagtcgactcaatcatttaacgatttcaccagagtggttggtggggaagatgcgaaaccaggacagtttccttggcaggtggttctgaacggtaaagtggatgccttctgcggaggctcgatcgtgaacgaaaagtggattgtgaccgcagcacactgtgtggaaactggggtcaaaatcaccgtcgtggctggagaacacaatattgaagaaactgagcacaccgagcagaagcgcaacgttattaggatcataccacatcacaattacaacgcggccattaacaagtacaaccacgatattgcacttctcgagcttgacgaaccgctggtgctgaattcctacgtgacgccaatatgcattgccgataaggaatacaccaacatatttctcaaatttggcagcggatatgtgtcgggctggggaagagtgttccataagggtcgaagcgctttggtgctgcaatatctgcgggtgccgcttgtggaccgcgcgacctgtttgcgctccaccaaattcacgatttacaataacatgttctgtgcaggatttcacgaaggtggacgcgattcgtgtcagggggactccggtggaccccatgtgacggaggtggaaggtactagcttcctgacggggatcatctcgtggggagaagaatgtgctatgaagggaaaatacggaatttacactaaggtgagcagatacgtgaattggataaaggaaaagaccaaacttact

SEQ ID NO: 8926 - DNA, 1383 bp, synthetic construct
  misc_feature 1..1383: note = source = /note="Description of Artificial Sequence: Synthetic coding sequence"
  source 1..1383: mol_type = other DNA
atgcaaagggtgaacatgatcatggcagaaagcccaggtttgattactatttgtcttttgggctaccttctttctgcagaatgtactgtgttccttgatcatgaaaatgcaaacaagattcttaatagacctaaaaggtacaatagcgggaagttggaagaattcgtgcaaggtaatctggaaagggaatgtatggaagagaagtgctcgtttgaggaggcacgcgaagtctttgagaacactgaaagaactactgagttctggaagcagtacgtcgacggcgatcagtgtgaatccaacccttgtttgaatggaggttcctgcaaagacgacataaactcctatgagtgttggtgcccttttggatttgaagggaagaactgcgaacttgatgtgacttgcaacataaagaacggacgatgcgagcagttctgcaaaaacagcgctgacaacaaagtcgtctgctcatgcaccgaggggtaccgcctcgcagagaaccagaaatcgtgtgagcccgccgtgccattcccatgtgggcgggtgtcggtgtcgcaaacgtcgaaacttactcgcgcagaaaccgtgttccctgatgtcgattacgtgaactccactgaagcagaaaccattcttgacaacatcactcaaagcactcagtccttcaacgacttcacgagagtcgtgggcggcgaggatgccaagccgggacagtttccttggcaagtcgtgttgaacggtaaggtggacgcgttttgtggaggaagcatagtgaacgaaaaatggattgtgactgctgcacactgtgtggagactggcgtcaagattacggtggtggcaggagaacataacattgaggaaaccgaacatactgaacagaaacgtaatgtcatacgcataattccacaccataactacaacgcggcaattaacaagtacaaccatgatattgccctcctcgaacttgatgaaccccttgtcctgaactcgtacgttaccccaatttgtatcgcggataaagaatacaccaacatatttctgaagtttggatccggttatgtctccgggtggggacgggtctttcacaaaggtcgctcggcccttgtgctccaataccttagagtcccacttgtggatcgggcaacttgtctgaggagcactaaattcaccatttacaacaatatgttttgtgcaggatttcacgaagggggtcgcgattcctgccaaggtgattcaggaggaccccacgtgaccgaggtcgaaggaacttcctttctcactggtatcatttcctggggtgaagaatgcgccatgaagggtaagtacggtatctacaccaaggtcagccggtacgtgaattggattaaagaaaagaccaagctcacc

SEQ ID NO: 8927 - DNA, 1383 bp, synthetic construct
  misc_feature 1..1383: note = source = /note="Description of Artificial Sequence: Synthetic coding sequence"
  source 1..1383: mol_type = other DNA
atgcagcgcgttaatatgattatggccgagtctcctggattgatcactatctgcctgctgggctacctgctctctgctgagtgcactgtttttctggatcacgaaaacgctaataagatcctgaatcgccctaagcgctacaatagcggcaaactggaggagttcgtccaaggcaacctcgaacgcgaatgcatggaagagaaatgctcctttgaagaagcgcgggaagttttcgagaacacggagaggaccaccgagttttggaaacagtacgttgatggcgaccagtgtgagtccaacccttgcttaaatggcggcagctgcaaggatgatatcaactcgtacgaatgctggtgtccgttcggcttcgaggggaagaactgtgagctcgacgtcacttgcaacatcaaaaacggccgatgcgagcagttctgtaaaaacagtgccgataacaaggtcgtgtgttcctgcaccgaaggttaccgtctcgcagagaaccagaagtcctgcgagcccgcagtcccgtttccctgtggtcgcgtcagtgtctctcagacctctaaactgacccgagcggagaccgtcttcccggacgtcgactatgttaactccaccgaggccgagacgatcctcgataacatcacccagagtacccagtcatttaacgacttcaccagagtcgtcggaggcgaggatgccaagcccggtcaattcccctggcaggtcgtgctgaacggtaaggttgatgcattctgtggtggtagtatcgtgaacgaaaagtggatcgtcacggcggctcattgtgtcgagacaggcgtcaagatcaccgtggttgccggcgagcacaatatagaggaaacggaacacacggagcagaagaggaatgtcattcgcattatcccacaccacaactacaacgccgccatcaataagtacaatcatgacatcgccctgctcgagctggacgaaccgcttgtgctgaactcatatgtcacccccatttgtatcgctgataaggagtatacaaatattttccttaagtttggctcaggttacgtctccggctggggtcgtgtcttccacaagggccgcagcgcactggtccttcagtacctacgcgtgcccctcgtcgatcgagcgacatgcctgaggagcacgaagtttacgatctacaacaacatgttttgtgctggattccacgaggggggacgcgatagttgtcagggagacagcggcggacctcacgtcactgaggtggagggtactagcttccttaccggaattatctcgtggggtgaggaatgcgccatgaagggtaagtacggaatttataccaaggtaagccggtacgtcaactggatcaaggaaaaaacaaagctaact

SEQ ID NO: 8928 - DNA, 1383 bp, synthetic construct
  misc_feature 1..1383: note = source = /note="Description of Artificial Sequence: Synthetic coding sequence"
  source 1..1383: mol_type = other DNA
atgcagagggtgaacatgatcatggccgagagtccaggcctgattacaatctgcttactgggctatctcctctccgctgaatgtacagtgttcctggaccacgagaacgccaataaaatactgaaccgacccaaacgctacaactccggcaagcttgaggaattcgtgcagggcaatctggagcgagagtgtatggaagagaagtgctccttcgaagaggctcgtgaggtttttgaaaacactgagagaacaactgaattctggaaacaatacgtggacggggaccagtgcgagtctaacccctgtctgaacggcgggtcttgtaaggacgacattaattcctatgagtgctggtgtcctttcggctttgaaggcaaaaactgcgagctggacgtgacctgtaatataaagaacggcaggtgtgaacagttttgtaaaaatagtgctgataacaaggtggtctgttcttgcacagaggggtataggctggcagagaatcagaaaagctgcgagcctgcagtgcctttcccatgcggtcgagttagcgtctcccagacctccaaactgactcgggctgaaactgtgtttcctgatgtcgactatgtgaactccaccgaggccgagactattctcgacaatattacacaatccacacagagtttcaacgattttactcgagtggtgggcggcgaggatgccaagcccggccaattcccctggcaggtggttttaaatgggaaagttgacgcattttgtggtgggtcaattgtgaacgaaaagtggatagtcaccgcagcccattgcgtggagacaggcgtgaaaatcactgttgtcgcaggggaacataatattgaagagactgagcatactgagcaaaagcggaatgtgatacggatcattccccatcataactacaacgctgccataaacaagtacaaccatgacatcgcattactagagttagatgagcccctggttctgaacagttacgtgacccccatatgcatcgctgataaggaatatacaaacatctttctcaagtttggctctggctatgtttccggctggggcagagttttccataagggccgctccgcccttgtgcttcaatacctgcgcgtgcctctagtggatagggctacctgcctgcgctccactaagtttactatttacaacaatatgttctgtgctggattccacgagggcggccgggactcatgtcagggagactctggcgggccacatgtcacagaagtagaggggacctcttttctgaccggcatcatatcctggggcgaagaatgtgcaatgaaagggaagtatggcatctacactaaagtttcccggtatgtgaattggatcaaggagaaaactaagctcacc

SEQ ID NO: 8929 - DNA, 1383 bp, synthetic construct
  misc_feature 1..1383: note = source = /note="Description of Artificial Sequence: Synthetic coding sequence"
  source 1..1383: mol_type = other DNA
atgcagagggttaatatgattatggcagagtcccctggccttataactatttgcctcttgggataccttctttcagcagagtgcactgtgtttctggaccatgagaacgcaaataagatcttaaataggcccaagcgttataactcgggaaaattggaagagttcgtacaaggcaacctggagcgagagtgcatggaggagaagtgctccttcgaggaagctagggaggtttttgaaaatactgaaagaacgactgagttctggaaacagtacgtggatggagatcaatgcgagtctaacccatgtttgaatggtggcagttgtaaggatgatataaatagctacgaatgctggtgtcccttcggcttcgaagggaagaactgtgagctggatgtcacgtgcaatattaagaatggccggtgcgagcagttctgtaaaaactccgccgataacaaagtggtgtgttcctgtaccgagggatacagactggccgagaaccagaagtcctgtgagcctgccgtcccctttccttgcgggagggtgtccgtttcccaaacaagtaaactcaccagggccgaaacagtcttccccgatgtggactacgttaactccacggaagcagaaaccatattagataatataacccaatcaacccaaagctttaacgactttacacgcgtggtcggaggcgaggatgcgaagccgggacaattcccttggcaggtggtgctgaatggaaaagtggatgcattctgcgggggatccattgttaacgaaaagtggattgtgacagccgcccactgtgtggagacaggcgtgaagatcactgtcgtggctggggagcacaacatagaagagacagaacacaccgagcaaaaacggaacgtcattcgcataattccacaccataactacaatgccgccattaataagtataatcacgacatagccctgttggaactagatgagccccttgtgctgaatagttatgttacacctatttgtatcgccgataaagaatataccaacatatttcttaaattcggcagcgggtacgtttccggatggggcagggtcttccacaagggacgcagtgccttggttctgcaatacctgcgagtacctctggtggaccgagcaacatgcctcagaagcactaagttcaccatttacaacaacatgttttgtgctgggttccacgaggggggccgagactcttgccagggggacagtggggggccacatgtgaccgaggttgagggcacatcattcctgacagggattattagctggggggaagagtgcgccatgaagggtaagtatgggatttatactaaggttagtcgttatgtgaattggataaaggagaaaaccaaacttacc

SEQ ID NO: 8930 - DNA, 1383 bp, synthetic construct
  misc_feature 1..1383: note = source = /note="Description of Artificial Sequence: Synthetic coding sequence"
  source 1..1383: mol_type = other DNA
atgcaaagggtgaatatgattatggctgaatcacctggactgatcaccatttgtctcctcggttacctcctctccgcggaatgcaccgtctttctggatcacgagaatgccaataagatcctgaatcggccgaagagatacaattcagggaagctggaagaattcgtgcagggaaaccttgagcgggagtgtatggaggagaaatgctccttcgaggaggcgcgggaggtgttcgaaaataccgaacggaccactgagttctggaagcaatacgtcgacggggatcagtgcgaatcaaatccgtgcttgaatggcgggagctgtaaggatgatatcaatagctacgaatgctggtgcccgtttggattcgaaggaaagaactgtgagctggacgtgacttgtaacattaagaatggacgctgcgagcaattctgtaagaattccgccgacaacaaagtggtctgctcatgcaccgagggctaccggctcgcggaaaaccagaagtcatgcgagccagcagtgcctttcccttgtggccgcgtgtcggtgtcgcaaactagcaagttgactcgggcggaaaccgtgttcccagacgtggactacgtgaactcaaccgaagcagaaacgatcctggacaacatcactcagtcgacccagagctttaacgatttcacccgggtggtgggaggtgaggacgctaaaccgggacagtttccatggcaagtggtcctgaatggcaaggtggacgcgttctgcggaggatcgatcgtgaatgaaaagtggatcgtcaccgcggctcattgtgtggagactggagtgaaaatcaccgtggtggcgggcgaacacaacatcgaggaaaccgaacacactgaacagaaaagaaacgtgattcggatcatcccacaccacaactacaatgcagcaatcaataagtacaaccatgatatcgccctgctggagctggatgagcccctggttctgaactcgtacgtgacccctatttgcatcgccgataaggagtataccaatatctttctgaagttcggctcaggctacgtgtcgggatggggacgggtgttccataaaggccggtccgcacttgtcctgcagtacctccgcgtgccgttggtggaccgcgccacttgcctgctgagcaccaaattcactatctataacaacatgttctgcgcaggctttcacgaaggaggccgggacagctgccaaggagactccggtgggccgcacgtgacggaagtggagggcactagcttcctgactggcatcatctcgtggggggaggaatgcgcaatgaaaggcaagtacggaatctacaccaaggtgtccaggtacgtgaattggatcaaggaaaagaccaaactcact

SEQ ID NO: 8931 - DNA, 1383 bp, synthetic construct
  misc_feature 1..1383: note = source = /note="Description of Artificial Sequence: Synthetic coding sequence"
  source 1..1383: mol_type = other DNA
atgcagcgggtgaacatgattatggccgagtctcctggtctaattacgatatgtctgctcggatatctgctctcggctgaatgcactgtgttcctcgaccacgagaacgctaacaagatcttaaatcgcccaaaacgttacaactccgggaagctagaggagttcgtgcaggggaacctggaaagagaatgtatggaggagaagtgctcctttgaagaggcacgcgaggtgttcgaaaatacagaaagaacgaccgaattctggaagcaatacgtcgacggagaccaatgtgaaagcaatccctgtctaaacggcggtagctgtaaggacgacattaactcttatgagtgttggtgcccttttgggtttgagggcaaaaattgcgagcttgacgtcacatgtaacatcaagaacgggcgctgtgaacagttctgcaaaaacagtgccgacaacaaagtagtttgttcctgtaccgaggggtaccgactcgctgagaatcagaagtcctgcgagcctgcggttcctttcccatgtggcagagtgtccgtttcccagactagtaagttgaccagggccgagacggtcttcccagacgtggactacgtcaacagcactgaggccgagaccatcttggacaatattacacagagcactcagtcgttcaacgactttactagggttgttggtggtgaggatgcaaaaccggggcaatttccatggcaggtggtccttaacggcaaagtggatgccttttgcggcgggagcattgtgaatgaaaagtggatagtcacggcagcccactgcgtggagactggagtgaagattactgtagtcgccggcgagcataatatcgaggagactgaacatacggaacagaaaaggaacgtgatcagaattattcctcatcataattacaacgccgccattaataagtataaccatgacattgcactgcttgaactcgatgagcccctagtgctcaacagctacgtgaccccgatttgcatcgccgataaggaatacacaaatatttttctcaagtttggtagtggctacgtctctggctgggggcgcgtgttccacaagggtcggtctgcgctcgtgctgcagtatttgcgcgtgccccttgtggaccgtgccacttgcttgctctctacaaagttcaccatttacaataatatgttctgtgccgggtttcatgaaggagggcgggattcttgccagggcgacagcggcggccctcacgtcaccgaagtagaaggcacaagctttctcaccggtataatttcgtggggcgaggagtgcgctatgaaggggaagtacgggatctacaccaaagtcagccgctatgtcaactggatcaaggagaagaccaagctcact

SEQ ID NO: 8932 - DNA, 1383 bp, synthetic construct
  misc_feature 1..1383: note = source = /note="Description of Artificial Sequence: Synthetic coding sequence"
  source 1..1383: mol_type = other DNA
atgcaaagggtcaacatgatcatggccgaatccccaggactgattactatttgcctgctgggatacctcctgagcgccgagtgcaccgtgttcctggaccacgaaaacgccaacaagatcctcaaccgcccgaagcggtacaactcgggaaagctggaggaattcgtgcaaggaaatctggaaagagagtgcatggaagagaagtgctcgttcgaagaggcacgggaagtgttcgaaaacaccgaaagaaccaccgagttctggaaacaatacgtggatggcgatcagtgtgaatcaaacccctgcctgaatggtggctcgtgcaaagatgatatcaatagctacgaatgttggtgcccattcggatttgagggaaagaactgcgagttggatgtgacttgcaacatcaagaatggacgctgtgaacagttctgtaagaatagcgcagacaataaggtcgtctgctcctgtactgaaggctacagactggcagaaaatcagaagtcctgcgagccagccgtgccctttccgtgcggacgcgtgtccgtctcccagacttcaaagctgaccagggcggaaactgtgttcccagatgtggactacgtgaactctactgaagcggagactattctcgataacattactcagtcgactcagtccttcaacgactttactagggtcgtgggcggagaggacgctaagccaggacaattcccttggcaggtggtcctgaacggaaaagtggacgccttctgtggtggatcaatcgtcaacgagaaatggatcgtgaccgccgcccattgcgtcgaaaccggcgtgaagatcaccgtggtcgcaggcgaacataacatcgaagagactgaacacaccgaacagaagcgcaatgtcatccgcatcatcccgcatcataactataatgcagcgatcaataagtacaatcatgacattgcactcctcgagctggatgagcccttggtcctcaattcatacgtgaccccgatctgcatcgcggacaaagagtacaccaatatcttcctgaaatttgggtccggatacgtgagcggctggggtcgcgtgtttcataaaggcaggagcgccctcgtgctgcagtacctgcgggtgcctctggtggaccgagcaacgtgtcttttgtcaactaagtttactatctacaacaacatgttctgcgcgggcttccacgaaggcggacgggactcgtgtcagggagactcgggagggccgcatgtcaccgaggtggaaggtacctccttcctgactggtatcatcagctggggagaggaatgtgcgatgaagggaaagtacggaatctacaccaaggtttcgcgatacgtgaactggatcaaagagaaaactaagctgact

SEQ ID NO: 8933 - DNA, 1383 bp, synthetic construct
  misc_feature 1..1383: note = source = /note="Description of Artificial Sequence: Synthetic coding sequence"
  source 1..1383: mol_type = other DNA
atgcagcgggtgaatatgatcatggccgaatcgccaggactgatcactatctgtctgctgggctacctcctgtcagctgagtgcaccgtgttccttgatcatgaaaatgcgaacaagatcctcaacaggcccaagcgatacaactctggcaagctggaagagttcgtccagggaaatttggaacgcgaatgcatggaggaaaaatgctcattcgaggaggcccgcgaggtgttcgagaatactgaaagaaccactgagttctggaaacaatacgtggatggggaccaatgtgaatccaatccgtgcctgaacggaggctcgtgtaaggacgacatcaattcttatgagtgctggtgcccattcggttttgaaggaaagaactgtgagctcgatgtcacctgtaacatcaagaatggaaggtgcgagcagttctgtaaaaactcggccgataacaaggtcgtctgttcatgcactgagggctaccgcctggccgagaaccagaagagctgcgaaccggccgtgccattcccgtgcggtcgcgtctcggtgtcgcagacttcgaagctcacccgggctgagactgtgttccccgacgtcgattacgttaattcaaccgaggcagaaaccatcctcgacaacatcactcagagcacccaatccttcaacgattttactcgggtcgtcggcggggaagatgctaaaccaggccagttcccttggcaggtcgtcctgaatgggaaggtggacgcgttctgcggaggatccatcgtgaacgaaaagtggattgtgaccgcggcgcactgtgtggaaacgggagtgaagatcactgtggtggctggggagcacaatatcgaagaaaccgaacacaccgagcaaaagagaaatgtcatcagaatcatcccgcaccacaattacaatgcagctatcaacaaatacaatcacgatatcgcattgctggagctcgatgagccgctggtgcttaacagctacgtgactccgatctgtatcgctgacaaggaatacaccaacattttcctgaagttcggttccggctacgtgtccggttggggccgcgtctttcacaagggacgctcagcactcgtgctgcagtatctgagagtccctctcgtggaccgagcgacctgccttctcagcaccaagttcactatctacaacaatatgttttgtgcaggattccatgaaggcgggcgggactcctgccaaggcgacagcggaggaccacacgtcaccgaggtcgaaggaaccagctttctgactggaatcatttcctggggcgaagagtgcgccatgaaaggaaaatacggaatttacactaaagtctcccgctacgtgaactggatcaaagaaaagacgaagctgacc

SEQ ID NO: 8934 - DNA, 1383 bp, synthetic construct
  misc_feature 1..1383: note = source = /note="Description of Artificial Sequence: Synthetic coding sequence"
  source 1..1383: mol_type = other DNA
atgcagcgtgtgaacatgattatggccgagtcccccgggctgattacaatctgccttctggggtatctcctgtccgctgaatgcactgtttttctcgatcacgagaacgctaacaagattcttaaccgtcccaaacgttataatagcggcaagctcgaggagttcgtacagggtaacctcgaacgggagtgtatggaggagaagtgtagctttgaagaggcccgagaggtctttgagaacacagaacgcaccaccgagttctggaagcagtacgtggatggggaccagtgcgagtccaatccctgtctcaatggaggcagttgcaaggacgatataaactcatacgagtgctggtgccctttcggttttgagggcaagaattgtgaactggacgtcacctgtaacatcaagaatgggcgttgtgagcagttctgtaagaatagcgcagataacaaagtggtgtgtagttgcacagaagggtacagactagctgaaaatcagaaatcgtgtgaacctgcagtgccttttccttgcggccgggtatccgtttcccagaccagtaagttgactcgggcagaaactgtcttcccggacgtggattacgtgaacagtacagaggccgagactatccttgacaatatcacccagtcgacccagtcttttaacgatttcacgcgcgtggtcggcggcgaagatgccaagccaggccagttcccttggcaggtcgtgctgaacgggaaggtggacgccttttgtggagggtcgattgtcaacgaaaagtggattgtgactgcagctcattgtgtggagacaggtgtgaaaattacagtggtcgcaggcgaacacaatatcgaggagaccgagcacactgagcagaaacgaaacgttattcggattattccacatcataattataacgcggctatcaataaatacaaccatgacattgctcttctcgaacttgacgaacctctggtgctgaactcttacgtgactcccatttgcatcgcagacaaggaatatacaaacatattcctcaagttcggaagcgggtacgtctccggttggggcagggtatttcacaaggggaggtctgccctggtgttacaatacctccgagttccactggtcgatcgagccacatgcctactcagcaccaagtttacaatttacaataatatgttttgcgctggatttcacgagggtgggcgggattcttgtcaaggtgactcaggcggaccacacgtcacagaagtggaaggtacttctttcctgactggcatcatttcgtggggcgaggaatgcgccatgaaaggaaagtacggaatttatacaaaagtgagccgatacgttaactggataaaggaaaaaaccaagctcact

SEQ ID NO: 8935 - DNA, 1383 bp, synthetic construct
  misc_feature 1..1383: note = source = /note="Description of Artificial Sequence: Synthetic coding sequence"
  source 1..1383: mol_type = other DNA
atgcagagggttaacatgattatggccgaatctcctggtctcataacaatttgcctcctcggatacctcctctcagcagagtgcaccgtctttctggaccacgaaaatgccaacaagatcctgaacagaccaaaaaggtacaacagcggtaaattggaagagtttgtgcagggaaatctggagagggagtgcatggaagaaaagtgttctttcgaggaggcacgggaggtctttgaaaacaccgagcgcacaactgagttctggaagcaatatgttgacggcgaccagtgtgaaagcaatccttgtctgaatggagggtcctgcaaggatgacattaactcttatgagtgctggtgtccatttgggtttgaggggaaaaattgcgagctcgatgtcacctgtaatatcaaaaacggcaggtgcgagcagttctgcaagaattctgcagataataaagtggtgtgctcctgcacggagggttaccggctcgcggaaaatcagaagagctgtgaaccggccgtgccattcccctgcggtagagttagcgtatcacaaaccagcaagctgaccagggccgagacagtcttcccagacgtggactacgtgaacagtactgaagctgagacgattctggataatattacccagagtacacagtccttcaatgacttcaccagagtggtaggcggcgaagatgcaaaaccaggacaattcccgtggcaggtcgtgctgaatggaaaagttgacgctttttgcgggggaagtatcgtcaatgagaagtggatcgtgacagctgcgcactgcgtggagactggggtaaagatcacagtggtcgctggcgagcataacattgaggaaaccgagcatactgagcagaagaggaacgttattcgaataatcccgcaccataactataacgccgccattaacaagtacaatcacgacatagcactgctggagctcgatgagcccctggttctgaatagttatgtgacacctatttgtatcgctgacaaagagtacacaaacatcttcttgaagtttggatctggttacgttagtgggtgggggcgagtgtttcataagggtagatctgcccttgtgctccaatatctgagggttccactggtggaccgggccacgtgcctgctgagcacaaaattcacgatctacaacaatatgttctgcgccgggttccacgagggtggccgggacagttgccagggtgatagcggagggccccatgtgacagaagtcgagggcaccagcttcctgacaggtattatctcttggggagaagaatgcgcgatgaagggcaagtacggtatatacactaaggtctccaggtatgttaattggattaaggagaaaactaagctgacg

SEQ ID NO: 8936 - DNA, 1383 bp, synthetic construct
  misc_feature 1..1383: note = source = /note="Description of Artificial Sequence: Synthetic coding sequence"
  source 1..1383: mol_type = other DNA
atgcagagagtgaatatgatcatggccgaatcgccgggcctgattactatttgccttctgggatatctcctctcggcagagtgcactgtattcctggaccacgaaaacgccaacaagatcctcaatcgcccgaagcggtacaactcgggtaagctcgaagaatttgttcaaggtaatttggagagagaatgcatggaagagaagtgctcgtttgaagaggcgcgcgaggtgttcgagaatacggaacgtacgacggaattttggaaacagtacgtggatggagatcagtgcgagtcaaatccgtgccttaacggaggatcatgtaaagacgacatcaactcctacgagtgttggtgcccattcggatttgaaggcaagaactgcgagctcgacgtgacctgtaacatcaagaatggcagatgcgagcagttctgcaagaactcagccgataacaaggtggtgtgctcctgcactgagggatacaggctcgcggagaaccagaaaagctgtgagccagcagtccccttcccatgcggaagggtgtccgtctcacagacttcgaagctgacccgggccgaaaccgtgttccctgacgtggactacgtcaactctaccgaagctgaaactatcctggacaacatcactcagagtacgcagtctttcaacgactttaccagggtcgttggaggcgaggatgcgaagccgggccagttcccgtggcaggtcgtcctcaatggcaaagtggatgccttctgcggtggttcgatagtgaatgaaaaatggatcgtgaccgcggcgcattgcgtggaaaccggagtgaagatcactgtggtggcgggggaacacaacatcgaagagacggagcataccgagcagaagcgaaacgtgatccgcatcatcccacaccacaactacaacgctgcgatcaacaagtacaatcatgatatcgcactccttgaactggacgagccactggtcctcaactcgtacgtaactccgatctgtatcgcagacaaagaatacactaatatcttcctgaagtttggctcggggtacgttagcggctggggtcgtgtgttccacaagggccggtcagccctggtgctccagtacttgcgggtcccgctggtcgatcgggcaacctgtctgctgtccaccaaattcaccatttacaataacatgttctgcgccggctttcatgaagggggaagagactcgtgccagggtgactcaggtggccctcacgtcactgaagtcgaaggaactagctttttgaccggaatcatttcgtggggagaggagtgcgcaatgaaaggaaagtacgggatctacactaaggtgagccggtatgtgaattggattaaggagaaaactaaattgacc

SEQ ID NO: 8937 - DNA, 1383 bp, synthetic construct
  misc_feature 1..1383: note = source = /note="Description of Artificial Sequence: Synthetic coding sequence"
  source 1..1383: mol_type = other DNA
atgcagcgggtgaacatgattatggccgaatccccggggctcatcactatttgcctcctgggatacctgttgtcagcagaatgcaccgtgtttctggatcatgaaaacgcaaataagattctgaacaggccaaaacggtacaactctggtaagctggaggaattcgttcaagggaacctggaacgggagtgtatggaagagaaatgctcgtttgaagaggcccgtgaggtgttcgagaacaccgaacgcaccaccgagttctggaaacaatatgtcgatggagatcagtgcgagtcgaatccgtgtctcaacggcggcagctgtaaggacgatatcaatagctacgagtgctggtgtccgttcggcttcgaggggaagaattgtgaactcgacgtcacctgcaatatcaagaacggacggtgcgaacagttctgcaagaactcggccgacaacaaggttgtgtgctcatgtactgagggatacaggttggcggaaaaccaaaagtcgtgtgaaccagctgtgccgttcccgtgcggacgcgtctcagtgagccagacctcgaagctcacgcgcgcggaaaccgtgttccctgacgtcgattatgtcaattccacggaagcagagactatcctggacaacatcacccagtcaactcagtcgtttaacgattttacgagggtggtgggaggcgaagatgctaagccaggtcaatttccctggcaagtcgtcttgaacggaaaagtagacgcattctgcggaggcagcatcgtgaatgaaaaatggatcgtgaccgccgcgcactgcgtggagactggagtgaaaatcactgtagttgcgggagaacataacatcgaagaaactgaacataccgaacaaaagcgtaacgtgattagaattatcccacaccacaattacaacgccgcgatcaacaagtataatcacgacatcgctctcctggagctcgacgaacccctggtgctcaactcgtacgtgaccccgatctgcatcgcagacaaggagtacacgaatatcttcttgaagttcggaagcggatacgtgtccgggtggggtcgcgtctttcacaagggacggtctgctctcgtgttgcagtacctgcgcgtgcctctggtggatagagccacttgtctcctgtccaccaaattcactatttacaacaatatgttctgcgcgggcttccacgaaggcggcagggactcctgtcagggagacagcggcggaccgcacgtgaccgaagtggaaggaacgtcctttctgactggcatcatctcatggggagaagaatgtgcgatgaagggaaagtacggaatctacacgaaggtgtcacggtatgtcaactggataaaggaaaagaccaagctcacg

SEQ ID NO: 8938 - DNA, 1383 bp, synthetic construct
  misc_feature 1..1383: note = source = /note="Description of Artificial Sequence: Synthetic coding sequence"
  source 1..1383: mol_type = other DNA
atgcagcgagtgaacatgatcatggctgaatcaccgggccttatcactatatgtctcctgggataccttctgtcggcggaatgcactgtctttctggaccatgaaaatgccaacaaaattctgaatcgccctaagaggtacaactcaggaaaacttgaggaatttgtgcaaggaaatttggaacgggaatgtatggaggaaaagtgttcgttcgaggaagcaagagaggtgtttgagaataccgaaaggaccaccgaattttggaagcaatacgtcgatggagatcaatgtgaatcgaacccatgtcttaacggtggcagctgtaaagacgacataaactcctacgaatgttggtgcccattcggatttgaaggaaagaactgtgagcttgatgtcacctgcaacatcaaaaacggacgttgtgaacagttctgtaagaacagcgcagataacaaagtggtgtgttcctgtactgaaggttatcgtttggcagaaaaccaaaagtcatgtgaaccggcagtcccttttccttgtggccgcgtctcagtgagtcaaacgagcaagctgacccgcgccgaaaccgtgtttccggacgtcgattacgtcaattcgacggaagcagagacgattctggataacatcacccagagcacccagtcatttaacgattttacgcgcgtggtgggcggagaggatgctaagcctggacagttcccttggcaggtcgtcctgaatggcaaggtggacgcattttgtggcggatcgattgtcaacgaaaaatggatcgtgacggcagctcattgcgtcgaaaccggagtcaagatcactgttgtcgccggtgaacataacattgaagagactgagcacaccgaacagaagagaaatgtgattagaatcattcctcaccataactacaacgcagccattaacaaatacaatcacgacattgcacttcttgagctggatgagcccctcgtgctcaactcgtacgtgactccaatttgcatagcagataaggaatacaccaacatcttcctgaaatttggttccggatacgtgtcgggttggggacgggtgttccataaaggacgctccgccctggtcctgcagtaccttcgtgttccactggttgatagagcaacttgcctgctttcgacgaagttcactatatacaacaatatgttttgtgcagggtttcatgaaggaggcagagactcctgccaaggcgattcaggaggacctcatgttaccgaggtggagggtacttcattcctgaccggaatcatttcgtggggtgaggaatgcgcaatgaaaggaaagtacggaatttacactaaagtgtcccgctacgtgaattggattaaagagaaaaccaaacttact

SEQ ID NO: 8939 - DNA, 1383 bp, synthetic construct
  misc_feature 1..1383: note = source = /note="Description of Artificial Sequence: Synthetic coding sequence"
  source 1..1383: mol_type = other DNA
atgcagcgagtgaatatgatcatggcggagtccccaggactgatcactatctgtctgttgggatacctgttatccgccgagtgtaccgtcttcctggaccacgagaacgccaataaaatactcaaccggccaaagcggtataattcggggaagctggaggagtttgtccagggcaatcttgagagagaatgtatggaggagaaatgctcgtttgaggaagctcgagaggttttcgagaatactgagcgtactactgaattttggaaacagtatgtcgatggcgatcagtgtgagtctaatccttgcttaaatggcggaagttgtaaagatgatatcaacagttatgaatgctggtgccccttcggctttgagggcaagaattgtgagctggacgtgacatgtaatataaaaaacgggcgatgcgaacagttttgcaaaaactctgctgacaacaaggttgtgtgttcctgtacagaggggtacagactggccgagaaccaaaagtcatgtgaacctgcggtgccatttccgtgcggacgggtctcggtttcacaaacaagtaagctgacaagagccgagaccgtgttcccagacgtcgattatgttaactccactgaagccgaaactatactggacaatatcactcagagcacacaaagcttcaatgactttactagggttgtgggaggagaggatgcaaaacctgggcagtttccctggcaggttgtgcttaatggtaaagtggacgctttctgcggtggaagtatcgtgaatgaaaaatggatcgtgacggctgcacactgtgtggagacgggtgtcaaaattaccgtggtggcgggagagcacaacatcgaggagacagagcataccgaacagaagaggaatgtcatccgtatcataccccaccacaactacaacgctgcgattaataaatacaaccatgacatcgctcttctcgagttggatgaacccctcgtgcttaatagctatgtcaccccaatatgcatcgccgacaaagagtacacgaacatcttcctaaagttcggttcagggtacgtctccggctgggggcgggtgttccataaaggtcggagtgccctagtgctgcagtatcttcgagttcctctggtcgatagagccacttgtttgctgtccacgaagtttactatttacaataacatgttttgcgctggtttccacgaggggggtagggactcctgccagggggacagcggcggacctcatgtgacagaggtggaaggcacgtcctttctgactggtataatatcttggggagaagaatgcgccatgaaggggaagtatggcatttacacgaaagtgtcccgctatgtgaactggattaaggaaaagactaagctgacc

SEQ ID NO: 8940 - DNA, 1383 bp, synthetic construct
  misc_feature 1..1383: note = source = /note="Description of Artificial Sequence: Synthetic coding sequence"
  source 1..1383: mol_type = other DNA
atgcagcgggtcaacatgatcatggcagaaagtcctggacttatcacaatctgcctgctaggatacctactgtctgcagagtgcactgtgttcctggaccatgagaatgccaataaaatcttaaaccgcccaaaacggtacaattccggtaagcttgaggagttcgtccagggcaatctagaacgagaatgtatggaggagaagtgcagctttgaagaagctagagaggtatttgagaacaccgaacgtactacagagttctggaagcagtacgttgatggcgaccagtgtgaaagcaacccatgtctgaatggtggctcttgtaaagacgacattaactcctacgagtgttggtgtcctttcggtttcgagggcaaaaattgtgagctggacgtcacgtgcaatattaagaatggcagatgcgagcagttttgcaaaaacagtgccgacaacaaagtagtgtgtagctgcacagaagggtataggctggccgaaaaccagaaatcatgcgagccagctgtgccattcccatgcggtagagtttcggtgagtcagacctctaagttgacccgggctgagaccgtgttcccagatgtagactacgtgaactccacagaggcggaaaccatactcgataacattacccagagcacccagagcttcaacgacttcaccagagtagttggcggggaggacgcaaaacccggccagttcccctggcaggtcgtgctgaacgggaaggttgatgcattttgcgggggaagcattgtgaacgagaaatggatcgtcaccgccgcccactgcgtagaaacaggggtgaagattacggttgtggctggagagcataatattgaagagaccgagcacactgaacagaagaggaacgtgatcagaattatcccccaccataattacaacgctgcaataaacaagtataatcacgatattgcattgctcgagctggacgagcccttagtgttgaattcctatgtcactcctatttgtatagccgacaaggagtacacgaacatctttctgaaatttggctctggttacgtcagcggctggggccgggtgtttcacaaaggtcgaagcgcactagtattgcagtatctcagggtcccgctagtcgatcgggcaacatgcctcctcagcacgaagttcaccatctacaataatatgttttgtgcaggttttcatgaagggggcagggatagttgccaaggggactctggaggacctcatgtgaccgaggtggagggcacatcatttttaactggaatcatatcttggggcgaagaatgcgcaatgaaaggcaaatatggtatatataccaaagtctcgaggtacgtgaactggatcaaggagaagacaaagctcact

SEQ ID NO: 8941 - DNA, 1383 bp, synthetic construct
  misc_feature 1..1383: note = source = /note="Description of Artificial Sequence: Synthetic coding sequence"
  source 1..1383: mol_type = other DNA
atgcagcgagtcaatatgatcatggccgagagccccggattgataaccatctgcctgctcggttacctgttgtcggctgagtgcacggtctttctggaccatgagaacgccaacaaaatcctgaatagacccaaacgttataactcgggaaagctcgaagaattcgtccaggggaacctcgaacgggagtgcatggaggagaagtgctcattcgaggaagcgagagaagtctttgaaaacaccgagcgcaccactgaattctggaagcagtacgtggatggggatcagtgcgaatcgaacccatgtttgaacggcgggagctgtaaagacgatatcaattcgtacgagtgctggtgtccgtttggatttgagggaaagaattgcgaactggatgtgacctgtaacatcaagaacggacgatgcgaacaattctgcaagaactctgcagacaataaggtcgtctgctcctgcactgagggatacagactggctgaaaatcaaaaaagctgtgaaccggctgtgccatttccgtgtgggcgcgtgtcagtgtcccaaacgtcaaaactgactagggccgaaaccgtctttccagacgtcgactacgtgaactccaccgaagctgaaaccattctggacaacatcactcagagcacgcagtcgttcaacgattttacccgggttgtgggcggggaggatgcaaagccaggacaattcccctggcaagtggtgctgaacggcaaggtggacgcattctgcggaggatccatcgtgaatgagaaatggatcgtgaccgccgctcactgtgtggaaaccggagtgaagattaccgtggtggccggggagcacaacatcgaggaaactgaacacaccgaacagaagagaaacgtgatccgtatcatccctcaccataactacaacgccgcaattaacaagtacaaccatgatatcgcgcttcttgagctggacgagcccctggtgctgaattcctatgttaccccgatctgcatcgccgataaagaatacactaatatcttcctgaaatttggctccggctacgtcagcggatgggggagagtttttcacaaaggaaggtcggcgcttgtgctgcagtacctgcgcgtcccgcttgtggaccgcgctacctgcctgctcagcacgaaattcaccatctacaacaatatgttttgcgccggatttcatgagggcggacgcgattcgtgtcagggagactccggcggtccgcacgtcactgaagtggagggaacctcattcctgaccggtatcatctcctggggggaagagtgtgctatgaagggcaagtacggcatctacactaaggtgtctcggtatgtgaattggatcaaggaaaagaccaagttgacg

SEQ ID NO: 8942 - DNA, 1383 bp, synthetic construct
  misc_feature 1..1383: note = source = /note="Description of Artificial Sequence: Synthetic coding sequence"
  source 1..1383: mol_type = other DNA
atgcagcgagtgaacatgatcatggcagagagtccgggactgataactatttgcctgctcggttatctgctgtccgcggaatgtacggtgtttctggatcatgaaaacgccaacaaaattctcaacaggcctaagcgttataactcaggcaaattggaggagtttgtccaaggtaacctcgagagggagtgcatggaagagaaatgcagttttgaggaagctcgtgaggtttttgagaacaccgagaggaccactgaattttggaaacagtatgtcgatggggaccaatgtgagtcaaatccctgtctgaacggagggtcatgcaaagatgatatcaactcttacgagtgctggtgccccttcggatttgagggcaagaattgtgagctggacgtcacatgtaacattaaaaatggaaggtgtgagcagttctgtaagaacagtgccgacaacaaagtcgtgtgctcttgtactgaagggtaccgtctggctgaaaaccagaaatcttgcgaaccagccgtaccattcccctgcggtcgggtctcagttagccagacatcaaaattgacccgcgcagagactgtctttcccgatgtggattatgtgaacagcacggaggccgaaaccattctggacaacatcacgcagagcacccaaagttttaacgactttaccagggtcgtcggaggagaagacgcgaagccaggccagtttccatggcaggtagtgttaaacggaaaggtagacgccttttgcggcggctcgatcgtgaatgaaaaatggattgttactgcagctcactgtgttgagacaggcgtgaagattacagtcgttgccggcgagcacaatatcgaggaaaccgagcatacagagcaaaaacggaacgtgatccggatcatcccacatcacaactataacgccgcgataaacaagtacaatcatgacatcgctctgctggagctggacgaacctctggttctgaattcctatgtaaccccaatttgcatagccgataaggaatacactaacatctttctcaaatttggatctgggtacgtgtccggctggggcagggtctttcacaaaggaaggtccgctctggtgctgcagtatctcagggttccgctggtggaccgagctacgtgccttctgagtacgaaattcacaatatacaataatatgttttgtgctggctttcacgaagggggccgtgactcctgtcagggagattcaggtggacctcacgttacggaggtggaaggtacatctttcctcaccgggattatttcctggggcgaggagtgcgcaatgaagggcaagtatggtatttataccaaagtatccagatatgtgaattggatcaaggagaagactaagcttacc

SEQ ID NO: 8943 - DNA, 1383 bp, synthetic construct
  misc_feature 1..1383: note = source = /note="Description of Artificial Sequence: Synthetic coding sequence"
  source 1..1383: mol_type = other DNA
atgcagagagtgaatatgataatggccgaaagccctggtctcatcacaatctgtcttctaggctatctcttatctgccgagtgcacagtctttctagatcatgagaatgcaaacaagatcctaaatcgacccaagaggtacaactcagggaagcttgaggagtttgtgcagggcaatctggagcgggagtgcatggaagagaaatgtagcttcgaggaagctagggaagtcttcgagaacacagagcgaacaaccgagttctggaagcaatacgtggatggcgatcagtgcgagtcaaatccatgtttgaatggggggtcctgtaaggacgacatcaattcctacgaatgctggtgtccatttggctttgaaggaaaaaattgcgaactggacgtcacttgtaacataaagaacggcaggtgtgaacaattttgcaagaattctgccgacaacaaagtcgtatgctcctgcactgaaggctataggctcgctgagaaccaaaagagctgcgagcccgcagtgccgttcccctgcggcagagtatccgtgagccagacttcgaaattgacacgggcagagaccgtctttccagatgtagattatgtaaactcaacagaagcagagaccatcttagataacataacacagagtacacagtcttttaatgacttcactcgcgttgttggaggcgaagacgctaagccaggacagtttccgtggcaagtagtactcaatggaaaggtggatgcattttgtggaggcagtatagtcaatgagaagtggatcgtcacagccgcccactgtgtcgaaactggcgtcaaaattactgttgtggccggcgaacacaatatcgaagagaccgaacatactgaacagaaacgcaatgtgatcagaatcattccacatcataattacaatgccgctatcaacaagtacaatcatgatatcgcgctcctggaactagacgaacccctggtgctcaacagttacgttacacctatctgcatcgccgacaaagagtatacaaatatctttctgaaatttggttcgggttacgtgtcggggtggggccgcgtgttccacaaaggtcgaagcgcgttggtcctacaatacttaagggtacccctggtcgaccgcgcaacttgtttgctctcaacaaagtttactatatataacaacatgttctgcgccggcttccatgaaggaggcagggattcttgccagggcgacagtggaggccctcacgtcacagaagtagaggggacgtcttttttgacaggtataatctcttggggagaggagtgcgcaatgaaaggaaagtatgggatttatactaaagtaagtcgctatgtcaattggatcaaggaaaaaaccaaactgacc

SEQ ID NO: 8944 - DNA, 1383 bp, synthetic construct
  misc_feature 1..1383: note = source = /note="Description of Artificial Sequence: Synthetic coding sequence"
  source 1..1383: mol_type = other DNA
atgcaacgtgtcaacatgataatggcggaatctcctggccttatcacgatttgcctactcggatacctgctgagtgccgagtgcaccgtgtttctggatcacgaaaacgccaacaagatactgaatagaccaaagcggtacaactctggcaagcttgaggagttcgtacagggaaacctggagagggagtgcatggaagagaaatgtagtttcgaagaagcaagagaagtgtttgaaaacacagaaagaaccaccgagttctggaagcagtacgtcgatggcgatcagtgtgaatcgaacccttgtctcaacggtggatcttgtaaagacgacattaattcttacgaatgttggtgccccttcgggtttgaagggaaaaactgtgaactggatgttacatgcaacatcaagaacggccggtgcgagcagttctgcaagaactctgccgacaacaaggtggtctgcagctgcaccgagggctatagactggcagaaaaccagaaatcttgcgaaccggctgtgccatttccgtgtggaagggtgagcgtgagccagacctctaaactgacacgcgcggagaccgtgtttcctgatgttgactacgttaacagcaccgaagccgagacgattcttgataacattacacaatcaacacagtcattcaatgacttcacgagggtggtgggaggcgaggacgcgaaacccgggcagtttccgtggcaagtggtgctaaatggtaaagtggatgctttctgcggcggatctatcgtgaacgagaagtggatcgttacagcagctcattgcgtagaaacaggggtaaaaatcacagttgtcgcaggagaacacaacattgaggaaactgaacacacagagcagaaaaggaacgtaattaggattatcccacaccacaactacaacgcagcgatcaacaagtacaatcacgatatcgcccttctggagctggatgaacctttggtgctgaacagttacgtcaccccaatttgtatcgccgacaaagaatatacaaacatcttcctcaaattcggaagcggatatgtgagtggctggggaagggtgttccataaaggcaggagtgctctcgtgctgcagtatctgagggtccccctggtggatcgggctacatgcttgctcagcactaaattcaccatttacaacaatatgttctgcgcggggttccatgaaggcggacgagactcgtgtcaaggcgactccggtggaccacacgttaccgaggtggaggggacatcttttctgactgggattatttcctggggtgaagagtgtgctatgaaaggaaaatacggcatctacacgaaggtttcccgatatgtgaattggatcaaagagaaaaccaaattaaca

SEQ ID NO: 8945 - DNA, 1383 bp, synthetic construct
  misc_feature 1..1383: note = source = /note="Description of Artificial Sequence: Synthetic coding sequence"
  source 1..1383: mol_type = other DNA
atgcaacgagttaacatgattatggccgaatccccgggattgatcaccatctgtctcctggggtacctgctgtcggcagaatgtaccgtgtttctggatcacgagaacgcaaacaagatcctgaaccgtccaaagaggtataacagcgggaagctggaagaattcgtgcaaggaaatctggagcgcgaatgcatggaagagaaatgttcattcgaagaggcaagggaggtgtttgagaatactgaacgtaccacggaattttggaagcaatacgttgacggtgaccaatgcgaatcgaacccatgtcttaatggtggaagctgcaaggatgacattaactcctacgaatgctggtgcccctttggttttgaaggaaaaaactgtgaactcgatgtgacctgcaacataaagaacggtaggtgcgagcagttttgtaagaattcagcggataacaaggtggtctgctcgtgtacggaaggatatcgcttggccgagaatcagaagtcctgtgaaccagcagtccctttcccatgtggtcgcgtgagcgtaagccagaccagcaagttgaccagggccgaaactgtctttccggatgtcgattacgtgaactcgactgaggctgaaactattctggataacatcacccagtccacgcaatcgtttaatgactttaccagagttgtgggaggagaagatgctaagccgggtcagttcccgtggcaggtggtccttaacgggaaggtcgatgcgttctgcggaggatccattgtcaatgaaaagtggatcgtcaccgctgcccattgcgtggaaaccggcgtgaagattactgtggtggcaggagagcataacatagaggaaaccgaacacactgagcagaagcgtaatgtgatcaggatcatacctcatcacaactacaatgccgcaattaacaagtacaaccatgacatcgccctcctcgagctggacgaacctcttgtcctcaattcttatgtgactcccatctgcatcgcagacaaagaatacactaacatattccttaagtttggctcggggtacgtgtcgggatggggacgcgtgtttcataagggacggtctgcactggtgctgcaatacctgagagtccctcttgtggaccgagctacttgtcttttgtcaactaagtttactatctacaacaatatgttttgcgcaggtttccacgaaggcgggcgtgatagctgtcaaggggattctggaggacctcatgtgactgaagtcgagggaacttctttccttactggcatcatttcgtggggcgaggagtgtgccatgaagggtaagtacggtatttacactaaagtgtcccgatacgtcaattggattaaagaaaaaacgaaacttacc

SEQ ID NO: 8946 - DNA, 1383 bp, synthetic construct
  misc_feature 1..1383: note = source = /note="Description of Artificial Sequence: Synthetic coding sequence"
  source 1..1383: mol_type = other DNA
atgcagagggtcaatatgataatggcggagtcacccggattgattacaatctgtttactgggctacttgctgtcggccgaatgtactgtgtttttggaccacgagaacgcaaacaaaatcctgaacaggcctaaacggtacaattccggtaagctggaagaatttgtccaggggaacttagagagggagtgtatggaggagaagtgctcattcgaggaggcacgcgaggtcttcgaaaacaccgagaggaccacagagttttggaaacagtatgtggacggggaccagtgtgaatccaacccttgccttaacggcggtagttgtaaggatgatattaacagctacgagtgttggtgccctttcggtttcgagggcaaaaattgtgagctagatgtcacttgcaacatcaaaaacggtcgatgcgaacagttctgcaaaaattctgccgataacaaggtggtgtgttcttgcacagaagggtacagactcgcggagaaccaaaaaagttgtgaaccagccgttccttttccctgcgggcgcgtgtccgtttcacagaccagtaaattaacccgcgcagaaacggtgttccccgacgtggattatgtaaactctacagaagccgaaacgatcctggacaatataactcagtcaacccaaagctttaacgattttacacgggtggtgggcggagaagacgctaaaccaggtcagtttccctggcaggtggtcttgaatgggaaagtggacgccttctgtgggggatccatcgtgaatgagaagtggattgtcacggccgctcattgtgtggagacaggcgtgaagatcactgtcgtcgctggtgagcataacatcgaggaaacggaacacacggagcagaagagaaatgtaatccgcataatcccacatcataattacaacgccgctatcaacaaatataaccatgacattgccctgctggagctggatgagcccctcgtgctgaacagctacgtcacccctatctgcattgcggataaagagtataccaacatatttctcaaatttgggagcggttatgtctccggatgggggagagtgtttcataagggacgttccgccctagtactgcaatacttgcgcgttcccctggtggatcgagctacctgtttactgagtaccaagttcacgatttacaataatatgttctgcgccggattccacgaggggggaagagacagttgtcagggtgactctggtgggccccatgttacagaggttgaggggacaagcttcttgactggaatcatctcctggggcgaggaatgcgccatgaaaggcaaatacggtatctataccaaggtaagcaggtatgtaaattggattaaggagaagaccaaactgaca

SEQ ID NO: 8947 - DNA, 1383 bp, synthetic construct
  misc_feature 1..1383: note = source = /note="Description of Artificial Sequence: Synthetic coding sequence"
  source 1..1383: mol_type = other DNA
atgcagagagtgaacatgatcatggcagaatcaccaggactcataacgatatgtttgcttggatacctgctctcggcggaatgcactgtctttcttgatcacgagaacgcaaataagatccttaaccgccctaaacggtacaactcaggcaagctggaagaattcgttcaaggcaacttggaacgtgagtgtatggaagagaagtgctcgttcgaagaggcacgcgaggtgtttgaaaacaccgagagaactacggaattctggaagcaatacgtcgacggtgatcaatgtgaaagtaacccctgcttgaacgggggatcatgcaaggatgacattaactcttacgaatgctggtgtccattcggctttgaaggaaagaactgtgagctggatgtgacttgtaatatcaagaacggtcggtgcgagcagttttgcaagaattctgcagacaacaaagtcgtctgttcatgtaccgaaggctaccggctggcagagaatcagaagtcgtgtgaacctgcagtgcccttcccatgcggccgcgtcagcgtgtcccagacttcgaaacttacccgggccgagacggtgtttcctgatgtggactatgtgaacagcaccgaagcagaaactattctcgacaatatcacgcaatccacccaatccttcaacgatttcactagagtggtgggtggtgaagatgccaaaccaggccagtttccttggcaagtggtgctgaacggaaaggtcgacgcattttgcggtggaagtattgtgaacgaaaagtggattgttaccgctgctcattgtgtggaaactggggtcaagattaccgtggtcgccggtgagcacaacattgaagaaaccgaacacactgagcaaaagaggaatgtgattcggatcattccacatcacaattacaacgccgccattaacaaatacaaccacgacatcgcgctgcttgaattggatgagcccctcgtccttaactcctacgtgactcctatctgtatcgcagacaaggaatacaccaatatcttcctcaagtttggttcaggatatgtcagcggatggggccgagtgtttcataagggtagatccgcactggtgctgcagtacctgagggtgccgcttgtggatagggcaacttgtctgctctcgactaagttcaccatttacaacaatatgttttgtgcgggtttccatgagggcggaagagattcgtgtcagggggattctggtggacctcatgtgaccgaggtggaaggaacctcctttttgactggtataatctcttggggagaagagtgtgccatgaagggaaaatacggaatctacacgaaggtcagtcggtacgtcaattggattaaagagaaaaccaaactcacg

SEQ ID NO: 8948 - DNA, 1383 bp, synthetic construct
  misc_feature 1..1383: note = source = /note="Description of Artificial Sequence: Synthetic coding sequence"
  source 1..1383: mol_type = other DNA
atgcagagggttaacatgataatggccgagagtccaggcttgattaccatctgtcttctcggttatctcctgtccgcggagtgtactgtctttctcgatcatgagaatgccaataagatcctgaatagacctaagagatataactccggaaagttggaagagttcgtgcagggcaacctggagagagaatgcatggaggagaaatgctcctttgaagaggctagagaggtcttcgaaaataccgagagaaccacagaattctggaagcagtatgtcgatggcgaccagtgtgagtcaaacccgtgtcttaacggcgggtcatgcaaagatgatatcaattcctacgaatgttggtgtcctttcggcttcgaggggaaaaattgcgagctggacgtgacatgcaacattaaaaacgggagatgtgagcagttctgcaaaaactccgcagataataaagtggtgtgtagctgtactgagggatacagactagcagaaaatcaaaagagctgcgagcctgccgtgccctttccgtgcggaagagtgagcgtctctcagacctctaagctgaccagagccgaaaccgtgtttccggacgtagactacgtgaacagcacggaggccgagaccatccttgacaatatcacacagtccactcaatcattcaatgactttacgcgggtggttggcggagaggatgcaaagccagggcagttcccttggcaggtggttctaaatggcaaggtggatgctttttgtggaggtagcatagtgaatgagaagtggattgtgaccgcagcacactgtgtggagactggcgtgaagataaccgtggtggcgggggaacataatattgaggaaacggagcacactgaacagaagaggaatgtgattaggataattccacaccataactacaatgccgccattaacaagtataatcatgatatcgcccttctcgagctggatgagcctctggtgctaaattcatacgtcacacccatctgtattgcggacaaggagtacaccaacatctttctcaagtttggctcgggctatgttagtggatggggccgcgtgtttcacaagggtagaagtgctctggttctccagtatctacgggtcccgttggtggaccgggccacgtgcctgcttagtacaaagttcactatctacaataacatgttctgcgctggtttccacgagggaggaagggactcatgtcagggggacagcggtggccctcacgtcactgaggttgagggcaccagtttccttaccggcatcattagctggggtgaggagtgcgctatgaagggaaagtacggcatatacacaaaggtatcccggtacgttaactggatcaaagaaaaaacaaaattaaca

SEQ ID NO: 8949 - DNA, 1383 bp, synthetic construct
  misc_feature 1..1383: note = source = /note="Description of Artificial Sequence: Synthetic coding sequence"
  source 1..1383: mol_type = other DNA
atgcagagggtgaacatgataatggccgaaagccctggactgatcactatctgcctgctcggatacctgttgtctgcagaatgcactgtgtttctggaccacgagaacgcgaacaagatcctgaaccggccaaaacgctacaattcaggcaagctggaagagttcgtgcaaggtaaccttgagcgggaatgcatggaagaaaaatgctcgttcgaagaagcgagggaggtgtttgagaatactgaacgcactaccgagttttggaaacagtatgtcgacggggaccagtgcgaatccaacccgtgcctgaatggcggatcgtgtaaagacgacattaactcctatgagtgttggtgcccatttggatttgaagggaaaaactgtgaattggatgtcacctgtaacatcaagaatggaagatgtgagcagttctgcaagaactcggcagacaacaaagtggtgtgctcctgcactgagggatatagactcgccgagaatcaaaaatcctgtgagcccgcggtcccgttcccctgcgggcgcgtgtccgtctcccagacttcaaagctgaccagagccgaaacggttttcccagacgtcgactacgtgaactccactgaggctgaaactatcttggataacatcacccaaagcacccagtccttcaacgacttcacgagagtggtcggtggagaggacgcgaagccgggccagtttccatggcaagtggtcctgaatggtaaggtcgacgccttctgcgggggatctatcgtgaatgaaaagtggattgtcaccgctgctcactgcgtcgagacgggagtcaaaatcacggtggttgcgggagagcacaatattgaagagactgagcacaccgaacaaaagcgcaacgtcattcggattattccgcaccataactacaacgctgccatcaataagtacaaccacgacattgccctgctggagctcgacgagccactggtgctgaattcgtatgtaaccccgatctgcatcgccgataaggaatacaccaatatcttcctcaagtttggaagcggctacgtgagcgggtggggaagggttttccacaagggacgctcagccctggtgttgcagtacctgagagtgccactggtggacagggctacctgcctgctgtcgactaagttcactatctacaacaacatgttctgcgccgggttccatgaaggaggaagagattcgtgccaaggtgacagcggaggaccacatgtgaccgaggtggaaggcacctcgttcctgacggggatcatctcttggggagaagaatgtgcgatgaaggggaaatacggcatttacaccaaagtgtcccgctacgtgaattggatcaaggaaaagactaagctgact

SEQ ID NO: 8950 - DNA, 1383 bp, synthetic construct
  misc_feature 1..1383: note = source = /note="Description of Artificial Sequence: Synthetic coding sequence"
  source 1..1383: mol_type = other DNA
atgcagcgggtgaacatgatcatggctgagtccccaggactgattacaatttgtcttctggggtacctcttgtccgctgaatgcacagtgtttctagaccacgaaaatgctaacaaaatcttgaatcgcccgaaacgctacaacagtggaaagctcgaagagttcgttcaagggaatctggagagggagtgcatggaggagaagtgtagtttcgaggaggctcgggaagttttcgagaacacagagagaacgaccgagttctggaagcagtacgtcgatggcgaccagtgtgagagcaacccctgtctcaacggaggctcttgcaaggatgacattaatagttacgaatgctggtgtcctttcggtttcgagggaaagaactgcgagcttgacgttacttgtaatatcaagaacgggcggtgcgaacagttctgcaagaatagtgccgataacaaggtggtgtgcagttgtaccgaaggctacaggctggcagaaaatcaaaagagctgtgagcctgctgtaccttttccatgtggccgcgtgagtgtttcccagacaagtaaactgacacgggctgaaacagtcttccctgacgttgactacgtgaactccacagaagcggaaaccattctggataacataacacagtcgactcagagcttcaatgattttacacgtgtggtgggtggcgaggatgccaaacctggacagttcccttggcaggttgtgctgaatggtaaggtggacgccttctgcggcgggagtatagtgaacgagaagtggatcgttaccgccgctcactgtgtggaaacgggagtaaaaatcacggtggtggccggggaacataatatcgaggagactgagcacaccgaacagaagcggaacgttatccggattattccacaccacaattacaacgctgctattaataagtacaatcacgatatcgctttactcgaattagacgaacccttagttctgaacagttacgtgactcccatatgcatcgctgacaaggagtacaccaatatcttcctaaagttcggatctggctacgtgagtggttggggacgggtgttccataaaggaaggtctgccctggtgctgcagtacctgagggttcctctggtcgatcgggccacgtgcttgctgtccacgaagtttactatctacaataatatgttctgtgcaggctttcacgaaggaggccgagactcctgtcaaggtgactccggcggccctcacgtcacagaagtagaaggcaccagtttcttaaccggtatcatcagctggggggaggaatgtgccatgaaaggaaagtacggtatctacacaaaggtatcccgttacgtgaattggatcaaggagaagactaagcttact

SEQ ID NO: 8951 - DNA, 1383 bp, synthetic construct
  misc_feature 1..1383: note = source = /note="Description of Artificial Sequence: Synthetic coding sequence"
  source 1..1383: mol_type = other DNA
atgcagcgagtgaacatgattatggctgaatctcccggcttaattacgatctgtttgctggggtatctactctcagcagagtgtacagtgtttctcgaccatgagaatgctaataaaatccttaataggcctaagaggtacaacagcggtaaactagaggagtttgttcagggtaacctcgagagggagtgtatggaagaaaagtgttctttcgaggaggcgagggaagttttcgaaaataccgaacgaacgaccgagttctggaaacaatacgttgacggagatcagtgtgaaagtaatccctgtcttaacggaggctcatgcaaagacgatataaattcatatgagtgctggtgtccatttggcttcgagggtaagaactgtgaattggacgtgacatgtaatatcaagaacggcagatgcgagcagttttgcaagaacagcgcagacaataaagttgtatgttcctgtaccgaggggtataggttggcagagaatcagaagtcctgtgagccagccgttcctttcccttgtggcagagtatccgtgtcacaaacttcaaagcttactagggcagagactgtattcccagacgtcgattacgttaattccacggaagcagaaacaatactggacaatatcacccaaagcacacagtcttttaacgactttactcgagttgttggcggtgaagacgctaaacccggccaatttccttggcaggtggtcttgaacgggaaggtcgacgccttttgtggcggatctattgttaatgagaagtggattgtgactgccgcccactgtgtggaaactggagtaaaaatcacagttgttgcgggagagcataacatagaggaaactgagcatacagagcaaaagcggaacgttatcaggataatacctcaccacaattacaatgcagcgatcaacaagtataatcatgatattgctctccttgagctggacgagcctttggtgcttaattcttatgtcacaccaatttgcatagccgataaggagtacacaaacatttttctcaagtttgggagcgggtatgtgagtggttgggggagagttttccacaaaggtagatctgctctggtccttcaatatttgagggtaccactcgttgacagagctacctgcctcctttcaaccaagttcactatctataacaacatgttttgtgctgggttccatgagggaggacgagatagttgccagggagatagcggaggtccacatgtgactgaggtggaggggacatcttttctgacaggtatcatctcttggggtgaagaatgcgcaatgaagggaaagtacggtatttatacgaaggttagccgatatgtcaattggataaaggagaaaacgaagcttacc

SEQ ID NO: 8952 - DNA, 1383 bp, synthetic construct; identical to SEQ ID NO: 8931
  misc_feature 1..1383: note = source = /note="Description of Artificial Sequence: Synthetic coding sequence"
  source 1..1383: mol_type = other DNA

SEQ ID NO: 8953 - DNA, 1383 bp, synthetic construct
  misc_feature 1..1383: note = source = /note="Description of Artificial Sequence: Synthetic coding sequence"
  source 1..1383: mol_type = other DNA
atgcagcgcgttaacatgattatggcggaatcgccaggcctgattaccatttgtctcctgggttaccttctttccgcagagtgtactgtgttcctggatcacgagaacgctaacaaaatcctgaaccggcctaaaagatacaactcggggaaacttgaagaatttgtgcagggcaaccttgagcgagaatgtatggaggaaaagtgcagcttcgaagaggcaagagaagtgttcgagaataccgaaagaactactgaattttggaaacaatacgtggatggtgatcaatgcgagtcgaacccctgtctcaacggagggtcgtgtaaggatgatatcaattcctacgaatgctggtgtccttttggctttgaaggaaaaaactgcgaactggacgtcacttgcaacattaagaatggacgttgtgaacagttctgtaagaatagcgcggacaataaagtggtttgttcctgtactgaaggataccgccttgcggagaatcaaaagagctgtgagccagcagtcccatttccttgcgggcgggtgtcagtctctcaaacgagcaagctgactcgcgccgaaaccgtctttccagatgtggattacgtgaactccaccgaggcggaaaccattttggataacataactcaatcaactcaatcctttaatgactttactcgcgtggtgggaggggaggatgcaaagcccggacaattcccttggcaggtcgtgcttaatggaaaagtggatgctttttgtggtgggtctattgtcaacgaaaagtggatcgtgaccgcagcacactgtgtcgagactggcgtgaagattaccgtcgtggcaggtgaacacaatattgaagaaaccgaacataccgaacagaagaggaacgtgatcagaatcatcccccaccataactacaatgcagcgattaacaagtacaatcatgacattgcacttctggaacttgatgagcccctcgtccttaacagctacgtgactccaatctgcatagctgacaaggagtacaccaacatttttcttaagttcgggtcaggatacgtcagcgggtggggaagagtgttccataaggggcggtcagcacttgtcctgcaatacttgcgggtgccactggtggatcgcgctacgtgtctcctttcgaccaaattcacgatttacaacaacatgttttgtgcgggctttcatgaaggaggtagagactcgtgtcagggtgacagcggagggccacacgtgactgaagtggaagggacctcgtttctgaccggaattatctcatggggtgaggaatgtgccatgaagggaaagtacggtatttacaccaaggtgtcaaggtacgtgaactggatcaaagagaaaactaagctgacc

SEQ ID NO: 8954 - DNA, 1383 bp, synthetic construct
  misc_feature 1..1383: note = source = /note="Description of Artificial Sequence: Synthetic coding sequence"
  source 1..1383: mol_type = other DNA
atgcagcgggtcaacatgatcatggctgaatcacccggcttaattacaatctgcctcttaggctatctcctctccgctgaatgcaccgtcttcctggatcacgagaatgcaaacaagatcttgaaccgcccgaagagatataactcaggaaaactggaggagtttgtgcaagggaacctggagcgagagtgcatggaggaaaagtgcagctttgaggaagccagagaggtgtttgagaataccgaacgtaccaccgagttttggaagcaatatgtggatggcgaccaatgcgagtccaacccctgcttgaatggcggttcctgcaaggacgatattaattcttacgagtgttggtgtcccttcgggttcgaggggaagaattgtgaattggatgtcacttgtaatatcaagaacggtcggtgtgaacagttctgcaaaaatagcgccgacaataaggtggtgtgctcctgtacagaaggatatcggctggccgaaaaccagaaaagctgcgaaccagcggtgccgttcccatgcggcagagtgagcgttagtcagacgagcaagctgaccagggccgagacggtattcccagacgttgattatgtgaactccactgaggccgagacaatactcgacaatattacccagtctacgcagtccttcaacgattttacgagagtcgtggggggtgaagatgcgaagccagggcagtttccatggcaggttgtcttgaacggaaaagtggacgccttctgcggtggcagcattgtcaacgaaaagtggatagtgaccgcagcacactgcgtagagacgggagtgaaaatcaccgtcgtggcgggtgagcacaatatagaagaaaccgaacatacagaacagaagcgcaatgtgatcaggattattccgcaccataattataatgccgccatcaacaaatacaaccatgacattgccctcttggagctggacgagccactggttctgaacagttatgtgacccccatatgcattgccgataaggaatatacaaacatttttctgaagtttgggtccggctacgtttccggctgggggcgcgtgtttcacaaggggcgatctgctctggttctgcagtatctgcgagtaccactcgtggacagagccacatgtcttctgagtaccaagtttacaatctataacaacatgttctgtgctgggttccatgaaggcggtcgggactcatgtcaaggtgacagtggcggtccacacgtgacagaggtggaaggtacctctttcctgactgggattatttcctggggtgaagagtgtgccatgaagggtaaatacgggatatacacaaaggtctcccggtatgtgaattggattaaagagaagaccaaactcacc

SEQ ID NO: 8955 - DNA, 1383 bp, synthetic construct
  misc_feature 1..1383: note = source = /note="Description of Artificial Sequence: Synthetic coding sequence"
  source 1..1383: mol_type = other DNA
atgcagcgtgtgaatatgattatggcggagagtcccggtctgatcaccatctgtctgctgggctatttgctgagcgcagagtgtactgtcttccttgaccacgaaaacgctaacaaaattttaaaccggccaaaaaggtacaatagcggtaaactggaggagtttgttcaaggcaatctggagcgagagtgtatggaagaaaaatgctccttcgaggaagcaagggaagtgttcgaaaatactgagcgcaccacggagttttggaaacagtatgtagacggagatcaatgtgagagcaacccgtgtctgaacggtggcagctgcaaggacgacatcaatagctacgagtgctggtgcccgttcggtttcgaaggtaagaattgtgagttggacgtcacctgtaacattaaaaacggtaggtgtgaacagttctgtaaaaactctgcggataacaaagtggtgtgttcctgcactgagggttaccgcctggcagagaatcagaaaagctgcgaacctgctgttccgttcccgtgcggccgtgtaagcgtgtcgcaaaccagcaaacttactcgggccgagacagtgtttcctgatgtggactacgtgaacagcaccgaagccgagaccattttggacaacatcacgcaatctacccagagcttcaacgactttaccagggttgttggaggagaagacgctaaaccgggccaattcccgtggcaggtcgttctgaacggcaaggtggatgccttctgcggcggcagcatcgtgaacgagaaatggatcgttaccgcagctcactgcgtggaaaccggtgtgaagatcactgtagttgctggtgaacataacattgaggagacagagcacactgaacagaaacgcaacgtcatacgcattatcccgcaccacaactacaacgcagccattaacaagtataaccacgacatcgctctgctggaactcgatgaacccctggtgcttaactcttacgtaacccccatctgtatcgctgataaggaatatacaaatatattcttgaagttcggttccgggtatgtgtcgggttggggccgcgtgttccacaaggggcgttctgcactggttctgcagtatctgagggtgccactcgttgaccgcgctacctgtctgctgtctaccaaattcactatttacaataatatgttctgtgcaggtttccacgaaggcggacgagattcgtgtcagggtgacagcggcggccctcacgtgaccgaggtggaaggcaccagcttcctgacgggtattatttcatggggtgaggaatgtgctatgaagggtaaatacggaatttataccaaagtgagcaggtacgttaactggatcaaagaaaagactaaattaacc

SEQ ID NO: 8956 - DNA, 1383 bp, synthetic construct
  misc_feature 1..1383: note = source = /note="Description of Artificial Sequence: Synthetic coding sequence"
  source 1..1383: mol_type = other DNA
atgcaacgcgttaacatgatcatggctgagtcgcccggtttgatcactatttgtcttttgggatacctgctgtccgccgaatgcactgtgttcctggatcacgagaacgcaaacaagatcctgaataggccaaagaggtacaattccggaaaactcgaggagtttgtgcaaggaaatttggagcgcgaatgcatggaggaaaaatgctcattcgaagaagcgagagaggtgttcgagaacactgagaggaccacggaattctggaagcagtacgtggacggcgatcagtgcgagagcaacccgtgccttaacggaggatcgtgcaaggatgatatcaacagctatgaatgttggtgcccgttcggattcgagggaaagaactgcgaactggacgtgacctgcaacataaagaacgggcggtgtgaacaattctgcaagaattccgctgacaacaaggtggtgtgctcctgcaccgaaggataccggctggcggaaaatcaaaagtcgtgcgagccggcagttcctttcccatgcggccgcgtgtcagtctcgcaaacctcaaaactgactcgcgccgaaaccgtgtttccggacgtggactacgtgaatagcaccgaagccgaaactatcctggacaatatcacccagtccactcagtcctttaacgactttactcgcgtggtgggaggtgaggacgccaaacccgggcagttcccttggcaggtggtgttgaatggaaaagttgacgcattctgtggcggaagcatcgtcaacgaaaagtggatcgtgaccgcagcgcattgcgtagagacgggagtgaagatcaccgtggtcgccggggaacacaacatcgaagagactgagcacacggagcagaaaagaaacgtgattcgcattatccctcatcacaactacaacgccgccattaacaagtacaatcacgacatagccctcctcgaacttgacgaacctctggtcctgaacagctacgtgactccaatttgcattgccgacaaggagtacactaacattttcctgaagtttggtagtggctacgtgtcgggctggggtcgggtgtttcataagggcaggagcgccctggtgctgcagtaccttcgcgtgccccttgtggatagagcaacctgtctcctctcgaccaagtttaccatctacaataacatgttctgcgctggatttcacgaaggaggacgcgactcttgtcagggagactcgggaggcccacatgttactgaagtggaaggcacctcctttctgaccgggatcatcagctggggtgaagagtgtgcgatgaaggggaagtatggcatatacaccaaagtgtcccggtacgtcaactggatcaaagaaaagaccaagctgacc

SEQ ID NO: 8957 - DNA, 1383 bp, synthetic construct
  misc_feature 1..1383: note = source = /note="Description of Artificial Sequence: Synthetic coding sequence"
  source 1..1383: mol_type = other DNA
atgcagagagtcaacatgattatggcagagtcgcctggcctgatcaccatttgtctgctgggttacttgctgtccgcggaatgtacggttttcctggatcatgaaaacgccaacaagatcctgaaccgccctaaacgatacaactccggaaaactggaagaattcgttcagggcaacctggagagagaatgtatggaagaaaagtgtagcttcgaggaagcgagagaagtgtttgaaaatactgaaagaactactgagttttggaagcaatacgtcgatggcgaccagtgtgaatcgaatccatgtcttaatggcggaagctgtaaggacgacataaactcttacgagtgttggtgtccatttgggtttgaaggtaagaactgtgagctggacgtgacctgtaacattaagaacggtaggtgtgaacaattttgcaagaattccgcagataacaaagtcgtgtgttcgtgcaccgagggatacagacttgctgaaaaccagaagtcgtgtgagccggctgtgccttttccgtgtgggagagtctcggtgagccaaacctcaaagctgactcgtgccgaaacggtgtttcccgacgtggactacgtgaactcgactgaagcggagactattcttgataacatcacccaatcgactcaatcattcaacgactttacccgcgtggtggggggagaggacgcaaagccaggacaatttccttggcaggtggtccttaacggcaaggtggatgcgttttgtggaggatcgattgtgaacgagaagtggattgtcaccgcggcgcactgcgttgaaaccggcgtgaagattactgtagtggcaggtgagcataacatcgaagaaaccgaacatactgaacaaaaaagaaacgtgatccgaattatcccacatcacaattacaatgccgcaatcaataagtataatcacgatattgcacttcttgaactggatgaaccccttgtgctgaattcctacgtgaccccgatctgtatagccgataaagaatataccaacatttttctcaagtttggttctggatacgtctccggctggggtcgtgtgtttcataaaggtcggtcagcactggtcctgcagtacctccgggtccccctggtggacagagctacttgtctcctgtcgacgaagtttactatatacaacaatatgttctgcgcaggctttcatgagggaggacgcgattcatgtcagggcgatagcggagggccacatgtcactgaggtcgagggtacgtcgtttcttaccgggattatctcttggggagaggaatgtgctatgaagggcaagtatgggatctacaccaaggtgagcagatacgttaattggattaaggaaaaaactaagctgacc

SEQ ID NO: 8958 - DNA, 1383 bp, synthetic construct
  misc_feature 1..1383: note = source = /note="Description of Artificial Sequence: Synthetic coding sequence"
  source 1..1383: mol_type = other DNA
atgcaacgcgtcaacatgatcatggcagaatccccaggacttattactatttgcctcctggggtacctgctctccgcagaatgtaccgtgtttctggatcatgaaaatgcaaacaaaattcttaacagaccaaagagatacaactcgggaaaactcgaggagtttgtgcaaggcaaccttgagagggagtgtatggaggaaaagtgttcgtttgaggaggcccgcgaagtattcgaaaatacggaacgcactactgaattctggaaacagtacgtcgatggagatcagtgtgagtcgaacccttgccttaacggaggttcatgtaaggatgatatcaacagctacgaatgttggtgtccatttggcttcgagggcaagaattgcgaactggatgtgacttgcaacatcaagaacggaagatgtgaacaattctgtaagaactccgcggacaataaagtggtgtgctcgtgtaccgaaggttaccggctggcagaaaaccaaaagtcctgcgagccggcagtgccatttccgtgtggtagagtctcggtgagccagacctcaaagctcactcgcgcagagactgtgtttccggacgtcgattacgtgaactccaccgaagcagaaactattctggataacatcacccagtcgacccagagctttaacgatttcactcgcgtcgtgggaggggaagatgcgaagcccgggcagtttccttggcaggtggtgctgaatggtaaggtcgatgcattctgtggaggctccattgtgaacgaaaagtggatagtgactgcggcacactgtgtggaaactggagtgaagatcactgtggtggccggcgagcacaacattgaagagacggaacacaccgaacagaaacggaacgtgattaggatcattcctcaccataactacaacgctgcaattaacaaatacaatcatgatattgcactgcttgaactcgatgaacctttggtgctgaattcgtatgtgactcccatttgcattgccgacaaggagtacactaacatatttctgaagttcggatcaggatacgtctccgggtgggggagagtgttccataagggtcgatcagcactggtgcttcagtacctgagggtccctttggtggatagagccacctgtctgctttcaaccaaattcactatttacaacaatatgttttgtgctggctttcatgaaggaggtcgggattcgtgtcagggggattcagggggaccccacgtcaccgaagtcgagggtacttccttcttgaccggcataatctcctggggagaagagtgtgccatgaagggcaagtacggtatttacaccaaggtgtccagatacgtgaactggattaaggagaaaactaagttgacc

SEQ ID NO: 8959 - DNA, 1383 bp, synthetic construct
  misc_feature 1..1383: note = source = /note="Description of Artificial Sequence: Synthetic coding sequence"
  source 1..1383: mol_type = other DNA
atgcagcgggtaaacatgatcatggctgaaagtcccggactgataacaatatgcctgcttggatatttactaagtgctgagtgtactgtgttcctggatcacgaaaacgcaaacaaaatcctaaaccgacccaaacggtataattctggaaaactagaagaatttgttcagggaaatctcgagagggaatgtatggaagaaaagtgctccttcgaagaagcacgagaggtgttcgaaaatactgagcgaacgacagaattctggaaacaatatgtggatggagaccaatgcgagtccaacccctgtctcaacgggggaagttgtaaagatgacataaattcatatgaatgctggtgtccatttggattcgaagggaaaaattgtgaattagatgtgacatgtaacatcaagaatggaagatgcgaacagttttgtaaaaacagtgccgacaacaaagttgtttgctcatgtactgaagggtatcgactggccgagaatcagaaaagttgcgaaccagcagtgccctttccttgtgggagggtgagtgtatctcagacaagtaaacttactagggcagaaactgtcttccccgacgtcgactatgttaactcaacagaagccgagacgatcctagataacattacacagtctacacaatccttcaacgatttcactcgggtcgtggggggagaagatgccaaacccgggcagttcccctggcaggtagtgcttaatgggaaagtggatgcgttctgcggaggatcaatcgtgaacgagaagtggatagtgactgctgctcactgtgttgaaacaggagttaagatcacagtggtggcaggagaacacaacatcgaagaaactgaacatacagaacagaaacgaaatgtcatcagaataatcccacaccataattacaacgcggccataaacaaatacaaccacgacatcgcactcctagaattggacgaacccttggtgctgaattcatacgtcacacctatctgcatagcggataaagaatatacaaatatcttcctcaagttcggatctgggtatgttagtgggtgggggagggttttccacaaagggagatctgccctggtgcttcagtacctcagggtgccactggtggatagggccacatgtctcttatctacaaaatttacaatctataataatatgttctgtgccggattccacgaaggaggaagagacagttgtcagggagattctggagggccacatgtgacagaggtggaagggacatccttccttacggggataatatcttggggggaagaatgtgctatgaagggaaagtatgggatatatactaaagtctctcggtatgtgaattggatcaaagaaaaaacaaaactcaca

SEQ ID NO: 8960 - DNA, 1383 bp, synthetic construct
  misc_feature 1..1383: note = source = /note="Description of Artificial Sequence: Synthetic coding sequence"
  source 1..1383: mol_type = other DNA
atgcagcgagtgaacatgatcatggccgagtccccgggcttaattactatctgcctcctgggatatctgctctctgccgaatgtacagtctttctggatcacgagaatgctaacaagatcctgaatagaccaaaaagatataatagtgggaagctcgaagagtttgtgcagggcaacctggagcgggagtgtatggaggaaaaatgcagctttgaagaagcacgggaagtttttgaaaatacagagcggactactgagttctggaagcagtatgtggacggcgaccaatgtgagtccaacccctgtcttaatggagggtcctgtaaagatgacataaactcatatgaatgctggtgtccattcggtttcgagggtaaaaactgcgaattggacgtgacctgtaacattaagaacggtaggtgtgagcagttttgcaagaatagcgccgacaataaggtggtgtgcagttgcactgaaggctatcggctcgccgagaaccagaaaagttgtgaacccgctgtaccctttccctgcggccgcgtgtccgtctcgcagacatccaagctcacaagggccgaaactgtgttccccgacgtggactatgtgaattctaccgaagccgaaacaatcctggataacattactcaatctacccaatcctttaacgatttcaccagggtggtcgggggcgaggacgccaaaccgggtcagtttccatggcaggtggttctgaatggtaaagtcgacgccttctgcggcggcagtattgtgaatgagaaatggattgtaaccgccgcccactgtgtcgagacgggggtgaagataacagtggtcgcaggcgaacacaatattgaggaaacagaacataccgagcagaaacgtaatgtaatccgcatcattcctcaccataactataacgcagccattaataagtataatcatgacatagctttactagaactagatgaacctctggtgttgaatagctacgtgactcccatctgcatcgcagataaagaatacactaacatcttcctcaagttcgggtctggttacgtcagcggctgggggcgggtgttccacaagggcagatcagccctggtgctccaataccttagagtgccactggtggaccgtgctacctgtttactcagtaccaaattcactatttataataatatgttttgtgccgggttccatgaaggtggccgggattcgtgtcagggcgactccggtggaccccacgtgacagaggtcgaaggtaccagttttctgaccggcattatctcctggggcgaagaatgtgccatgaaaggcaagtatggaatatatacaaaggtcagccgctacgtgaactggatcaaggagaagaccaaattgacc

SEQ ID NO: 8961 - DNA, 1383 bp, synthetic construct
  misc_feature 1..1383: note = source = /note="Description of Artificial Sequence: Synthetic coding sequence"
  source 1..1383: mol_type = other DNA
atgcagcgcgtaaatatgatcatggctgagagcccaggtttgattactatctgtctgttgggttatctgttgtccgcggagtgtaccgtctttctggatcacgaaaacgccaataaaattttgaaccgcccgaagaggtacaacagtggaaagctcgaggaattcgtgcagggaaacctggagagggagtgcatggaggagaaatgctctttcgaggaagctagagaggtgttcgagaacacggagagaacaactgagttctggaagcagtacgtcgacggtgaccagtgtgaaagtaacccgtgtctgaacggtggaagctgtaaggatgatatcaacagttacgagtgctggtgccccttcggttttgaaggaaaaaattgcgagttggacgtgacctgtaacataaagaacggcaggtgtgagcaattctgcaaaaacagtgcggataacaaggtcgtctgctcctgcaccgagggttatcgcctcgctgagaatcagaaatcttgcgaaccggcagtccctttcccatgcggaagagtgtcagtctcacagacctcaaaactgacgagagcggaaacggtctttccagacgtggactatgtgaattccaccgaggccgaaaccattctcgacaacatcacacagtctacccagtcatttaacgacttcaccagggtggtaggtggagaggacgctaagccaggacaattcccgtggcaggtggttctcaacggtaaggttgatgcattttgcggtggttccatcgtcaacgagaaatggattgttacggcagcccattgtgtggagaccggagtgaagatcactgttgtggcgggagagcacaatatcgaggagacagagcatactgaacagaaacgcaacgttatcaggataatccctcaccataactataacgctgcgattaataaatacaaccacgatatagctctgctcgagctcgacgaaccacttgtcttgaattcctacgtgaccccgatatgcatcgcggacaaggagtacaccaatatattcctcaagttcggatctggctacgtatctggatggggacgcgtgttccataagggaagaagcgctcttgtgcttcagtacctgcgcgtgcccttggtggacagagctacttgtctcctttccaccaagtttactatatacaacaatatgttttgcgcgggatttcatgagggcggcagggactcctgtcaaggtgactcaggaggacctcacgtgacggaagtcgaaggtacgtctttcctgaccggcatcatttcttggggagaagagtgtgccatgaagggtaaatacggaatctatacaaaagtatccaggtatgttaactggatcaaggagaaaaccaagctgact

SEQ ID NO: 8962 - DNA, 1383 bp, synthetic construct
  misc_feature 1..1383: note = source = /note="Description of Artificial Sequence: Synthetic coding sequence"
  source 1..1383: mol_type = other DNA
atgcaacgcgtgaacatgatcatggcggaatccccagggctgataactatctgcctgctgggatacctgctgtcagcggagtgcacggtgtttcttgaccacgaaaacgccaataagattctgaatagaccaaagcgctacaactccggaaagctcgaagagttcgtgcaaggaaacctggagagggagtgcatggaagaaaagtgctcgtttgaagaagccagagaagtctttgagaacactgaacggaccacggaattctggaagcagtacgtggatggggaccagtgcgaatcgaatccatgtctgaatggaggatcgtgcaaggacgacatcaactcctatgagtgctggtgcccgtttggcttcgaaggaaaaaactgtgaactcgacgtgacgtgcaacatcaagaacggacggtgcgaacaattctgcaaaaattcggctgacaacaaggttgtgtgctcctgtactgaaggataccgcctggcagaaaaccagaagtcgtgtgaaccggccgttccattcccgtgtggacgcgtgtccgtgtcgcagaccagcaagctcactcgcgcagagactgtgttcccggatgtcgactatgtgaattcaaccgaggccgaaactatcctggacaacatcactcaatcaactcaatcattcaacgacttcactagagtcgtgggcggcgaagacgccaagccgggccaattcccatggcaggtggtgctgaatgggaaggtggatgcgttctgcgggggtagcattgtcaacgaaaagtggatcgtgacggcggctcactgcgtcgaaaccggagtgaagattacggtcgtcgcgggtgagcacaatatcgaagaaactgagcatacggagcaaaagcggaacgttattcggattattccgcaccacaactacaacgcagccatcaacaaatacaatcatgatatcgccttgctggaactcgatgagccgctggtgctcaattcctacgtgacgccgatctgcatcgccgataaggaatacaccaatatctttttgaagtttgggtccggatacgtcagcgggtggggccgggtgttccataaaggcagatcggcactggtcctgcagtacctgcgggtccctctggtcgaccgggccacctgtcttctgtcaaccaagttcaccatctacaacaatatgttttgtgcgggcttccacgaaggaggaagggactcctgccagggagactccggaggccctcatgtgaccgaggtcgaaggaactagcttcctgaccggaatcatctcatggggagaggaatgcgctatgaaaggcaaatacggaatctacactaaggtgtcacggtacgtgaactggatcaaggaaaaaaccaagctgacc

SEQ ID NO: 8963 - DNA, 1383 bp, synthetic construct
  misc_feature 1..1383: note = source = /note="Description of Artificial Sequence: Synthetic coding sequence"
  source 1..1383: mol_type = other DNA
atgcagcgagtcaacatgatcatggcagagtcacccgggctaataacaatatgcttactcggatatcttctctctgctgaatgtactgtatttttagatcacgaaaatgccaacaaaatactgaacagaccaaaacggtataactccgggaagttagaagaatttgtgcaggggaatctggaaagggaatgtatggaagagaaatgctcattcgaagaagctagagaagtgtttgaaaatacagaacggactacagaattctggaagcagtacgtggatggagatcagtgcgaatctaatccatgcctcaatgggggaagttgcaaagatgatataaactcatatgaatgctggtgtcccttcggattcgaaggaaaaaactgcgagctcgatgtgacatgcaacatcaaaaacggacgatgcgaacagttctgtaaaaactcggcggataataaggtagtttgttcttgcacagaaggatataggctcgctgaaaaccaaaaatcctgcgaacccgccgtaccttttccctgtgggagggtgtccgtgtctcagacttccaaactgactagggccgaaactgtcttccccgatgtagattatgtgaattccacagaagcggaaacaattctggacaacattactcagtcaacacagtcctttaacgatttcactagagttgttgggggggaggatgctaaaccagggcagtttccttggcaggttgtgctgaatgggaaagttgacgctttttgtgggggatcaatcgtgaatgaaaaatggatcgttacagctgcccattgtgtggaaactggagtcaagatcacagttgttgctggggaacacaacatcgaagaaactgaacatactgaacagaaacggaacgtgattagaatcataccacatcataactataacgcagccatcaataaatacaatcatgacatagctctcttggaactcgatgaacccttagtcctcaactcctatgtgactccaatttgcatagcagacaaggaatatacaaacatatttctaaaatttgggtctggatatgtatccggatggggacgcgtctttcataagggacgaagtgctctcgtgcttcagtatctacgggtgcccctcgtggatagagctacttgccttctttcaactaaattcacaatttataacaatatgttctgtgccgggttccatgaaggagggcgcgactcctgtcagggggactcggggggaccgcatgtaacagaagtcgaggggacgtcttttctaactggaatcatctcctggggagaagagtgtgccatgaagggaaaatatggaatctacactaaagtgagtagatatgtgaattggattaaagaaaaaacaaaactcaca

SEQ ID NO: 8964 - DNA, 1383 bp, synthetic construct
  misc_feature 1..1383: note = source = /note="Description of Artificial Sequence: Synthetic coding sequence"
  source 1..1383: mol_type = other DNA
atgcagagggtgaatatgataatggccgagtctccaggcttaatcaccatttgtttattgggatacctgttgagcgctgaatgtactgtgtttcttgatcacgaaaatgcgaataagattctgaatcggcctaaaagatataactctggaaagcttgaagagtttgttcagggtaatttggaacgtgaatgtatggaggagaaatgttcttttgaggaggctcgtgaagtcttcgaaaatacagagaggacgactgaattctggaagcagtatgttgatggagatcagtgtgaaagcaatccatgtttaaatggaggctcatgcaaggatgatattaacagttacgaatgttggtgcccattcggttttgaaggtaagaattgtgagctggacgttacatgtaatattaaaaatggacgttgcgaacaattttgtaagaactccgctgataacaaggttgtttgtagctgcacggagggatatagactagccgagaatcaaaaatcgtgtgagccagctgttccgttcccgtgcggacgcgtatcagtgagtcaaacgagcaaacttacacgcgcagagacagtcttcccagacgtggactacgttaatagcacagaagcggagactatactcgataatataactcaaagtacacaatcattcaacgactttacacgagtcgtaggtggtgaagacgcaaagccaggacaatttccgtggcaagttgtgttgaatggtaaggttgatgcattttgcggcggatcaattgttaacgaaaaatggattgtgacagcagcacattgcgtagaaactggtgtgaagattacagttgttgctggcgaacacaacattgaggaaacagaacatactgaacagaaaagaaatgtcatacgtattatcccacatcataattataacgccgcaattaataaatacaatcatgatattgctcttcttgagttggatgaaccactggtcctcaattcttatgtcaccccaatttgcattgccgataaagagtatacaaatatcttccttaaatttggttccggatacgtctctggatgggggagagtgttccacaagggacgtagtgcccttgtcctacaataccttcgagttccactcgttgatagagcgacttgtttgttgtcaacaaaatttaccatttacaataacatgttctgcgcgggttttcatgaaggaggacgggatagttgccagggagattctggaggtccgcacgttaccgaagttgaaggaacttcatttcttacaggtataatctcatggggtgaagaatgtgctatgaaaggcaaatatggtatttataccaaggtctcacgctatgtgaactggatcaaggagaaaactaagctaaca

SEQ ID NO: 8965 - DNA, 1383 bp, synthetic construct
  misc_feature 1..1383: note = source = /note="Description of Artificial Sequence: Synthetic coding sequence"
  source 1..1383: mol_type = other DNA
atgcagcgtgtgaacatgattatggccgaatctcccggcttaattaccatctgcctgctgggatacctgctctcagcagaatgtacggtcttcctcgatcatgagaacgctaacaaaatactgaataggccgaaacggtataactctggtaagcttgaggagtttgtgcagggaaatctggagcgagaatgtatggaggaaaaatgctcattcgaagaggcccgggaggtctttgagaacaccgagcggactaccgaattttggaagcaatacgtggacggcgatcagtgtgagagtaacccttgtttaaatggaggatcttgtaaggatgacatcaattcctatgaatgttggtgccccttcggttttgagggcaaaaactgtgaattggatgtcacttgtaatatcaagaacggccgttgtgagcagttttgcaaaaattcagcagacaacaaagtagtgtgctcttgtacagaaggatatcgactggcggagaatcaaaagagttgtgagcctgcagtacccttcccatgtggccgcgtctctgtctcacagacaagcaaacttaccagagccgaaactgtcttcccagacgttgactacgtcaattcaaccgaagcagagaccattttggataacataacacagtctacccagtcatttaacgacttcacacgggtggtcggcggagaagacgccaagccaggacagtttccctggcaggtggtgttgaatggaaaagtggatgcgttttgcggagggagcattgtcaacgagaaatggatcgtgactgctgctcactgtgtggagaccggggtgaagattacagttgttgccggagagcataatatagaggagacggagcacacagaacagaaacgtaatgtcatccggattatcccacatcataactacaacgcagctatcaacaaatataaccacgatatcgctttactggagctagacgagccgcttgtcttgaactcatatgtgacaccgatttgcattgcggacaaggaatacactaatatttttctcaagttcggctctggttacgtgtctggctggggccgagtgttccataaagggagaagcgcccttgtgctgcaatatctgcgggtacctctggttgaccgggccacttgcctgttgtccacaaagtttaccatctataataatatgttctgcgcgggcttccatgagggcggccgtgattcatgtcaaggcgattctggaggcccccacgttacggaggtcgaagggacctcctttcttacgggcatcatttcctggggagaagaatgtgccatgaagggcaagtatggcatatacacgaaggtcagcagatacgtgaactggatcaaagaaaagacaaaactaact

SEQ ID NO: 8966 - DNA, 1383 bp, synthetic construct
  misc_feature 1..1383: note = source = /note="Description of Artificial Sequence: Synthetic coding sequence"
  source 1..1383: mol_type = other DNA
atgcagcgtgtgaacatgataatggccgagtctccggggctaattaccatttgtttgcttgggtatctactatccgctgagtgtacagtgtttctggatcatgagaatgctaacaaaatcctgaaccgcccgaagagatacaatagtggaaaactggaggagtttgtgcagggcaatcttgaacgcgagtgcatggaagaaaagtgcagttttgaagaggccagagaagtcttcgagaacactgaacggacgaccgagttttggaagcaatatgtagatggagaccagtgcgagtctaatccgtgcctgaacggtggctcctgtaaagatgacatcaacagctatgaatgctggtgcccgttcgggttcgaaggcaagaattgcgaactagacgtgacctgtaatatcaagaatgggaggtgtgaacagttttgtaaaaattctgccgataacaaagtggtctgcagctgcactgagggttatcgactcgctgaaaatcagaaaagctgtgagccagcagttcccttcccctgcggcagggtgtctgtgtctcaaacatctaagctgaccagagcggaaacagtcttccctgacgtggactacgtgaactccacggaagccgagacaatccttgacaacatcacccagtcgacacagagcttcaatgatttcacacgagtggtcggaggggaggacgcaaaaccaggacagttcccttggcaggttgtgctcaacgggaaagtggacgctttctgtggtggttccattgtgaatgagaaatggatcgtaacggccgcccattgcgtggaaacaggcgtaaagatcacagtcgtcgctggtgaacacaacattgaggagactgagcacaccgagcaaaagcggaacgtcattaggatcatacctcaccataactataacgcagcaattaacaaatacaaccatgacattgcgttattggagctcgacgagcccctggtgctgaattcatacgtgacccccatttgcattgctgacaaggagtacaccaacatcttcctgaagttcggctctggttacgtgtctggatgggggcgggtatttcacaaaggccgctcagctctcgtgctgcagtatctcagggtgcccctcgttgatagggccacttgcttgctttcgaccaaatttaccatttacaataacatgttctgtgctggattccacgaaggtggacgggactcatgtcagggcgattccggggggccacacgttaccgaagtggagggaactagctttctgaccgggatcatctcgtggggggaggagtgcgccatgaagggcaaatatggcatttataccaaagtgtcgcggtatgtgaattggatcaaggaaaagacgaaactgaca

SEQ ID NO: 8967 - DNA, 1383 bp, synthetic construct
  misc_feature 1..1383: note = source = /note="Description of Artificial Sequence: Synthetic coding sequence"
  source 1..1383: mol_type = other DNA
atgcagcgcgtcaacatgataatggcagagagtccgggactgattactatctgccttttgggatatctgctctccgcagagtgcaccgtgttcttggaccacgagaacgccaacaagattctgaatcgcccaaagagatataactccggaaaattggaggaattcgttcaaggtaatcttgagcgcgagtgcatggaggaaaagtgctcatttgaagaagcccgggaagtgtttgagaatacagagcgtaccactgagttttggaaacaatacgtggacggagaccagtgcgaaagcaacccctgcctgaacggaggctcttgcaaggatgatatcaatagctacgagtgctggtgccctttcggatttgagggtaaaaattgcgaactcgacgtgacgtgtaacatcaagaacggccgatgcgagcaattctgcaaaaacagtgccgacaacaaggtggtgtgctcctgcacagagggctaccgtctggccgagaatcagaagagctgcgagcccgcggtaccgttcccctgcggccgcgtctccgtgtcacagacatcaaagttgactagggcagagaccgtgttcccagacgtagattatgtcaactctactgaggccgaaaccattctggacaacatcacacaatcgacccagagcttcaatgatttcactcgagtcgttggcggagaggacgccaagcccggtcaattcccctggcaggtggtgctgaacggaaaggtggacgcattttgcggaggctctatcgtgaatgagaagtggattgtgacggctgcgcactgcgtcgagacaggcgtgaagattactgtcgtggccggggagcacaatattgaggagaccgaacacactgagcagaaacgcaatgtaatccgcatcattccccatcacaactataatgcggccatcaataagtacaatcacgacatagcgttgctcgaactcgatgaacctctagtgttgaactcatacgtcaccccgatctgcattgccgacaaagagtatacaaacatctttctgaagttcggtagtggctacgtgtcaggatggggccgtgtatttcacaaagggcgatccgctttggtgctgcagtaccttcgggtcccgctcgtggatcgcgcgacgtgcttgctgagtactaagttcactatctataacaatatgttctgcgcaggattccacgagggaggccgcgattcctgccagggcgattccggcggtccacacgtgaccgaggtcgagggaacatcgtttctcaccggcatcattagctggggagaggagtgcgccatgaagggtaaatatggtatctacaccaaagtcagccgctatgtaaactggattaaggagaagactaagctcacc

SEQ ID NO: 8968 - DNA, 1383 bp, synthetic construct
  misc_feature 1..1383: note = source = /note="Description of Artificial Sequence: Synthetic coding sequence"
  source 1..1383: mol_type = other DNA
atgcaacgcgtgaacatgattatggcagaaagcccaggtctgattactatttgcctgcttggctacttgctgagcgcagagtgcaccgtgtttcttgatcatgaaaacgctaacaagatcctcaatcgcccgaagaggtacaacagcggaaagctggaagagtttgtgcaaggcaacctggaacgcgaatgtatggaagaaaagtgttccttcgaggaagcacgcgaagtgtttgaaaacacggaaagaaccaccgagttttggaagcaatacgtggatggagatcaatgtgaatcgaacccttgtctgaatggaggttcgtgtaaggacgacataaacagctacgagtgttggtgtccttttggatttgaaggtaagaactgtgaactggatgtcacctgcaacatcaaaaacggaaggtgcgagcagttctgcaaaaacagcgcagacaacaaggtggtctgctcgtgcactgaaggttatcgtcttgccgagaaccagaagagctgtgagcctgcagtgccatttccgtgtggtcgcgtgtccgtctcgcaaacctcaaaacttacccgcgcagagactgtgtttcctgatgtggactatgttaactccacggaggctgagacgattcttgacaacatcacccaatcaactcagtccttcaatgattttactagggtggtcggaggagaggacgccaaaccaggacaatttccatggcaagtcgttttgaatggaaaagtagatgcgttctgtggcggttcgattgtgaatgagaaatggattgtgactgcagcacattgcgtcgagacgggcgtcaagattactgtcgtcgcgggagaacataacatcgaggagactgaacacaccgagcaaaagagaaatgtgatccgaatcattccacaccataactataatgcagcgataaacaaatacaatcatgatattgcactgcttgagcttgacgaacctctggtcctcaatagttacgtgacgcctatctgtattgcagataaagaatacactaatatctttctgaagttcgggtctggttacgtctccggttggggaagggtgtttcataaaggccgatcggcactggtgcttcaatacttgcgggtgcctctggtggatagggcgacctgtctgctgtctactaagttcactatttacaataacatgttttgtgcaggattccacgagggtggtagagactcatgtcaaggcgattccggtggtccacatgtgaccgaggtggaaggaacctcgtttctgaccgggatcatatcgtggggagaggaatgtgcgatgaagggtaagtacggcatttacaccaaggtgtcgagatacgtgaattggatcaaggaaaaaaccaaacttacc

SEQ ID NO: 8969 - DNA, 1383 bp, synthetic construct
  misc_feature 1..1383: note = source = /note="Description of Artificial Sequence: Synthetic coding sequence"
  source 1..1383: mol_type = other DNA
atgcagcgcgtcaacatgattatggcagagtccccagggctcatcaccatatgtctcctaggctatcttctctccgctgagtgcacagtgttcctcgaccatgagaacgccaacaagattctcaatcggcccaaaaggtacaatagtggtaagcttgaagagttcgtgcaagggaacctggaaagggagtgtatggaagagaaatgctcattcgaggaagcccgcgaggtgtttgaaaataccgaaagaacgacagagttctggaagcaatatgtggatggcgaccagtgcgaatcgaacccatgcctcaatggcggttcctgcaaggatgacatcaatagctacgagtgttggtgtcctttcggctttgagggtaagaactgcgagctcgacgtcacctgtaatattaaaaacgggaggtgcgaacaattctgtaaaaattctgcagacaacaaggtggtttgttcttgtacggagggctaccgtttggcagagaaccaaaaatcttgtgaaccggctgtcccgtttccatgtggacgagtttcggtcagtcaaacttctaagctgacaagggcagaaactgtgtttccagacgtggattacgttaatagcaccgaagcggagactattctcgacaacatcactcagtcaacacagtcttttaatgattttaccagagttgttggcggtgaagatgcaaaaccaggtcagtttccatggcaagtcgtactgaatgggaaagtcgatgctttctgtggcgggagcatcgttaatgagaagtggatcgtcacggccgcccactgcgtggagacaggtgtgaagatcacagtggtcgccggtgagcacaacatcgaagagaccgagcacaccgaacagaagaggaacgtgatacgcatcattccccaccacaattacaacgccgccatcaacaaatacaatcacgatatcgccctgcttgagctcgatgagcccctggtgctaaacagctacgtgacacccatctgtatcgccgataaggagtatactaacatttttctgaagttcggaagcggttatgttagcggctggggccgagtctttcacaagggcagaagcgccttggtcctccagtaccttcgggtgccactcgtggaccgagccacctgccttttgtcgaccaagttcaccatttacaacaatatgttttgtgcaggtttccatgagggcggtagggactcctgtcagggagactccggcgggcctcatgttactgaggtcgagggaacaagttttcttacaggcattatcagctggggtgaggagtgcgctatgaagggcaagtacggcatttataccaaagtctcccggtacgtgaactggataaaggaaaagacaaagctcacc

SEQ ID NO: 8970 - DNA, 1383 bp, synthetic construct
  misc_feature 1..1383: note = source = /note="Description of Artificial Sequence: Synthetic coding sequence"
  source 1..1383: mol_type = other DNA
atgcagagagtaaatatgattatggccgagtcaccaggtctcatcaccatctgtctacttggttatcttctttctgctgagtgcactgtgtttcttgatcacgagaacgcaaacaagattctgaatcgacctaagcgatataactctggaaaactggaggagtttgtgcaggggaatctggagcgggagtgcatggaggaaaaatgcagtttcgaggaggcacgagaagtgtttgaaaacaccgagcgcactactgaattttggaaacaatatgtggatggagaccagtgcgagtccaacccttgtctcaatggcgggtcatgcaaggacgatatcaattcatacgagtgttggtgcccgtttggctttgaggggaaaaactgtgagctggatgtcacatgtaacataaaaaatggccgctgcgaacagttttgtaagaactcagctgacaacaaagtggtctgttcctgcaccgagggatacaggttggcagaaaatcagaaatcttgtgaacccgccgtccccttcccttgtggaagagtgagcgtgagccagacatcaaaattgacgagagctgagacagtgttccccgatgtggactatgtgaactctacagaggctgagacaatactcgataatatcacacagtctacccaatcattcaatgactttacgagggtcgtaggcggggaggacgccaagcctggccaatttccctggcaagttgtgctgaacggaaaggtcgatgccttctgtggtgggagtattgtgaatgagaaatggatagtgaccgccgctcattgtgtggagacaggagtgaaaattactgtcgtggccggcgagcacaacatagaggaaaccgagcatacagaacagaagagaaacgtcatcagaattatcccccaccacaactataacgcagccattaacaaatacaatcatgatattgctttgttggaactggacgaacctcttgtgctgaatagctacgtcacgccgatctgtatcgcggataaagaatatactaacatattcctcaagttcggttccggttacgtgtcaggctggggcagggtctttcataaggggaggtctgcactggttttgcaatacttgcgggtgccgctggttgacagagcaacctgccttctgtcaactaaattcaccatttacaacaacatgttctgcgctgggttccacgaggggggtcgtgattcgtgccagggcgactcaggcggaccacacgtcaccgaggtggaggggacctcttttcttacaggcatcatctcttggggagaggaatgtgcaatgaaggggaaatacggaatatataccaaggtgtcaaggtatgtgaattggatcaaggagaagaccaaactgacg

SEQ ID NO: 8971 - DNA, 1383 bp, synthetic construct
  misc_feature 1..1383: note = source = /note="Description of Artificial Sequence: Synthetic coding sequence"
  source 1..1383: mol_type = other DNA
atgcagagggtcaacatgattatggccgagagtcctggcttgataacaatctgtctgctgggctatttacttagcgcagagtgcacggtgtttctggatcacgaaaacgcaaacaagatcctgaaccgaccaaaaaggtacaatagtgggaagctcgaagagttcgtgcagggaaaccttgagcgggaatgcatggaagaaaagtgtagcttcgaggaagcccgcgaggtcttcgaaaatacagagcgcacgaccgaattttggaaacagtacgtagatggggaccagtgtgagtccaacccatgcctgaacggcggctcatgcaaagacgatatcaattcgtacgagtgttggtgtccattcggtttcgagggaaaaaactgcgaattagacgtcacttgcaacattaagaatgggcgttgtgaacagttctgcaagaactccgccgataataaagtggtgtgttcatgtaccgagggctaccggctggcagagaaccagaaaagctgcgagccggcagttccattcccgtgcggtcgagtctctgtgtcccaaacttcaaagttgacacgcgccgaaaccgttttcccagatgtggactatgtgaacagcacagaagcagaaactattctcgataatatcacacagagcacccaatcctttaatgattttacacgggtcgtagggggtgaggatgccaagcccggccagttcccctggcaagtcgtgctgaacggaaaagtagacgcgttctgtggaggcagcattgttaacgagaaatggatagttacagccgcccactgtgtggagacaggagtgaagattacagtcgtggctggggagcataatatagaggaaaccgagcataccgagcagaagcggaacgtgatccgaattattcctcaccataactataacgctgcaattaataagtacaaccacgatatagcactgctggaattggacgagcccttggtgttgaacagctacgtgactccaatctgtatcgcagacaaggaatatacaaatatctttcttaaattcggctcgggctatgtcagtggttggggacgagtattccacaagggacggtcggctctcgtgcttcagtacctccgtgttcctcttgttgaccgcgccacctgtttgttgtcaacaaagttcacaatctataataatatgttttgcgccggctttcatgaggggggaagagactcttgccagggtgactcggggggcccacacgtgacggaggttgaaggaacgtcttttctgaccgggattatcagctggggtgaggagtgtgctatgaagggtaagtatggtatctacactaaagtttctagatacgtcaactggatcaaagaaaagacaaagctgaca

SEQ ID NO: 8972 - DNA, 1383 bp, synthetic construct
  misc_feature 1..1383: note = source = /note="Description of Artificial Sequence: Synthetic coding sequence"
  source 1..1383: mol_type = other DNA
atgcaacgtgtcaacatgataatggccgaatctccaggtctgatcaccatttgtctcctgggctacctgttgtctgccgaatgtactgtgttccttgaccacgaaaatgcaaacaagatcctcaaccgccccaaacgttataatagcggcaaactggaggaatttgtccagggaaacttggagagagaatgcatggaagaaaagtgctccttcgaggaggcccgtgaggtgtttgaaaataccgaaaggactaccgaattctggaagcagtacgtcgatggtgatcagtgcgagagtaacccttgcctgaatggcggatcttgcaaagatgacattaactcttatgagtgctggtgccctttcggatttgagggcaagaactgtgagcttgatgtgacatgcaatatcaaaaatggaagatgtgaacagttctgtaagaactccgctgataacaaagtggtttgctcctgtaccgagggttatcgtcttgctgagaaccaaaaatcttgcgagcccgctgtgccttttccttgtggacgcgtaagcgtctctcagacatcaaagctgacaagggcagagactgtatttcccgatgtggactatgtgaacagtactgaggccgagactatcctggacaacatcacccagagtacccagagtttcaatgatttcactcgcgtggtcggaggagaagacgcaaagcccggtcagttcccttggcaggttgtcctcaacggtaaagtcgacgcattctgcggcggctctatcgtaaatgagaagtggatcgtgactgctgcccactgcgtagaaaccggcgttaaaataactgtagtagcaggagagcacaacatcgaggagacagaacatacagagcagaagaggaacgtgatccgtatcatccctcatcacaactacaatgcagctatcaataagtacaaccatgatattgctctcctcgagctggacgagcccctggtcctcaatagctatgtcacacccatttgcatagcagacaaggagtacaccaacattttcctgaaattcggttccggatacgtgtctggttggggtcgcgtgtttcacaagggtagatccgcactcgtgttgcagtacctgcgcgtgccactggtagacagggccacttgcttgcttagtacaaagtttactatttacaacaatatgttctgcgccggattccacgagggaggtcgcgacagttgccagggtgattccggtggccctcacgtgaccgaggtggagggaacaagcttccttaccggtattatcagctggggtgaggagtgcgctatgaagggcaagtatggtatctacactaaggtctctcgttatgtgaattggatcaaagagaaaacaaaactgacc

SEQ ID NO: 8973 - DNA, 1383 bp, synthetic construct
  misc_feature 1..1383: note = source = /note="Description of Artificial Sequence: Synthetic coding sequence"
  source 1..1383: mol_type = other DNA
atgcagagagtgaatatgatcatggccgagtcgcctggtttgattactatctgcctcttggggtacctcctttccgccgaatgtacggtttttttagaccacgagaacgctaataagatcttgaaccggcctaaaaggtacaacagcgggaagcttgaagaattcgtgcaaggaaacctggagagggagtgcatggaggagaaatgttcatttgaggaggcacgggaggtttttgagaatacggaacgcacaaccgagttctggaaacagtatgttgacggtgatcagtgcgagtctaacccctgtctgaatgggggctcttgcaaagatgatatcaacagctatgaatgttggtgcccattcggcttcgaagggaagaactgtgagttagatgtgacatgtaatattaagaatggcagatgcgagcagttttgtaaaaacagcgccgataacaaggtggtctgctcttgtaccgaggggtaccggctggcggagaaccagaaaagctgtgagcctgccgtgcccttcccttgcggaagggtgagcgtatcacagacatctaaattaacaagagccgagaccgtctttccggacgtggattacgtcaactccacagaggcagaaacaattctggacaacatcactcagtcgacacagtcattcaatgactttactagggtggttggcggggaagatgccaaacctggtcagttcccatggcaagtggtgttgaatggtaaggtagacgcattttgtgggggtagcatagtaaatgagaagtggatagtaacggctgcgcactgcgtggagaccggagtgaaaatcactgtagttgcaggcgaacacaacatcgaggagacagagcatactgaacaaaagagaaatgtgattaggataattccacaccacaattacaatgccgctataaacaaatataatcatgatatcgctctgctggagctggatgagcctctggttctcaattcatatgttacacctatctgtattgccgataaggagtacacaaatatattcctgaaatttggaagcggctatgtgagcgggtgggggagggtgtttcacaaggggaggtctgctctcgttctgcagtacctgcgggtccccttggtcgatcgagccacgtgcctgctgtctaccaaattcaccatctataacaacatgttctgtgccggcttccatgaaggcggccgcgattcctgtcagggcgattccgggggaccgcacgtaacagaagtggaaggcacatcatttttgaccggaataatttcttggggtgaagaatgcgccatgaagggaaagtatgggatatatacaaaggtaagcagatacgttaactggattaaagaaaagacaaaactcaca

SEQ ID NO: 8974 - DNA, 1383 bp, synthetic construct
  misc_feature 1..1383: note = source = /note="Description of Artificial Sequence: Synthetic coding sequence"
  source 1..1383: mol_type = other DNA
atgcagagagtaaatatgatcatggctgaatcccccggcctgatcacaatctgtctactgggttatctgctgtcagccgaatgcacggtttttttggaccacgagaatgcgaacaaaatattaaacaggcccaagaggtacaactctggaaagctggaagagttcgttcagggcaacttagaaagggagtgtatggaggagaagtgtagctttgaggaagcccgggaggtgttcgagaacaccgagcgaactactgaattctggaagcagtacgttgacggcgatcagtgtgagtcgaacccctgcctgaatgggggctcctgcaaagatgacattaacagttatgagtgctggtgtccttttggcttcgagggaaagaactgcgaactcgatgtgacttgcaacatcaaaaacggcaggtgcgagcagttttgcaaaaatagcgccgataacaaagtggtgtgctcatgcaccgaagggtataggctggccgagaatcagaagtcatgtgagcctgctgtgcctttcccttgcggcagagtctctgtttctcagacatccaagctgacaagggcagagactgtgtttcctgatgtggattacgttaactcaaccgaagctgagaccatacttgacaacattacccagtccacccagagcttcaacgactttacacgggtggttggcggcgaggatgctaagcccgggcagtttccttggcaggtcgtcttgaacggtaaagtcgatgctttctgcggagggtccattgtcaacgaaaagtggatcgtgactgccgcacactgcgtggagaccggagtcaaaatcactgtcgtggcaggagaacacaacatcgaagagaccgagcatactgaacagaagagaaatgtcatccgaattattccacatcacaattataatgctgccattaacaaatacaaccacgatatagccctgctggagttagacgagccccttgttctgaacagttacgtgaccccgatctgtatcgctgacaaagagtacaccaatattttcttgaaattcggctctggatacgtttcaggatggggtcgtgtattccataagggcaggtccgcactcgtactccagtacttgcgtgtgcctcttgtggatagggctacctgccttttatccacaaaattcaccatctacaataacatgttctgcgcgggcttccacgaaggggggcgcgatagctgccagggcgattctggtgggccccatgttaccgaggtggaagggacttctttccttacgggcatcatctcttggggggaagagtgtgcgatgaaggggaagtacggcatatacacgaaagtcagccgatacgttaattggataaaggaaaagaccaaactgact

SEQ ID NO: 8975 - DNA, 1383 bp, synthetic construct
  misc_feature 1..1383: note = source = /note="Description of Artificial Sequence: Synthetic coding sequence"
  source 1..1383: mol_type = other DNA
atgcaaagagtgaacatgataatggccgagtcaccgggccttatcacgatctgccttctgggatatctgctttccgcagaatgcaccgtgttcctggatcacgagaatgcaaacaagattctgaatcgccctaagaggtacaactctgggaagctcgaggaatttgttcaagggaatctggaacgagaatgcatggaggaaaagtgctcgtttgaggaagcgagggaagttttcgaaaatacggaacggaccactgaattttggaagcagtacgtggatggggatcagtgcgaaagcaatccgtgtctcaatggaggatcatgcaaggacgacataaactcctacgagtgttggtgtcctttcgggtttgaagggaagaactgtgagcttgacgtcacctgtaacattaagaacggtagatgtgagcagttttgtaagaattcagcagacaacaaagtcgtgtgttcctgcactgaaggctatcgtctcgcagagaaccagaagtcgtgtgaaccagctgtcccttttccatgtggcagggtgtctgtgtcgcaaacttcaaagctgactagggcggaaactgttttccccgatgtggactacgtcaactccaccgaggcagagactatcctggataacatcacccaatccactcagtcgtttaacgactttacccgggtggtcgggggtgaggacgcaaagcctggtcagtttccttggcaggtggtcctgaatggtaaggtggatgcattttgtggaggatcaattgtgaatgagaaatggatcgttacggcagcccattgcgtcgaaacgggcgtcaaaatcaccgtggtcgccggcgaacacaatattgaagagactgaacacaccgaacagaagcgaaacgtcatcaggattattcctcatcataactacaacgcagcaattaacaagtacaaccatgatattgcccttcttgagctggacgaaccgctggtgcttaacagctacgtgaccccaatatgtattgcggataaggagtataccaatatctttcttaagttcggaagcggttacgtgtcaggctggggtagagtgttccataaaggacgctccgcgctcgtgctgcagtaccttcgcgtgccccttgtggatagagccacttgtctgctgtcgactaagtttaccatttacaataacatgttttgtgcagggttccacgagggaggacgagatagctgtcagggggattctggaggccctcatgtgaccgaagtcgagggaactagctttttgaccggcatcatttcgtggggagaagagtgtgctatgaaaggaaagtacggcatatacactaaggtgtcgagatacgtgaattggattaaggaaaaaaccaagctgacc

SEQ ID NO: 8976 - DNA, 1383 bp, synthetic construct
  misc_feature 1..1383: note = source = /note="Description of Artificial Sequence: Synthetic coding sequence"
  source 1..1383: mol_type = other DNA
atgcaaagggtgaatatgattatggccgagtcccctggtctgatcactatatgcctgctgggttaccttctttcggcagaatgcaccgtctttctggatcatgagaacgcaaataagatactcaaccgcccaaagagatacaattccggaaaactcgaggaatttgttcaaggaaatctcgaaagggagtgtatggaagaaaagtgctcctttgaagaagcccgggaagtctttgagaacaccgagaggaccactgagttctggaaacaatatgtggacggagatcaatgtgaatcgaatccttgtctgaatggtggtagctgtaaggacgatatcaactcctacgaatgctggtgcccatttgggtttgagggaaaaaactgtgaactggatgtgacgtgcaacatcaagaatggtagatgcgagcagttttgtaaaaacagcgccgacaacaaggtggtgtgcagctgtaccgaagggtaccgccttgctgaaaaccagaagtcatgtgaaccagccgtgcctttcccatgcgggagggtgtcagtgtcgcaaacgtcaaagctgactagagcagaaactgtgttcccagatgtggactacgtgaacagcaccgaagcagagacgattcttgacaatatcacccagtctacccagagcttcaacgattttaccagggtcgtcgggggtgaagatgcaaagcctggacagtttccctggcaggtcgtcctgaacggtaaggtcgacgcattctgcgggggctcgattgtcaacgagaagtggatcgtgacggcagcacactgtgttgaaactggagtcaagatcactgtggtggcaggggaacacaacatcgaggagactgagcacacggagcaaaagagaaatgtcatacggataattccacatcacaattacaacgcagcgattaacaaatacaaccatgatattgcgcttctggaacttgatgaacctttggtcctgaactcgtatgtgactcccatttgcattgcagataaggaatacactaatatcttccttaagtttggatcgggatacgtgagcggttggggacgagtgtttcacaagggacgctcggcactggtcctgcaatacctccgggtgccactggtcgaccgggctacctgtcttttgtccactaagtttactatttacaataacatgttttgtgcaggattccatgaaggcggaagagattcgtgtcaaggcgattcaggaggacctcatgtcaccgaggtcgaagggacctcctttcttaccggtatcatatcgtggggcgaggaatgcgctatgaaggggaaatacgggatctacactaaagtgtcccgttacgtcaattggataaaagaaaaaactaagctgacg

SEQ ID NO: 8977 - DNA, 1383 bp, synthetic construct
  misc_feature 1..1383: note = source = /note="Description of Artificial Sequence: Synthetic coding sequence"
  source 1..1383: mol_type = other DNA
atgcaaagagtcaacatgattatggctgaatcacctggacttattactatatgtttacttggttatttacttagtgctgaatgtacagtttttcttgatcatgaaaatgcaaataaaatcttaaatagaccaaaaagatataactctggaaaattagaagagtttgtccaaggaaatttagaacgtgaatgtatggaagaaaaatgttcttttgaagaagcaagagaagttttcgagaatactgaaagaactactgaattttggaaacaatatgttgatggagatcaatgtgaatcaaatccatgtttgaatggaggatcatgtaaagatgacattaattcatatgaatgttggtgtccttttggatttgaaggaaagaattgtgagttggatgttacctgcaatattaaaaatggaagatgtgaacaattttgtaaaaactccgctgataataaagtggtatgttcatgtaccgaaggatatagattagctgaaaatcaaaaatcatgtgaaccagcagtgccttttccttgtggaagagtttctgtctctcaaacatcaaagcttactagagcagaaactgtctttccagatgttgattatgttaatagtactgaagctgaaactattttagataatattacacaatcaactcaatcatttaatgattttactcgtgttgttggaggagaagatgcaaagcctggacaattcccatggcaagttgttttaaatggtaaagttgatgcattctgcggaggatctattgtcaatgaaaaatggattgttacagcagctcattgtgtggaaacaggtgttaaaataacagttgttgctggtgaacataatatagaagaaactgaacatacagaacaaaagagaaatgttattaggattattccacatcacaattataatgcagcaattaataaatataatcatgatattgctttattagaattagatgaaccacttgttttaaactcgtatgtaaccccaatatgtattgctgataaagaatatacaaatatatttttgaagttcggatctggatatgtttctggttggggtagagttttccataagggaagatcagcccttgttttacaatatttaagagtgccacttgttgatcgtgcaacatgtttactctcaactaaatttactatttataataatatgttctgtgctggattccatgaaggaggtagagattcctgccaaggagattctggtggacctcatgttacagaagtcgaggggacttcattccttactgggataatttcatggggtgaagaatgtgcaatgaaaggaaaatatggaatttatactaaagtttcaagatatgttaattggattaaagaaaagacaaaacttact

SEQ ID NO: 8978 - DNA, 1383 bp, synthetic construct
  misc_feature 1..1383: note = source = /note="Description of Artificial Sequence: Synthetic coding sequence"
  source 1..1383: mol_type = other DNA
atgcaaagagtgaatatgatcatggctgaatcacccggtcttattactatttgtctgcttggttaccttctttccgcggaatgcaccgtgtttctggaccacgagaatgcaaacaagatattgaaccggcccaagcgatacaattcaggtaaacttgaagagtttgtccaaggtaacctggaaagagaatgtatggaagagaagtgttcgttcgaagaggcacgggaggtgtttgagaacaccgaacggaccactgaattctggaaacagtacgtcgatggggaccagtgtgaatccaacccttgcctgaatggcggatcgtgcaaggatgacattaactcttatgaatgctggtgcccttttggttttgaaggaaaaaactgcgagctcgatgtgacttgcaatatcaaaaatggacggtgcgaacagttttgcaaaaactcggcagataacaaggtcgtgtgctcatgtaccgaaggatacaggctcgcagaaaaccagaaaagctgcgaaccagccgtgccgtttccttgtggtcgggtgtcggtcagccaaacttccaaactgacccgggcagaaaccgtgttccctgacgtggattacgttaattcaaccgaagcagagactattctcgacaacatcactcagtccactcaatccttcaatgattttaccagagtcgtgggtggtgaggatgccaagccgggacaatttccctggcaagtggtgcttaacggaaaggtggacgcattttgtggtggttcaatcgtgaacgaaaagtggattgtgactgcggcgcattgcgtggagactggcgtgaaaatcactgtcgtcgccggtgagcataacattgaggaaaccgaacataccgaacagaagcggaacgtcattcgcataattcctcatcacaactacaacgcggcaatcaataagtacaaccatgatattgcacttctggagcttgatgaaccgctcgtgcttaactcctacgtgacccctatatgtattgcagataaggagtacactaacatatttctcaagtttggtagcgggtacgtttcaggatggggacgtgtgtttcacaagggaagatccgcgcttgtgcttcaatacctgcgagtcccccttgtggacagagcaacttgcctcttgtccacgaaattcaccatctataacaacatgttttgtgccggttttcatgagggtggtagggactcctgtcagggagactccggcggccctcacgtcaccgaagtggagggcacctcttttctgacgggcatcatttcatggggagaggagtgtgcaatgaaagggaagtacggcatttacacgaaagtgagtcgctacgtgaattggatcaaggagaaaacgaagctgacc

SEQ ID NO: 8979 - DNA, 1383 bp, synthetic construct
  misc_feature 1..1383: note = source = /note="Description of Artificial Sequence: Synthetic coding sequence"
  source 1..1383: mol_type = other DNA
atgcagcgagtgaacatgatcatggctgagagtcctggactgatcacaatatgcctgctcggctatctcctcagtgccgagtgtacagtgtttctggaccatgagaacgccaacaagattcttaacaggcccaagcgttataattcaggcaaattagaggaattcgtccagggaaacctagagcgggagtgcatggaggagaagtgctcctttgaagaggctagggaggtgttcgagaacaccgagaggacaacggagttctggaaacaatacgtggacggcgatcaatgcgaaagcaacccatgtctcaatggtggcagctgtaaggacgatataaactcctacgaatgctggtgtccattcggatttgaaggtaagaattgcgaactggatgtcacatgcaacatcaaaaacggacgatgcgagcaattttgtaagaactcagcagacaataaagtcgtatgttcttgcacagaggggtaccggctggctgagaaccaaaaaagctgtgagcctgccgtcccgtttccttgtggcagggtgtcggtctcacagacttccaagcttaccagagctgagaccgttttcccagatgtagactatgtgaattctaccgaagccgagactatactggataatatcacccagagtactcagagctttaatgactttacccgggtcgttggaggcgaggacgcaaagcctggacagtttccgtggcaggttgtcttaaatggcaaagtggatgccttttgcgggggatccatcgtgaacgagaaatggattgtgaccgccgctcattgtgtggaaaccggggtaaaaattacagtggtggccggcgagcataacatcgaagagacagagcatacagagcagaaaagaaacgtgatccggatcataccacatcacaattacaacgcggctatcaacaaatacaatcacgacatagctctgctggaattggacgagccactggttctcaacagctacgtcacaccaatctgcatcgctgacaaagagtacaccaatatttttttgaaatttggcagtggttacgtgagcggatggggacgcgtatttcacaagggacgcagcgcgctcgtgctgcaatatcttcgcgtgcctttggtggatcgcgctacctgccttctgtcgacaaagtttaccatttataacaatatgttctgtgctggattccatgaaggaggcagagatagttgtcaaggcgacagcggggggccacacgtgacagaggttgagggcacatccttccttacaggaattataagttggggagaggaatgcgcgatgaaaggaaagtacggtatctacactaaggtgagccggtacgttaactggattaaggagaagacaaaactgaca

SEQ ID NO: 8980 - DNA, 1383 bp, synthetic construct
  misc_feature 1..1383: note = source = /note="Description of Artificial Sequence: Synthetic coding sequence"
  source 1..1383: mol_type = other DNA
atgcagagagtgaatatgataatggcggagagcccaggcctgatcactatttgcctgctgggctacctacttagcgccgaatgcaccgtgttccttgaccatgagaacgccaataagattctcaataggcccaagcgatacaacagcggaaagctggaagaattcgttcagggtaatctagaaagggagtgcatggaggagaagtgcagtttcgaagaggcaagagaagtgtttgaaaataccgagcggacgaccgaattctggaagcagtacgtcgatggggatcagtgcgaatccaatccctgtctcaatggaggctcctgtaaggatgatattaactcctacgaatgctggtgtccattcggatttgaaggaaagaactgtgaactagacgtgacatgcaacatcaaaaacggaagatgtgagcagttctgtaaaaattctgccgataacaaagtggtgtgcagctgtaccgagggctatcggctggctgagaaccagaagtcatgtgagccggccgttccatttccctgcggacgagtgtccgttagccagacatctaaattaacccgagctgaaactgtgtttcccgacgtcgactatgtgaattctaccgaggccgaaacgatcctggataatatcacccagtccacccaatcttttaatgattttactcgggtcgtcggtggtgaggacgctaagcccggccagttcccatggcaagtggtgctcaacgggaaggtagatgctttttgtggtgggagtatcgtgaatgagaagtggatcgttacagccgctcattgtgtggagactggtgtgaaaataactgtggtggccggcgaacacaacattgaagaaaccgagcatacagaacagaagcgcaacgtcatccgcatcatcccgcaccacaactacaatgccgccatcaacaagtataatcacgacatcgctttgctggagctggatgagcccttagtactgaatagctacgtgactcctatctgcatcgctgacaaggaatacacgaatatctttcttaagtttggaagtgggtacgtttccgggtgggggcgggtgttccacaagggtcgcagcgccctggtgctgcaatacctaagagttccactcgttgaccgggcaacgtgcctgctgtcgacgaaatttaccatctacaacaatatgttctgtgctggatttcacgagggtgggagggattcctgccagggagattccggaggcccacatgtcaccgaggttgaaggaaccagtttcctcacgggtattatttcttggggggaagagtgcgccatgaaaggaaagtacggaatatacacaaaagtgagtagatatgtgaactggataaaagaaaagactaagctgacg

SEQ ID NO: 8981 - DNA, 1383 bp, synthetic construct
  misc_feature 1..1383: note = source = /note="Description of Artificial Sequence: Synthetic coding sequence"
  source 1..1383: mol_type = other DNA
atgcaaagagtaaatatgatcatggcagaaagccccggtctgattaccatttgcctcctaggctacttacttagcgctgagtgtaccgtgtttctagatcacgaaaacgccaataagatcctgaatcgcccaaagcggtataatagcgggaaactcgaagaattcgtgcagggcaatctagaacgtgaatgcatggaggagaaatgctcattcgaagaggctcgggaggtgtttgaaaataccgagagaactaccgaattttggaagcaatacgtcgacggcgatcagtgtgaatctaacccttgcctgaatggaggaagttgcaaggacgacatcaacagctatgagtgctggtgccccttcggcttcgaaggaaaaaactgcgaacttgatgtaacctgtaacatcaagaatggcaggtgcgagcagttctgcaagaatagcgctgataacaaggtggtgtgcagctgcactgaaggctaccggctggcagagaatcagaagagctgtgaacccgcggtcccctttccatgtggcagggtgtccgtatcccagacctctaagcttactcgagctgaaacagtgtttcccgatgtggactacgtgaattccactgaggccgaaaccatcctggataacatcacccagagcacacaaagcttcaacgatttcaccagggtcgtaggaggagaagatgctaagcccggacagttcccctggcaggtcgtactaaacggaaaagtcgacgccttctgtggaggtagcatagtaaacgagaagtggatagtcactgctgcccattgcgtggaaacgggagtgaagattactgtcgtggccggtgagcataatatcgaggagaccgaacacacagagcagaagcgaaacgttatcagaatcatcccacaccacaactataacgctgccattaacaaatacaatcacgacattgccctgctagagttagatgaaccattggttctcaattcatacgtgacccccatttgcatagcagataaggaatatactaatatcttcttgaagttcggcagcggatatgtttccggatggggacgcgtgttccacaagggccggtccgcccttgtcctccagtatctgcgcgtgccactcgtcgacagggcaacatgcctcctatccaccaagtttactatctataataatatgttctgcgccggattccatgagggaggccgggattcctgtcagggagattccggcggacctcacgtcaccgaggtggaaggaacaagcttcttgacagggatcatctcatggggggaagaatgtgcaatgaaaggaaagtacggtatctacacaaaagtctctcggtatgttaactggataaaagagaagaccaaactgact

SEQ ID NO: 8982 - DNA, 1383 bp, synthetic construct
  misc_feature 1..1383: note = source = /note="Description of Artificial Sequence: Synthetic coding sequence"
  source 1..1383: mol_type = other DNA
atgcaacgagtgaacatgattatggcagaaagcccaggactcatcactatatgcctgctggggtatctcctgagcgcagagtgtacagtcttcctcgaccacgaaaacgccaataagattctgaaccgacctaagagatacaactctggcaaactggaagagtttgtacaggggaacctcgagcgagaatgcatggaagagaaatgtagttttgaagaagcacgcgaggtgtttgagaataccgagcgaacaacagagttttggaaacaatacgtggatggagatcaatgcgagtcaaatccttgcctgaacggtggatcctgtaaggacgatattaatagctacgaatgctggtgtcccttcgggttcgagggcaagaattgtgagctagacgttacttgcaatataaagaacgggagatgtgaacagttttgcaagaactctgctgataacaaggtcgtgtgttcctgtacagaggggtatcggctggcggaaaaccagaagtcatgtgaacccgccgttccgtttccctgtgggcgcgtttcggtctcacagacatccaagctaacgcgggccgaaacagtgttccctgacgtggattacgtcaactcaacagaagctgaaacaatactggacaatataacccaatccactcaatccttcaacgactttacccgagtggtgggtggcgaagatgccaaacccggtcagttcccatggcaggtcgtcctaaatgggaaggtcgacgccttttgcggaggatctatcgttaacgaaaagtggatcgtgacagccgcgcactgtgtggaaaccggagtgaagattacggtagtggctggcgaacacaatattgaagagactgaacataccgaacagaaaaggaatgttataaggatcattccccatcacaattacaacgccgccattaacaaatacaaccacgatatagctctgctagaactggacgaacccctcgtgctgaattcctatgtcaccccgatttgtatagctgacaaggaatacacaaacatcttcctaaaattcggctctggatacgttagcggttggggcagagtattccacaaagggagatcggcactggtccttcagtatctgcgggtgccccttgtagacagagctacttgtttgctttctactaaatttaccatctacaataacatgttttgtgcaggattccacgaggggggtcgtgatagctgtcaaggggactcgggcggacctcacgtgacggaagtcgaggggacctcgtttttaaccggtatcattagctggggtgaagagtgtgctatgaaagggaagtatggcatatacacgaaggtgtctcgctacgtcaactggataaaggagaagaccaagctgacc

SEQ ID NO: 8983 - DNA, 1383 bp, synthetic construct
  misc_feature 1..1383: note = source = /note="Description of Artificial Sequence: Synthetic coding sequence"
  source 1..1383: mol_type = other DNA
atgcagagagtgaatatgatcatggccgagtcccctggcctcatcactatttgtctgctgggttacttgctcagcgcagaatgcacggtgttcttggatcacgagaatgccaacaagatcctcaaccggccgaagagatacaactccggaaaactcgaagaattcgtgcaagggaaccttgagcgcgagtgcatggaagagaagtgctcgttcgaagaggcccgcgaagtctttgaaaatactgaacggactactgagttctggaaacagtacgtcgacggtgaccagtgcgaatcaaatccgtgcctcaacggagggtcgtgcaaggacgacattaactcgtacgaatgttggtgcccgttcggttttgaagggaagaattgcgaactggacgtgacttgcaacatcaagaacggacggtgcgagcagttttgtaagaactcggctgacaataaggtggtgtgctcctgcaccgaggggtacagattggcggagaatcaaaagtcatgcgaacccgccgtcccgtttccgtgcggacgtgtttcggtttcgcagacctcaaagctcacgcgtgccgaaactgtgttcccagatgttgattacgtgaactccaccgaggcggaaaccatcctcgacaacattactcaaagcactcagtccttcaacgactttaccagggtggtgggtggggaagatgcgaaaccaggacaattcccttggcaagtcgtgctgaatggaaaggtcgatgccttctgcggcggctcaatcgtgaacgagaaatggatcgtcaccgctgcacactgtgtggagactggagtgaaaatcactgtggtggcaggggagcacaacatagaagaaacggagcataccgaacaaaagaggaacgtcatccggattatcccccaccacaactacaacgcagctattaacaagtacaatcatgacattgcgctcttggaattggatgagccgctggtgctgaatagctacgtcactccaatttgtatcgcagataaggagtatacgaatatctttctgaagttcggctcaggatacgtctctggatggggacgcgtgttccataaaggcaggagcgcactggtcctgcagtacctgcgcgtgcctctcgtggacagggcgacttgcctcctctcaaccaagttcacgatctataacaacatgttctgcgcgggatttcacgaaggcggacgcgattcctgtcagggagatagcggagggccgcatgtcactgaagtcgaaggtacttcgttcttgaccggaatcatctcctggggcgaggagtgtgccatgaagggaaagtacggcatctacaccaaggtgagcaggtatgtcaactggatcaaagaaaaaaccaaactgacc

SEQ ID NO: 8984 - DNA, 1383 bp, synthetic construct
  misc_feature 1..1383: note = source = /note="Description of Artificial Sequence: Synthetic coding sequence"
  source 1..1383: mol_type = other DNA
atgcaacgggtgaatatgatcatggccgagagccccgggctaattacaatttgtctgctgggttacctgttgagtgctgaatgtaccgtgttcttggatcacgagaacgcaaataagatattgaatcggcctaaacggtacaacagtggaaagttggaagagttcgttcagggaaacctggagcgtgagtgcatggaagagaaatgtagttttgaagaagcccgtgaggtcttcgagaatacagagaggactactgagttctggaagcagtacgtcgacggagaccagtgtgagtctaacccatgtttgaatggaggctcatgtaaagatgacattaactcctacgagtgttggtgtcctttcggcttcgaaggaaagaactgcgagctggatgttacctgcaacattaaaaacggccgttgcgaacagttctgcaaaaattcagcagataataaggtagtgtgctcctgcaccgaaggataccgactcgctgaaaatcagaagagctgtgaacctgcagtccctttcccctgcggaagggtctccgtgagccagaccagcaagctcaccagggccgagactgtctttccggatgtggactatgtcaattcaaccgaggctgagaccattctcgacaacattactcagagtacacagtctttcaatgatttcacacgcgtagtaggtggggaggatgctaaacctggccagtttccctggcaggtagtcctcaacggcaaagttgatgctttttgtggcggatctatagttaacgagaagtggattgtaaccgcagctcactgtgtagagacgggcgtcaaaattacggttgtggccggcgagcacaatattgaggaaactgagcacacagaacaaaaacgaaacgttatccggataatcccacaccacaattataacgctgccattaacaagtataatcatgatatcgctcttctggagcttgatgaacccctggttctaaattcttacgtgacccccatatgcatcgctgataaggaatatacaaacatcttccttaagtttggttcaggatatgtttccggatggggtcgggtgtttcacaagggccgctctgcactcgtcctccagtacctgagggtgccactggtggaccgggccacctgcctgttgtccaccaagttcaccatttacaataatatgttttgcgccgggttccacgagggcgggcgcgacagctgccagggcgattcagggggaccccacgtgaccgaagtcgaaggaacgtcgttcctcaccgggattattagctggggcgaggagtgcgccatgaaggggaaatacggaatttatacaaaggtgtctcggtacgttaactggatcaaagagaagactaagcttaca

SEQ ID NO: 8985 - DNA, 1383 bp, synthetic construct
  misc_feature 1..1383: note = source = /note="Description of Artificial Sequence: Synthetic coding sequence"
  source 1..1383: mol_type = other DNA
atgcaacgcgtgaatatgatcatggcagagagccccggtctgatcaccatatgcctgctgggatacctgctatccgcagaatgcacagtgtttttagatcacgaaaatgccaacaaaatcctcaacaggcccaaacgatacaattctgggaagctagaagaattcgtgcaaggaaatctggagcgcgaatgcatggaagaaaagtgtagcttcgaggaggcccgcgaggtctttgaaaataccgagcgtacgaccgagttctggaaacagtatgtggacggagaccagtgcgaatctaacccttgcctgaacgggggaagctgcaaagacgatatcaactcttacgagtgttggtgccccttcgggttcgaaggcaaaaattgtgagctcgacgtgacatgtaatattaaaaacgggagatgcgagcagttctgtaaaaactctgcagacaacaaggtcgtgtgctcttgcaccgaagggtatcgtctcgctgagaatcagaagtcatgcgagcctgccgtgccctttccctgtggtcgagtgagtgtcagccaaacctccaaactcacaagagcggagaccgtatttcctgatgtggattacgttaacagcactgaagcagagaccatcctggacaacatcacacagagcacgcagtcatttaatgatttcactagggtcgttgggggggaagacgcaaagcctggccagtttccatggcaagtcgtgcttaacggaaaagtggatgctttttgtgggggctcaatagtcaatgagaagtggattgtgactgccgcccactgtgttgagacaggcgttaagattacggtggtcgccggggagcataatattgaagagacagagcacacggaacaaaaacggaacgtgattcggatcatccctcaccacaactacaacgcggccattaataagtacaaccacgacatagctttgctcgaactggatgaacccctggttctcaactcctatgtgacccccatatgcatagccgacaaagaatataccaacatatttctcaaatttggctccggttacgtctcagggtgggggagagtgtttcacaagggtcggtccgccctggtgctccagtacttgagagtgcctttagtcgacagagcaacatgcctcctctctacaaagttcaccatttacaataacatgttttgtgccggtttccatgagggtgggagagattcctgccagggcgattcaggagggccccacgtcaccgaagtggagggtacctccttcctgactggtatcataagctggggcgaggaatgtgccatgaagggaaaatacggcatctacaccaaagtatctaggtacgtaaattggatcaaggaaaagactaagctaacg

SEQ ID NO: 8986 - DNA, 1383 bp, synthetic construct
  misc_feature 1..1383: note = source = /note="Description of Artificial Sequence: Synthetic coding sequence"
  source 1..1383: mol_type = other DNA
atgcagcgagtgaacatgattatggccgaatcacctggactcattaccatatgtttgcttggttatctcctgtcagctgagtgcaccgtctttctggatcatgagaacgcgaacaaaatactcaatagacccaagcgatacaactcgggcaagctcgaagagtttgtgcaagggaatctggaaagagaatgcatggaagaaaagtgcagctttgaggaggcacgggaagtctttgagaacacggagcgcacgaccgaattttggaagcaatacgtggatggtgatcagtgtgaatccaacccttgtttgaatggaggctcatgcaaagatgacattaacagctacgaatgctggtgtccatttggctttgaaggtaagaactgtgaacttgatgtaacctgcaacattaagaatggtcgttgtgaacagttctgtaagaactcggcagataacaaggtcgtctgttcatgtactgagggttaccgtctggcagagaatcaaaagagctgtgagccggcagtgccgtttccttgtgggagagtgtcagtgtcccagacctccaagctcacgagagccgaaactgtctttccggatgtggactacgtgaactcgaccgaagctgaaaccatacttgacaatatcacccaaagcactcaatctttcaacgatttcaccagggttgtgggcggagaagatgcaaagccaggccagttcccgtggcaagtcgttctgaatggaaaggtggacgcattctgtggagggtcgatcgtgaatgagaagtggattgtcaccgcggctcattgtgtggagactggggtgaagattactgtggtcgccggagagcacaatatcgaggagactgaacacactgaacagaaacgcaatgtcataaggattatcccacaccataactacaatgcagccatcaacaaatacaaccacgacattgcactgctggagcttgatgagccgctcgtcctgaactcatacgtcactccaatctgtattgcagacaaagaatatactaacattttccttaagtttggatccggttacgtgagcgggtggggacgggtctttcacaagggtcgctcggcccttgtcttgcagtacctgagagtgcctttggtcgatcgggctacttgcctcctcagcaccaagtttactatctacaataacatgttttgtgcaggttttcatgaggggggacgggacagctgtcaaggggattcgggtggaccacatgtcaccgaagtggaaggtacgtccttcctcactgggatcatttcatggggggaagagtgtgccatgaagggaaaatacggtatatacactaaggtatcccgctatgtgaactggatcaaggaaaaaaccaaacttact

SEQ ID NO: 8987 - DNA, 1383 bp, synthetic construct
  misc_feature 1..1383: note = source = /note="Description of Artificial Sequence: Synthetic coding sequence"
  source 1..1383: mol_type = other DNA
atgcaacgtgtaaatatgataatggcggaatcgccgggtttaataacgatatgtttactaggttatctattatcggcggaatgtacggtatttttagatcatgaaaatgcgaataaaatactaaatcgtccgaaacgatataattcgggtaaattagaagaatttgttcaaggtaatctagaacgagaatgtatggaagaaaaatgttcgtttgaagaagcgcgagaagtatttgaaaatacggaacgtacgacggaattttggaaacaatatgtagatggtgatcaatgtgaatcgaatccgtgtttaaatggtggttcgtgtaaagatgatataaattcgtatgaatgttggtgtccgtttggttttgaaggtaaaaattgtgaattagatgtaacgtgtaatataaaaaatggtcgatgtgaacaattttgtaaaaattcggcggataataaagtagtatgttcgtgtacggaaggttatcgtctagcggaaaatcaaaaatcgtgtgaaccggcggtaccgtttccgtgtggtcgagtatcggtttcgcaaacgtcgaaattaacgcgtgcggaaacggtttttccggatgttgattatgtaaattcgacggaagcggaaacgatattagataatataacgcaatcgacgcaatcgtttaatgattttacgcgagtagttggtggtgaagatgcgaaaccgggtcaatttccgtggcaagttgttttaaatggtaaagttgatgcgttttgtggtggttcgatagtaaatgaaaaatggatagtaacggcggcgcattgtgtagaaacgggtgtaaaaataacggtagttgcgggtgaacataatatagaagaaacggaacatacggaacaaaaacgtaatgtaatacgtataataccgcatcataattataatgcggcgataaataaatataatcatgatatagcgctattagaattagatgaaccgttagtattaaattcgtatgtaacgccgatatgtatagcggataaagaatatacgaatatatttttaaaatttggttcgggttatgtttcgggttggggtcgtgtatttcataaaggtcgttcggcgctagttctacaatatttacgtgtaccgctagttgatcgagcgacgtgtttattatcgacgaaatttacgatatataataatatgttttgtgcgggttttcatgaaggtggtcgtgattcgtgtcaaggtgattcgggtggtccgcatgttacggaagtagaaggtacgtcgtttctaacgggtataatatcgtggggtgaagaatgtgcgatgaaaggtaaatatggtatatatacgaaagtatcgcgttatgtaaattggataaaagaaaaaacgaaactaacg

SEQ ID NO: 8988 - DNA, 1383 bp, synthetic construct
  misc_feature 1..1383: note = source = /note="Description of Artificial Sequence: Synthetic coding sequence"
  source 1..1383: mol_type = other DNA
atgcagagagtcaatatgataatggccgaatcgcctggccttatcacgatctgccttctgggatacctcctgagtgccgaatgtaccgtgttcttggatcatgagaatgcgaataagatcctgaaccggccaaagaggtacaactcgggaaagctcgaggagtttgtgcaggggaacctggagagagagtgcatggaggaaaagtgctcgtttgaggaagcccgcgaagtgttcgagaacaccgaacgcactaccgagttctggaaacagtacgtcgacggcgatcagtgtgaatccaacccatgcttgaatggtggatcatgtaaggatgatatcaactcatacgaatgctggtgccctttcggcttcgaaggaaagaattgcgaactggacgtaacctgcaacattaagaacgggagatgtgaacagttctgcaaaaattcggcagataacaaagtggtctgttcctgcactgaaggttaccggctggcagaaaatcaaaagagctgcgagccagcggtgcctttcccatgtggacgcgttagcgtcagccaaacttctaagctgactcgagccgaaaccgtgttccccgacgtggactacgtgaactccactgaagctgaaacgatcctcgataatatcactcaatccacccagtccttcaacgatttcacccgcgtggtgggaggagaggacgcaaagccgggtcaatttccgtggcaggtggtgctgaatggaaaagtcgacgcgttttgcggaggatcgatcgtcaacgaaaagtggatcgtgaccgcagcgcactgcgtggagactggcgtgaaaatcaccgtggtggcgggagaacataacatcgaggaaaccgaacatactgaacagaagaggaatgtcattaggattatcccgcaccacaactacaacgccgctatcaacaagtacaaccacgatatcgccctgctggagctcgacgaaccgctcgtcctcaacagctacgtgaccccgatctgcatcgccgacaaggaatacaccaatattttccttaaattcggatccggatacgtgtcgggatggggacgcgtctttcacaaggggcggtcagctctcgtgctccaatacctgcgcgtccccctggtggaccgggccacttgtctgctgagcacgaagttcaccatctataacaacatgttttgcgccggcttccatgagggaggcagagacagctgccagggtgactccgggggtccgcacgtcaccgaggttgagggcacttcgttcttgaccggcattatctcatggggagaagagtgcgctatgaaaggcaagtatgggatctacactaaggtgtcacggtacgtgaattggatcaaagagaaaacgaagctgact

SEQ ID NO: 8989 - DNA, 1383 bp, synthetic construct
  misc_feature 1..1383: note = source = /note="Description of Artificial Sequence: Synthetic coding sequence"
  source 1..1383: mol_type = other DNA
atgcaacgggtgaacatgataatggccgaatcgccaggacttattactatctgtctgttgggctacctcctgagcgcagaatgtaccgtgttcttggatcatgaaaacgcaaacaagatcctcaatagacctaagaggtacaattccggtaagctggaagagttcgtccagggtaatcttgaaagagaatgtatggaagaaaaatgttctttcgaggaggcacgcgaagtattcgagaacaccgaaagaactaccgaattctggaagcaatacgtggatggcgatcaatgtgagtccaatccatgcctgaatggcggatcgtgtaaagacgatatcaacagctacgaatgttggtgtccatttggatttgagggaaagaactgtgaactcgatgtcacttgcaatatcaagaatggaagatgcgagcaattttgtaagaactccgcagacaataaagttgtgtgttcctgtactgaggggtaccggcttgcagagaatcagaagtcgtgcgagccagctgtgccttttccgtgtggtcgagtgtctgtctcccagaccagcaagttgaccagggccgaaaccgtctttcccgatgtggattacgtgaactcgactgaagccgaaaccattctggataacatcacccagtccacccagtcatttaacgatttcactcgggttgtcggaggagaggacgccaagcctgggcagtttccttggcaggtggtgctcaacggaaaagtggacgccttctgcggaggttccatcgtcaacgaaaagtggatcgtgactgcggcgcactgtgtcgaaactggtgtgaagatcactgtcgtggccggtgaacataacattgaggaaaccgagcataccgaacaaaagcggaacgtcattcggattattccacatcataactacaatgccgctatcaacaagtacaaccatgatatagctctgctcgagcttgatgaacctctcgtcctcaattcctacgtgactcctatttgcattgcagataaggagtacaccaacatatttcttaagtttggttcgggatacgtgtccggatggggacgggtctttcataaagggaggtccgcactcgtgctgcaataccttcgcgtgcccctggtggatcgcgcaacttgtctgctcagcaccaagtttaccatctacaacaacatgttctgtgccggatttcatgaaggggggcgggactcctgccagggtgattcaggtgggccacacgtgactgaggtggaaggcacttcttttttgacggggatcatttcatggggagaagagtgcgcaatgaaggggaagtacggtatatacactaaggtgagccgatatgtgaattggatcaaggaaaaaactaagctgacc

SEQ ID NO: 8990 - DNA, 1383 bp, synthetic construct
  misc_feature 1..1383: note = source = /note="Description of Artificial Sequence: Synthetic coding sequence"
  source 1..1383: mol_type = other DNA
atgcaaagagtgaatatgatcatggcggagtcgccgggtttgatcactatttgtctgctcggatacctgctttcagcggagtgcaccgtctttctggatcacgaaaacgcaaacaaaatcctcaatcggccgaaacgctacaattccggaaagctggaggaattcgtgcaagggaaccttgagcgggaatgtatggaggaaaagtgctcgttcgaggaagcacgggaagtctttgagaacactgaacggactaccgaattctggaagcaatacgtcgacggtgatcagtgcgaatccaacccgtgcctcaacggtggttcgtgtaaggacgatatcaactcatacgagtgctggtgcccattcggattcgaaggaaagaattgcgaactggacgtgacctgtaacatcaagaatggacggtgcgagcagttctgcaaaaactccgcagacaacaaggtggtgtgctcctgtactgaaggctaccgcctcgcagaaaaccagaagagctgcgagcccgctgtgccctttccgtgtggacgcgtgagcgtgagccagacctccaagctgacgcgcgcggagactgtgtttccggatgttgattacgtcaactcgaccgaagcagaaaccattctggataacattacccagtcgacccagtccttcaatgatttcacccgcgtggtgggaggagaggacgcgaaaccaggacaattcccctggcaggtggtcctcaatggaaaggtggacgccttctgtggcggatcgatcgtgaacgagaaatggattgtgactgctgctcactgcgtcgaaaccggcgtcaaaatcaccgttgtggcgggagagcacaacatcgaagaaactgaacacaccgagcagaagcgaaacgtgatcagaatcattccgcatcataactataatgcggcgatcaacaagtataatcatgatattgcccttttggaactcgatgaaccgctggtgctgaattcatatgtgactccgatatgcatcgccgacaaggaatacactaacatcttcctgaagttcgggtcaggatacgtgtcaggctgggggcgggtctttcataagggccggtcagcgttggttctgcaatacctccgcgtgccactggtggaccgggctacctgcctgctgtcaactaagttcactatctacaacaacatgttttgcgcagggttccatgaaggagggcgggactcgtgccaaggtgactcgggaggaccgcatgtgaccgaagtggaggggacctcatttctcaccggaattatctcctggggcgaagagtgtgccatgaaaggcaaatatggaatctacactaaggtatcacggtacgtgaattggatcaaggaaaagaccaagctcacg

SEQ ID NO: 8991 - DNA, 1383 bp, synthetic construct
  misc_feature 1..1383: note = source = /note="Description of Artificial Sequence: Synthetic coding sequence"
  source 1..1383: mol_type = other DNA
atgcagcgggtgaacatgataatggccgagtcgccaggccttatcactatctgcctcctgggatacctgctttcagccgaatgtaccgttttcctcgatcatgaaaacgcaaacaagattctgaaccgacctaagcgatacaattcggggaagctcgaagaattcgtgcagggaaatctggagcgggagtgtatggaagagaaatgctcattcgaggaagcacgcgaagtctttgaaaataccgaaagaactactgagttttggaagcaatacgtcgatggcgatcagtgcgagtccaacccgtgtctcaatggaggctcctgtaaggacgatatcaacagttatgaatgttggtgtccctttggttttgaaggtaagaactgtgaactggacgtgacctgcaatatcaagaacggtagatgtgaacaattctgtaagaactccgcggataacaaagtagtgtgcagctgtactgagggttataggctggccgaaaatcaaaagtcctgtgaacccgcagtgccttttccatgcggacgcgtgtcagtgagccaaactagcaagctgactcgcgcagaaacggtctttcccgatgtggattacgtcaactcgaccgaagcagaaaccatactggataacatcactcaatcaacccaaagtttcaacgactttaccagggtggtgggaggtgaagatgcaaagccaggccagtttccctggcaagtggtgcttaacgggaaagtagatgcattttgtgggggttctatagtcaatgagaaatggattgtgaccgctgcgcactgcgtcgaaacgggggtcaagatcactgtggtcgcaggagaacataacattgaagaaaccgaacataccgagcaaaaacgcaacgttattcgtattatccctcaccacaactacaatgcagcaatcaacaagtacaatcacgacattgcccttcttgaacttgacgagcctctggtgctcaattcgtacgtgactccaatttgtatagcggacaaggagtacacgaacatttttcttaagtttggaagtggatacgtctccgggtggggacgcgtctttcataaaggtcggagcgccctcgtgttgcagtacctgagagtgcctctggtcgacagagctacctgtctgctgagcaccaagtttactatttacaataacatgttctgcgcgggattccatgagggtggtcgcgatagctgtcagggagattcaggaggtccacatgtcaccgaagtggaggggacttccttcctgacgggtatcatctcatggggagaagagtgcgccatgaaggggaaatacggcatttacactaaggtgtcccgatacgttaattggattaaagaaaagactaaacttacc

SEQ ID NO: 8992 - DNA, 1383 bp, synthetic construct
  misc_feature 1..1383: note = source = /note="Description of Artificial Sequence: Synthetic coding sequence"
  source 1..1383: mol_type = other DNA
atgcaaagggtgaatatgattatggctgaaagccctggactcataaccatctgcttgctggggtaccttctcagcgccgagtgtactgtgtttctagatcacgagaacgccaataaaatattgaatagacctaagagatataacagcggtaaactggaagagtttgtacagggaaaccttgagcgcgaatgtatggaggaaaaatgcagtttcgaagaagcccgagaagttttcgagaacaccgagcgaacaacggaattctggaagcagtatgtggatggagaccagtgcgagagcaacccctgtctgaacggaggtagctgtaaggacgacatcaattcctacgaatgttggtgtccatttggcttcgaaggaaagaattgcgaattagacgtgacatgtaacataaagaatggcagatgcgaacaattctgtaaaaactcagctgacaacaaggtggtgtgcagctgtaccgagggctaccggctggcggaaaaccagaagagttgtgaaccagccgtaccgttcccctgcggacgggtatcggtgtcccagacatccaaacttacacgtgctgagacagtgttccccgatgtcgattatgtaaactctaccgaggccgagactatcctggataacataacgcagtcaactcagtccttcaatgactttactcgcgtggtgggaggagaggacgccaaaccagggcagttcccctggcaggttgtgctgaacggcaaggttgacgctttctgcggagggagtatagtcaatgaaaaatggatcgtgacagcagctcattgtgtggaaactggcgtgaaaattacggttgttgcgggagagcataatattgaggaaaccgagcacacagaacaaaagcggaacgtgattcgaatcattccccatcacaattacaatgcagccattaacaaatataaccacgacatcgcgctcctcgagctagatgagccattggtgttaaactcttacgtgacacccatctgcatagctgataaagagtacactaacatattcctgaagttcgggtctgggtacgtgagcgggtggggcagggtattccacaaagggaggtccgccctggtgctgcagtatctccgagtgccactcgtggatcgagctacgtgcctccttagcaccaagttcactatttacaacaacatgttttgtgcgggctttcacgagggaggaagagactcgtgccagggcgactctggaggtcctcatgtgacagaggttgaaggcacgtctttcctgacagggattattagctggggggaggagtgtgcaatgaagggaaagtatgggatctacacgaaagtgtctcggtacgtgaactggataaaggagaagaccaagttaacc

SEQ ID NO: 8993 - DNA, 1383 bp, synthetic construct
  misc_feature 1..1383: note = source = /note="Description of Artificial Sequence: Synthetic coding sequence"
  source 1..1383: mol_type = other DNA
atgcagcgcgtaaatatgattatggctgagtctccggggctgattacaatttgcttgctcggttatttgttatccgcagaatgcacggtgtttcttgatcatgagaacgcaaataagattctgaatcggccgaagagatacaattcaggcaagttagaagaatttgttcaaggtaatcttgaaagagaatgtatggaagaaaaatgttcatttgaagaagctcgggaagtatttgagaacacagagcgaactaccgaattctggaaacaatatgtcgacggcgaccaatgtgagtctaatccatgcctgaatggtggttcgtgtaaagacgacattaacagctatgagtgttggtgtccgttcggtttcgaagggaaaaactgtgaactggacgtcacctgtaatattaaaaatggcagatgcgaacagttttgtaaaaatagcgcagataataaagttgtttgctcttgtacagaagggtaccgattggcagagaaccaaaaatcctgtgagccggcggtgccgttcccttgtggccgcgtgagcgtctctcagacttctaaactcacaagagcagagacagtgttcccggatgtcgattatgtaaatagtacagaagctgaaacaatcctggataatattacccagtcaacacagagctttaatgattttacgcgcgtcgtggggggcgaggacgctaaaccaggccaattcccgtggcaggttgtacttaacggaaaagttgacgcattttgcggcgggagcattgtcaacgaaaaatggatagtcacggctgctcactgcgtagagaccggagtgaaaattacagtggtagcgggcgagcacaatattgaagaaacagagcataccgaacaaaaaagaaacgtgattcgtatcatcccgcatcataactataatgccgccattaataagtacaatcatgatatcgccttactcgagcttgatgaaccgcttgttctgaactcctatgtaacgcctatatgcatcgctgacaaagagtacacaaatatcttccttaaatttggaagcggatatgtcagcggctggggacgggtttttcataaaggccgttcagctcttgtcctccagtacctgagggtaccacttgtcgacagagcaacatgtcttctttcaaccaaatttacgatctacaataacatgttttgcgcgggattccacgaaggcgggagagactcatgccaaggagattctggagggcctcacgtgacagaagtggaaggcacaagctttctgacaggaataatttcctggggtgaagaatgtgcgatgaaaggaaaatatggtatatacacaaaagtgtctcggtatgtgaattggatcaaagaaaaaacaaaacttacc

SEQ ID NO: 8994 - DNA, 1383 bp, synthetic construct
  misc_feature 1..1383: note = source = /note="Description of Artificial Sequence: Synthetic coding sequence"
  source 1..1383: mol_type = other DNA
atgcagcgggtcaatatgatcatggcggaaagcccgggtcttatcacgatctgtctgttgggctacctgctcagcgctgaatgtaccgtgttcctggaccacgaaaatgccaacaagattctgaaccggccaaaaagatataactcggggaagttggaagaattcgtgcaagggaatcttgaaagagaatgcatggaggagaaatgttcgttcgaggaggccagggaagtgttcgaaaacactgaacggaccactgaattttggaaacaatacgtcgacggcgatcagtgcgaaagcaacccctgcttgaacgggggctcttgcaaggacgacattaactcgtacgaatgctggtgtcccttcgggtttgaaggaaagaattgcgagctggacgtcacgtgcaatatcaaaaatggaagatgcgagcaattttgcaagaacagcgctgacaataaggtcgtgtgctcctgcacggagggataccgactcgcagagaatcaaaaatcgtgtgaaccggcggtgccatttccatgcggccgggtgtccgtgtcacagacctcgaagctcactcgggctgaaactgtgttcccggatgtggactacgttaatagcactgaagccgaaactatcttggataacattacccagagcactcagagcttcaacgatttcactcgggtggtgggaggggaggatgcaaagcctggacagttcccgtggcaggtggtgcttaacggcaaggtggatgctttctgcggcggatccatcgtcaacgagaaatggattgtcacggcagcacattgcgtcgagactggcgtcaagatcactgtcgtggcaggagaacacaacatcgaggagacggagcacaccgaacagaagcgaaatgtgatcagaatcattcctcatcacaattacaacgcggccatcaataagtacaaccacgacattgcgcttctggagctcgacgaaccactggtgctgaacagctacgtgacgccgatctgcatcgccgacaaagagtacaccaacatcttcctcaagtttggttccggatacgtttcgggatgggggcgggtgttccataagggccgctccgcactcgtcttgcaatacctgcgagtgccgctggtggatcgtgctacctgcctgctttcgaccaagtttacgatatacaataacatgttctgcgccggctttcatgagggagggagggattcctgtcagggagactcaggaggaccccatgtgacggaggtggaggggacttcatttttgaccggaatcatctcttggggcgaggaatgcgccatgaaaggaaagtatggcatttacaccaaggtgtcacggtacgttaactggatcaaggaaaagactaagctgact

SEQ ID NO: 8995 - DNA, 1383 bp, synthetic construct
  misc_feature 1..1383: note = source = /note="Description of Artificial Sequence: Synthetic coding sequence"
  source 1..1383: mol_type = other DNA
atgcagagggtgaacatgataatggcagaatcccctggtctgatcaccatatgtttgctgggatacctcctgagcgcagaatgtaccgtttttctggatcacgaaaacgcaaataagattctcaaccgccctaagaggtacaatagcggaaaacttgaggagtttgtgcagggcaatctggaacgtgaatgtatggaagagaagtgttcatttgaagaagcgagggaggtgtttgaaaacacggaaagaactactgaattttggaaacaatacgtggatggagatcaatgcgaatcgaacccgtgtctcaacggtggaagctgcaaagatgacattaactcgtacgaatgttggtgtccatttggattcgaggggaagaactgtgaacttgacgtcacgtgtaatatcaagaatggccgctgtgagcaattttgtaaaaactcggctgataacaaagtcgtgtgctcgtgtaccgaaggttacaggctcgcagagaatcagaagagctgtgaacccgctgtgccattcccatgcggaagagtgtccgtctcgcaaacttcgaaacttactcgggcagaaactgtattccctgatgtcgactacgtcaactctactgaagcagaaaccatccttgacaacataactcagtcgacccagtcgttcaacgactttactagggtggtgggaggggaagatgcaaagcctgggcaattcccatggcaagtagttctgaacggaaaagtggacgcattttgcggtggaagcattgtgaacgagaagtggatcgtcaccgcagctcattgcgtggaaacgggagtgaagattaccgtcgtggccggcgagcataacatcgaggagactgagcacactgaacagaagcggaacgtgattcgcatcattccccaccataactacaatgcggctatcaataagtataatcatgatatcgcgctcctcgaacttgacgaacccttggtgctgaactcctacgtcacccctatttgcatcgcagacaaagaatacaccaacatattcctgaagtttggttcgggctacgttagcggttggggccgtgtctttcataagggaaggtccgccctcgtgcttcaataccttcgggtgccactcgtggaccgggcaacttgccttctgtccaccaagttcactatttacaacaacatgttttgcgcaggatttcatgaaggcggtagagactcttgtcaaggggatagcggaggacctcacgtgactgaagtggaagggaccagtttcctcactggcatcataagctggggggaagagtgtgcaatgaaaggcaaatatggaatttacaccaaggtgtcgcgctacgtcaattggattaaagagaaaaccaagctcacc

SEQ ID NO: 8996 - DNA, 1383 bp, synthetic construct
  misc_feature 1..1383: note = source = /note="Description of Artificial Sequence: Synthetic coding sequence"
  source 1..1383: mol_type = other DNA
atgcaacgcgtgaacatgatcatggcggaatccccggggctgattacgatctgccttctcggttacctgctttcggcagagtgtaccgtgtttttggatcacgaaaatgcgaacaaaatccttaaccgcccaaagaggtataacagcgggaagctggaagaatttgtgcaaggcaaccttgagcgggagtgtatggaagaaaaatgttcgttcgaagaagcaagagaggtctttgaaaatacggaaagaactaccgaattctggaagcagtacgtggacggcgaccaatgtgagtcgaacccttgcttgaacggggggtcgtgcaaggatgatatcaattcttacgagtgttggtgtccctttggtttcgaaggtaaaaactgcgaactcgatgtgacttgcaacatcaaaaacggacggtgtgaacagttctgcaagaactccgcggacaacaaggtggtctgttcatgtactgagggctaccggcttgcagagaatcagaagtcgtgtgagcctgcggttccgtttccgtgcggtagagtgtcagtgtcacaaacctcaaagctcactagagctgaaaccgtgtttcctgatgtggattacgttaattccactgaggcagagactatactggataacattactcagagtacgcaatcctttaacgacttcactcgcgttgtgggtggtgaagatgcgaagcccggacaatttccatggcaggtggtgcttaatggtaaagtcgatgcgttctgtgggggatccattgtcaacgaaaagtggatcgtcaccgccgcgcattgtgttgaaactggagtgaagattaccgtggtggcaggagaacacaatattgaagagactgaacataccgagcagaaacggaatgttatcagaatcatcccccatcataactacaacgcagcaatcaataagtacaatcacgatattgccttgctcgagctggacgaacctcttgttctgaactcctacgtcacccccatttgcattgctgacaaggaatataccaacattttcctcaaatttggttcaggctacgtgtcgggttggggtcgagtctttcacaaaggccgttcagccctggtgctccagtacctgagggtgccactggttgacagggccacgtgcctgctgtccactaagttcaccatttacaataacatgttttgcgcaggttttcatgaggggggaagagattcctgtcaaggagactcaggtggtccacatgtgactgaggtggaaggaacttcgtttcttaccgggatcatttcatggggagaagaatgtgctatgaaaggtaaatacggaatttacaccaaggtgagcaggtacgtgaactggattaaggagaaaaccaagctgacc

SEQ ID NO: 8997 - DNA, 1383 bp, synthetic construct
  misc_feature 1..1383: note = source = /note="Description of Artificial Sequence: Synthetic coding sequence"
  source 1..1383: mol_type = other DNA
atgcagcgcgttaacatgattatggctgagtctccaggcctcataactatctgcttgctgggctacctgctctcagcagagtgcacagtgtttctggatcacgaaaatgctaataagattctcaaccgcccaaaaagatataactccggaaagctcgaggagttcgttcaggggaacctggagcgcgaatgcatggaagagaaatgcagtttcgaggaggctcgcgaggtattcgaaaacaccgagaggaccaccgagttctggaagcagtatgttgatggagatcagtgcgaatccaacccttgcctgaacggcggatcctgcaaagacgacatcaactcttatgagtgctggtgcccttttggtttcgaaggaaagaattgcgaactggatgtgacctgcaacatcaaaaacggtcgctgcgaacagttctgtaagaactccgccgataacaaagtggtctgctcctgcacagagggatatcggctcgcagaaaaccaaaaatcctgtgagcctgctgttccatttccatgtggccgagtctccgtgagccagacatccaagcttacaagagccgaaaccgtctttccagatgtcgattacgtcaactcaaccgaggccgagaccatcttggataacataactcagtccacacaatcttttaatgacttcacacgggtagtgggcggcgaggacgctaagcccggacagtttccctggcaggtggtcttgaatgggaaggtggacgccttttgtggaggcagtatcgtcaacgagaaatggatcgtgaccgcagcgcactgcgtcgaaaccggggtgaaaataacagttgtcgccggagaacacaacatagaggagaccgagcacaccgaacagaaaaggaacgtcatacgcatcattccacaccacaattacaacgcagccattaacaagtacaatcacgacatcgcattgctcgagctggatgagcctctcgtgctgaattcatatgtgactccaatttgtatcgcggataaggagtacacgaacatctttctcaagtttggaagcgggtacgtaagtggatggggtagagtgttccacaagggaagaagcgcactcgtgttgcagtacctgcgcgtaccacttgtcgacagagccacgtgccttctgtctacaaaattcactatctacaacaatatgttttgtgccggattccacgagggcgggagggattcttgccagggtgattcaggtggaccacatgtgacagaggtggagggcacctcctttctgaccggaattatctcatggggggaagagtgtgcaatgaaaggcaaatatggaatctacacaaaggtgtccaggtacgttaattggataaaggagaagactaagctgact

SEQ ID NO: 8998 - DNA, 1383 bp, synthetic construct
  misc_feature 1..1383: note = source = /note="Description of Artificial Sequence: Synthetic coding sequence"
  source 1..1383: mol_type = other DNA
atgcaacgggtgaacatgatcatggctgagtcgcccgggctgatcacgatctgcctgctggggtacctcctttcagccgaatgtactgtgtttctggatcatgagaatgctaacaaaatcttgaaccgccctaagcgctacaactcagggaagctggaagaattcgtgcaaggaaacctcgagagagaatgcatggaagagaagtgctcttttgaagaggcgcgcgaagtgttcgaaaacaccgagagaaccaccgaattctggaaacagtacgtggacggtgaccaatgcgagtccaacccgtgcctgaacggaggctcgtgcaaagatgacatcaacagttacgaatgttggtgcccattcggattcgaaggtaagaactgtgaactggacgtgacttgcaacatcaaaaacggtcggtgcgaacagttttgcaagaattcagccgacaataaggttgtctgttcgtgtactgagggatatcggctggctgagaaccagaaatcctgtgagccagccgtgccgttcccgtgcggccgcgtgtctgtgtcccagacgagcaaacttactcgcgccgaaaccgtgttcccggacgtggactacgtgaacagcaccgaggctgaaactatcctcgacaacattactcaatcaacccagtcgttcaacgactttacccgagtggtgggaggagaagatgcgaaacctggacagttcccttggcaagtggtcctcaacggcaaggtcgacgcattctgcggggggtcgatcgtgaacgaaaagtggatcgtgaccgcggctcattgcgtggaaactggagtgaagatcactgtcgtagcgggagaacacaacatcgaagagacggaacatactgaacagaaacgcaatgtcatccggatcatcccgcaccacaactacaatgccgccatcaacaagtacaaccatgacatcgcattgctcgaactggacgagcccctggtgctgaactcgtatgtcacccctatctgtatcgcggataaggagtacactaacatttttctgaagttcgggtcaggatacgtttcgggatggggccgcgtctttcacaaggggcggtccgccctcgtgctgcaatacttgcgcgtaccattggtggatagggccacttgccttcttagcaccaagttcaccatctacaataacatgttctgcgccggattccacgaaggtgggagagactcttgccagggagactcaggaggcccccatgtgactgaggtcgagggaacttcgtttctcaccggcatcatctcatggggcgaagaatgcgcaatgaagggcaagtatgggatctatactaaggtttcgaggtacgtgaattggattaaggaaaagaccaaacttacc

SEQ ID NO: 8999 - DNA, 1383 bp, synthetic construct
  misc_feature 1..1383: note = source = /note="Description of Artificial Sequence: Synthetic coding sequence"
  source 1..1383: mol_type = other DNA
atgcagagggtcaacatgatcatggccgaatcgcccggcctcatcactatctgcctgttgggctacttgctgtcggcagagtgcaccgtctttctggaccacgagaacgccaataagatcctgaaccggccgaaacggtataactcaggcaaactggaggaattcgtccaagggaacctcgaaagggaatgcatggaagagaaatgtagcttcgaagaagcccgagaagtgttcgagaacacggaacgcaccactgagttctggaaacagtacgttgacggagatcagtgcgagtcgaacccgtgcctgaatggtgggtcatgtaaagatgacatcaacagctatgaatgttggtgtccgtttggattcgaaggaaagaattgcgaacttgatgtgacctgcaacatcaaaaacgggagatgtgagcagttctgtaagaatagcgcagacaataaagtcgtttgctcgtgcactgagggataccggctcgccgaaaaccaaaagtcgtgcgaaccggccgtgccgtttccttgcggaagagtgtccgtgagccaaactagcaagttgacccgggcagaaactgtgttcccggatgtcgactatgtgaattcgacggaagcggaaaccatccttgacaatatcacgcaaagcacgcagtccttcaacgacttcactcgcgtggtcggaggcgaagatgcaaaacctggacaatttccatggcaggtggtcctcaacggaaaggtggacgcgttttgtggaggttcaatcgtgaacgaaaagtggatcgtgactgcggcccactgtgtggaaactggcgtcaaaatcactgtcgtggcgggcgagcacaacatcgaggaaaccgagcatactgagcagaagcgcaacgtcattcggatcatccctcaccataactacaacgcggcgatcaataagtacaaccacgatatcgccctcctggaattggacgagccccttgtcttgaactcctacgtcacccctatctgcatcgccgacaaggaatacaccaatatcttcctgaagttcggctcgggatacgtgagcggctggggccgcgttttccataaagggagatcggcgctcgttctccaatacctgagggttcctttggtggaccgcgctacctgcctcctgtcaactaagttcaccatctacaacaacatgttctgcgcgggcttccacgaaggaggacgcgatagctgtcagggagattccgggggtccacacgtgactgaggtcgagggcacctccttcctgaccggaatcatctcatggggcgaggagtgtgccatgaaaggcaagtacggcatctacactaaggtgagccgctacgtcaactggattaaggaaaagactaaacttact

SEQ ID NO: 9000 - DNA, 1383 bp, synthetic construct
  misc_feature 1..1383: note = source = /note="Description of Artificial Sequence: Synthetic coding sequence"
  source 1..1383: mol_type = other DNA
atgcagcgcgtgaatatgatcatggctgagtctccgggtcttatcacgatctgtctcctgggatacctgctgtccgcggagtgtacggtgtttctggaccacgagaacgccaataagatcctcaatagaccgaagagatacaactcaggaaagctcgaggagtttgtccagggaaatttggagcgggaatgtatggaagagaagtgcagcttcgaagaagcaagagaagtgttcgagaacaccgagcggactactgaattctggaaacagtatgtggacggtgaccagtgcgaatctaacccgtgtctcaacggcggatcatgcaaggacgacattaactcctacgaatgctggtgcccgtttggattcgaggggaaaaactgtgaactggacgtgacttgcaacatcaagaacggcaggtgtgagcagttctgcaaaaactcagcagataacaaagtggtctgctcatgcaccgagggataccgccttgccgaaaatcaaaagtcgtgcgaaccggccgtccctttcccgtgcgggagggtgagcgtgtcgcagacgagcaagctcacccgcgccgaaaccgtgttccctgatgtggattacgtgaattcgaccgaagcggaaaccattctcgataacatcacgcaaagcacccagtcattcaatgacttcacccgggtggtgggcggggaggacgcaaaacctgggcagttcccttggcaagtggtgttgaacggaaaggtcgacgcgttctgcgggggatcaatcgtcaacgagaaatggatcgtgacggcagcccattgtgtggaaactggagtgaagatcaccgtggtggctggagagcacaatatagaagaaaccgagcatactgagcaaaagcgcaacgtcattcgcataattccccatcacaactacaacgcggcaatcaacaagtacaatcacgacatcgcgttgctggaactggatgaaccactggtgttgaattcgtacgttactcccatctgcatcgctgataaggaatataccaatatctttttgaaattcggcagcggttacgtcagcggatggggacgcgtgttccataaaggcagatcggccctggtcctgcagtacctgcgggtgccactggtcgacagggccacctgtttgttgagcaccaagttcactatctacaataacatgttctgcgcggggttccatgaaggaggtagagactcctgccagggagactcgggcggaccgcatgtgactgaggtggaagggacgagctttctcaccggaatcatttcgtggggagaagagtgcgcgatgaagggcaaatatggaatctacactaaagtctcacgctacgtgaactggatcaaggaaaagactaagctgacc

SEQ ID NO: 9001 - DNA, 1383 bp, synthetic construct
  misc_feature 1..1383: note = source = /note="Description of Artificial Sequence: Synthetic coding sequence"
  source 1..1383: mol_type = other DNA
atgcaaagagtgaacatgatcatggcggaatcaccaggattgatcaccatctgcctcctcggctacctgctttcggcagagtgcactgtctttctcgaccatgagaacgcaaacaaaatcctcaatagaccaaagcggtacaactctggtaaattggaagaattcgtgcagggtaatctggagcgcgagtgcatggaggaaaagtgctcattcgaggaggcccgcgaagtgtttgaaaacactgaacggactaccgagttctggaagcagtacgtggatggcgaccagtgcgagtcaaatccttgcctcaacgggggctcctgcaaggacgatatcaattcctacgagtgctggtgcccgttcggattcgaaggcaagaactgcgagctcgacgtcacttgtaacatcaaaaacggaaggtgtgaacagttctgtaagaacagcgccgacaacaaagtagtgtgcagctgtaccgaaggatacagactggcggaaaaccaaaagtcatgcgagccagccgtgccatttccgtgtggtcgcgtgtcggtgagccagacgtctaaactgacccgggccgagactgtgttccccgacgtcgattatgtgaacagcaccgaggcagagactatcttggacaacatcactcaatccactcagagcttcaacgactttactagggtcgtgggaggcgaggacgcaaagccgggacagttcccgtggcaagttgttctcaacggaaaggtggatgcgttctgcggaggatcaatagtgaatgaaaagtggatcgtgaccgccgcacactgtgtggaaaccggcgtcaagataaccgtcgtcgccggagagcataacattgaagaaactgaacacactgaacagaagcgcaacgtcattcgcatcatcccgcaccacaattacaacgcggccatcaataagtacaaccatgatattgctctgctggaactcgacgagccgctcgtgctgaactcctacgtcaccccgatctgcatcgctgataaggaatacacgaacatcttcctgaaatttggctcagggtacgtgtctggctggggccgggtctttcacaaagggcgcagcgcgttggtcctgcaatacctgcgcgtgcccctggtggatcgcgccacctgtctgttgagcactaagttcactatttacaataacatgttctgcgcgggtttccatgaaggaggacgggactcctgccagggggattcaggaggtccccacgtcaccgaagtggaaggaacctcgtttctgacgggcatcatttcttggggagaggagtgtgccatgaaagggaagtatggaatctacactaaagtgtctcgctatgtgaattggatcaaggagaaaaccaaactgacc

SEQ ID NO: 9002 - DNA, 1383 bp, synthetic construct
  misc_feature 1..1383: note = source = /note="Description of Artificial Sequence: Synthetic coding sequence"
  source 1..1383: mol_type = other DNA
atgcagagggtcaacatgataatggcagagagcccaggactcatcaccatctgccttttgggctacttgctgtctgcagagtgtactgtgttcctggaccacgagaatgcaaataagatcctcaaccgccctaagaggtataattctgggaagctagaagagttcgtgcagggcaatcttgaaagagaatgcatggaggagaaatgtagtttcgaggaagcccgcgaggttttcgagaacacggaacgcactactgagttctggaaacagtatgtggacggagatcagtgtgagtctaacccctgtttgaacggcggctcttgcaaggatgacattaattcgtatgaatgttggtgcccgtttggcttcgaagggaaaaattgtgagttggatgtgacctgtaacattaagaacgggaggtgtgagcagttttgtaaaaattctgccgacaataaagtcgtctgcagttgcaccgaaggttacagactggccgaaaatcagaagtcctgcgaacctgctgtcccttttccttgtggcagagtaagcgtgtcacaaacctccaaacttactcgcgccgaaaccgtcttcccagatgttgattatgtgaattccacagaggccgaaacgattcttgacaacattacacagtcaactcagtccttcaacgatttcactcgtgtagtgggaggggaggatgcaaagccggggcagttcccttggcaggtcgtccttaatggtaaggttgacgcattctgcgggggaagcatcgtcaatgagaagtggatcgtgacagcagcccactgtgtcgaaactggcgttaaaatcacagtggtagccggtgaacacaatattgaagagactgagcatactgagcagaagcggaatgtgatccgaattataccgcaccataactataacgcggcaatcaataagtacaatcatgatatagcactactggaactggatgagccattggttttaaactcttacgtcacccccatttgcatagctgataaggagtataccaacatcttcctaaaattcggcagcgggtatgtgagtggctggggccgggtcttccataagggccgatctgctctggtgcttcagtaccttcgcgtccccctggtcgacagggccacttgcttgcttagcactaagtttacaatttacaataacatgttctgtgctggatttcatgagggcgggcgcgactcctgtcagggagatagcgggggccctcacgtgaccgaggtagaaggcaccagctttttgaccggtatcatcagttggggcgaagagtgtgctatgaaaggaaaatacgggatctacacaaaagtatctaggtatgtgaattggatcaaggagaagacgaagctcact

SEQ ID NO: 9003 - DNA, 1383 bp, synthetic construct
  misc_feature 1..1383: note = source = /note="Description of Artificial Sequence: Synthetic coding sequence"
  source 1..1383: mol_type = other DNA
atgcagcgtgttaacatgatcatggccgaatctcccggtctaattacaatttgcttgctcggctacctcctgtccgccgagtgcaccgtcttcctcgatcatgagaacgctaacaagatcctgaaccgtcccaaacgttacaactcaggcaagcttgaggagttcgtccagggtaacctggaacgtgaatgtatggaggagaagtgcagttttgaggaggcccgtgaagtcttcgagaacaccgaacgcacgacagagttctggaagcagtatgtggacggtgatcagtgcgagtccaacccctgtctgaatggtgggtcatgtaaagacgacatcaactcttacgaatgctggtgcccgtttggtttcgaagggaagaactgtgagctcgacgtcacttgcaacatcaagaacggtcgttgtgaacagttctgcaagaacagtgccgacaacaaagttgtctgctcctgtacggaggggtatcgcctggccgaaaatcagaagtcctgcgaacctgcggtcccctttccctgtggtcgggtcagcgttagccagacaagcaagcttacccgtgccgaaaccgtctttcctgacgtcgactatgttaactccaccgaagcagaaaccatcttggacaatatcactcaaagcacccagtcattcaacgactttacgcgtgtagtcggcggcgaggacgctaagcccggacagtttccgtggcaggttgttttgaatggtaaggtcgatgcattttgtgggggatcgattgttaacgagaagtggatcgtgactgcggctcactgcgtagagaccggcgtcaagatcactgtcgttgccggcgagcacaacattgaggagactgagcataccgaacagaagcgcaacgtcatccgtatcatccctcaccacaattataacgctgctatcaacaagtataaccacgatatcgctttgctggagctggacgagcctctggttctaaacagctacgtcacccctatctgcatcgcggacaaggagtacacaaacatcttcctcaagttcgggtcgggttacgtcagcggttggggtcgtgtctttcataaggggcgtagcgcccttgtgcttcaataccttcgtgtccctctcgtggatcgcgccacgtgccttctctcgactaagttcactatttacaacaatatgttctgtgcgggattccacgagggcggccgagacagttgccagggcgactcaggtggtcctcacgtcaccgaggtcgaggggacctctttcctgaccggcataatctcatggggcgaagaatgcgcaatgaagggcaagtacggcatttatactaaggtgagtagatatgtcaattggattaaggagaagaccaagttgacc

SEQ ID NO: 9004 - DNA, 1383 bp, synthetic construct
  misc_feature 1..1383: note = source = /note="Description of Artificial Sequence: Synthetic coding sequence"
  source 1..1383: mol_type = other DNA
atgcagcgcgtgaacatgattatggccgagtctcccgggctgattactatttgtttgcttggctatctactctcagccgagtgcaccgtcttcctcgatcacgagaatgcaaataagatccttaatcggcccaagaggtacaattcaggcaagctcgaagaattcgtgcagggtaacctcgagagagaatgtatggaggaaaagtgttcctttgaagaggcacgggaggtgtttgagaacactgagaggacaacggaattctggaagcagtacgtggacggggatcagtgtgagtctaatccttgcctcaatgggggctcgtgcaaggatgatatcaattcatacgaatgttggtgtccatttggatttgaaggcaaaaactgtgaacttgacgtaacatgcaacataaaaaacggacgatgcgaacagttttgcaagaatagtgccgacaacaaagtagtttgctcctgtacggagggttacagattagcggaaaatcagaaaagttgtgagcctgctgttcctttcccttgtggacgcgtcagcgtgtcccagacctctaagctcactagggccgagacggttttccctgacgtggattatgtgaattccactgaggccgagaccatactggacaacatcacacagagtacccagtctttcaacgactttactagggtcgtgggtggggaagacgccaagcctggccagttcccatggcaggtggtcctaaatgggaaggtcgatgctttctgtgggggctccatagtgaatgagaagtggatcgtgactgcagcacattgtgtcgaaactggcgtgaagatcaccgtggtcgctggagagcacaacatcgaggagacagaacacaccgaacaaaaacggaacgtgatcaggattataccccatcataactataacgcagctatcaacaagtacaaccatgacatagcactcctcgagttagacgagccacttgttctgaactcctatgtgaccccaatctgtatagccgacaaagaatacactaacatcttcctgaaattcggaagtggctatgtatctggatggggtagggtattccataaggggcgatcagcattggtactgcagtacctgagggtacctctggtggatcgagccacatgtcttctgtccaccaagttcactatctacaacaacatgttttgtgctggttttcacgagggaggaagagactcctgccagggggacagtggcgggcctcacgtgaccgaggtcgagggaacctcattcttaactgggattatctcttggggtgaggaatgcgctatgaagggaaaatatggcatttacacaaaagtcagtcgctatgtaaactggatcaaagaaaaaacaaagctgaca

SEQ ID NO: 9005 - DNA, 1383 bp, synthetic construct
  misc_feature 1..1383: note = source = /note="Description of Artificial Sequence: Synthetic coding sequence"
  source 1..1383: mol_type = other DNA
atgcaacgcgttaatatgatcatggccgaatctcccggcctcatcactatctgtctcttggggtatctgctctccgcggaatgcaccgtttttctcgaccatgaaaacgccaacaaaatcctcaaccggccaaagcggtataactcagggaaactcgaggagttcgttcagggtaacttggagagagagtgcatggaagagaagtgctctttcgaagaggctcgcgaggtatttgaaaataccgaacgcaccaccgaattttggaagcagtacgttgacggggaccagtgtgagagcaatccttgcctcaacgggggtagctgcaaagatgatatcaatagctatgagtgttggtgccctttcggattcgaggggaaaaactgtgagttggacgtcacctgtaacatcaagaatggccgctgtgaacagttctgcaagaatagcgccgataacaaggtcgtttgcagttgcacggaaggatatagactagccgaaaatcagaagagttgtgagcccgccgtgcctttcccctgcggacgggtgtccgtctctcaaacctcgaagttaaccagggccgagaccgtcttccccgacgtcgactatgtcaactccacagaggccgagactatcctggacaacattacacagtccacgcaaagcttcaatgacttcacgcgggtggtgggtggagaagatgccaagcctggtcagttcccatggcaggtagttctgaacgggaaagtggacgctttttgcgggggatctattgtaaatgagaaatggatagtaactgctgcgcattgcgtcgaaacaggagtgaaaattacagtggtggcgggggaacataacatcgaagaaactgagcacacggagcaaaaaagaaacgtgatcaggatcataccgcaccataactataatgctgccattaataagtataaccatgatatcgcactgttagagctggatgaacccctggtgcttaactcgtacgtgacgccaatctgcattgcggacaaggagtacactaacatcttccttaagtttgggtcagggtacgtttcggggtggggccgagtgttccataagggccggtcagccctcgtgctccagtatctgcgggtcccgcttgtggacagggccacctgcctgctctcaactaaatttacgatctataacaatatgttttgcgctggcttccatgaaggcggtcgtgactcttgccagggcgactccgggggacctcatgtgactgaggtcgaggggacgtccttcttaacaggcatcatttcttggggcgaagagtgtgcaatgaaaggtaaatacggcatctacaccaaagtgtcccgctacgtgaactggatcaaggagaagaccaagctgaca

SEQ ID NO: 9006 - DNA, 1383 bp, synthetic construct
  misc_feature 1..1383: note = source = /note="Description of Artificial Sequence: Synthetic coding sequence"
  source 1..1383: mol_type = other DNA
atgcaacgggtcaatatgatcatggcggaatcaccgggcctcatcactatctgcctgctgggataccttctgtccgcggaatgcactgtgttcttggaccatgagaacgcaaacaaaattctgaacaggcctaaacgctacaacagcggaaagctcgaggaattcgtgcagggaaaccttgagcgcgaatgcatggaggaaaagtgcagcttcgaagaggcgcgcgaggtttttgaaaacacggagagaaccaccgagttctggaagcaatacgtggacggggaccagtgtgaaagcaacccgtgcttgaacggaggatcatgcaaggacgacatcaactcttacgaatgttggtgcccgttcggatttgagggcaagaactgcgagctggatgtgacctgcaacatcaagaacggccgctgtgagcaattctgtaagaacagcgcggataacaaggtggtgtgtagctgcaccgagggttaccggctcgcagaaaatcaaaagtcgtgtgagccggccgtgccttttccatgtggaagggtgtcggtgtctcagacctcgaaacttactagagcggaaaccgtgttcccggatgtcgattacgtgaattccacggaggcagaaactatccttgacaacatcacccaatcgacccagagcttcaatgactttactcgagtggtcggaggagaggacgccaaaccgggtcagtttccgtggcaggtggtgctgaatggaaaggtggatgctttctgcggagggtcaatcgtcaacgagaagtggatcgtgaccgccgcccactgcgtggaaacgggagtgaagatcaccgtggtagcgggtgagcacaatatcgaggaaaccgaacatactgaacaaaagcgcaacgtgatccgcatcatcccgcaccacaactacaatgcggctatcaacaagtacaatcatgacatagccctgctcgagctcgacgagccgctcgtgctcaactcctacgtcacgcctatctgcatcgcggacaaagaatacaccaacatcttcctcaagtttggaagcggatacgtgtccggatgggggcgcgtgttccacaaaggaaggagcgccctggtcctgcagtacctgcgcgtgccgctggtggatcgggctacgtgcttgttgagcactaagttcaccatttacaacaatatgttttgcgctggttttcacgaaggtggacgcgactcgtgtcaaggagatagcggaggaccacacgtcaccgaggtggaaggcacgtcattcctgactggcatcatctcgtggggggaggaatgcgccatgaagggtaagtacggcatctataccaaggtgagcagatacgtcaattggatcaaagaaaagaccaagctgact

SEQ ID NO: 9007 - DNA, 1383 bp, synthetic construct
  misc_feature 1..1383: note = source = /note="Description of Artificial Sequence: Synthetic coding sequence"
  source 1..1383: mol_type = other DNA
atgcagagagtgaacatgattatggctgaatcccccggacttattaccatctgcctgcttggctatttgctgtcagcggagtgcacagtcttcctggatcacgagaacgctaataaaattttgaaccgcccaaaacgctacaacagcggaaagctggaggagtttgtacagggcaaccttgagcgggaatgtatggaggagaagtgcagttttgaagaggcccgggaggtgttcgaaaacactgagaggactacagagttctggaagcagtatgtggacggagaccagtgcgaatcaaacccctgcttgaatggaggttcctgtaaagatgacatcaattcttacgagtgctggtgcccatttggctttgagggaaagaactgtgagcttgatgtcacctgcaatatcaagaacggaaggtgcgagcagttctgcaagaatagcgcagacaataaggttgtgtgtagttgtacagagggatacaggctggccgaaaatcaaaagagctgtgagccggctgtcccatttccatgcggacgcgttagcgtgagccagacctctaagctcacacgagccgaaaccgtattcccggacgtggactacgtcaattccacagaggctgagactatcttggataatattacacagtctacccagagtttcaacgattttacccgcgtcgtcggaggagaggatgctaagcctggtcagtttccctggcaagtcgtgctcaatggaaaagtggacgcgttctgcggtggctcaatcgtgaacgagaaatggatagtgaccgccgcccactgcgtggagactggagtgaagatcactgttgtcgcaggcgaacataacatcgaggagacagagcataccgaacagaaacgcaatgtaattcgaattattccgcatcacaattacaatgccgcgatcaataagtacaaccatgacattgcccttctcgagcttgatgaaccgttggtgctgaactcttacgtgacgccaatttgtattgccgacaaggagtataccaatatctttctaaagtttgggtccggttatgtctctggttggggccgggttttccataaggggcgttctgccttggttctgcagtacttgagagtgcctttggtggaccgggccacatgcttgttgagcacaaaattcaccatctacaacaatatgttttgcgctggattccacgaaggaggtcgtgacagttgccaaggtgactctggagggccacatgtcacagaagtggagggcacgtcttttctcaccggaatcattagctggggggaggaatgcgcaatgaaaggcaaatacggcatttatactaaggtttctcgttacgtaaactggattaaggaaaaaaccaaactgaca

SEQ ID NO: 9008 - DNA, 1383 bp, synthetic construct
  misc_feature 1..1383: note = source = /note="Description of Artificial Sequence: Synthetic coding sequence"
  source 1..1383: mol_type = other DNA
atgcaaagggttaacatgattatggctgagtcacccggcctcatcaccatatgcctactgggctatttactgtctgctgagtgtacagtttttctcgatcacgagaatgccaacaagatcctgaatcgacccaagcgctacaatagtggcaagctagaggaattcgtccagggtaacctggaacgcgagtgtatggaagagaaatgctccttcgaggaggccagagaggtcttcgaaaatacagaaaggaccacagagttttggaagcagtatgtggatggcgaccagtgcgaatctaacccatgcctgaatgggggctcttgtaaagacgatatcaacagttacgaatgctggtgcccttttggattcgaaggtaagaattgcgaattggacgtgacatgtaacattaagaatggtaggtgcgaacagttctgtaagaattccgccgacaataaggtggtgtgttcatgcaccgagggttacagattggccgaaaatcagaagtcttgcgaaccagcagtcccctttccctgcggccgcgtatctgtcagccaaacctccaagctcacccgcgctgaaaccgtgtttccagatgtcgattatgtgaactccactgaggccgagacaatactggacaacatcacacaatctacacagtcatttaacgactttaccagagttgtggggggcgaagatgctaaacctgggcagtttccctggcaggttgtactgaatgggaaagttgacgccttttgtggaggaagtattgttaacgaaaagtggattgtgaccgccgcccattgcgttgagaccggggtcaagattactgtcgtagctggcgaacataatatcgaagaaacagagcataccgagcagaagcgcaatgtgattcggataataccccaccataactataacgccgccatcaataaatacaatcacgacattgccctgttagagctggatgaaccattagttctgaactcttacgtgacccccatatgcattgcagataaagaatacacaaatatcttcctgaagtttggctcaggatatgtcagcggctggggccgggtgtttcataagggccgctctgcattagtactgcagtacctgcgagttccactggttgacagagccacatgcttgctatccactaagtttaccatttacaacaacatgttttgcgccggctttcatgaggggggcagggattcctgccagggcgattctggagggcctcacgttactgaggtcgaggggacttcctttctcactggcattatttcttggggggaggaatgcgccatgaagggaaagtacgggatttacaccaaggtgtccaggtatgtgaattggatcaaggagaaaaccaaattgaca

SEQ ID NO: 9009 - DNA, 1383 bp, synthetic construct
  misc_feature 1..1383: note = source = /note="Description of Artificial Sequence: Synthetic coding sequence"
  source 1..1383: mol_type = other DNA
atgcaacgcgtgaacatgattatggcagaatcaccgggactcatcaccatttgccttctgggatacctgttgtcagccgagtgtaccgtgttcctggatcatgaaaatgcgaacaagattctcaaccggcctaagagatacaactcgggtaaactggaggagttcgtgcaaggaaacctcgaaagggaatgtatggaagaaaagtgcagctttgaagaggccagagaggtctttgaaaacactgaaagaacgactgagttttggaagcagtacgtcgacggagatcaatgtgagagcaatccttgtcttaatggcggaagctgcaaggacgacattaactcatacgaatgttggtgtccatttgggtttgaaggcaagaactgtgagcttgatgtgacttgcaacataaagaacggtaggtgtgaacagttctgtaagaactccgcagacaacaaagtggtgtgttcctgcactgaaggttaccggcttgccgaaaatcaaaaaagctgtgagccagctgttcctttcccttgcggaagagtgtcggtgtcacagacctccaagctgaccagagcagaaacggtgttccctgatgtggactacgtgaattcaactgaagcagagacgattcttgataacattactcaatcgacccaatcgttcaatgactttactagagtggtgggcggagaggacgccaagccagggcaattcccctggcaagtggtcctgaatggtaaggttgatgcgttctgtgggggatcaattgtgaacgagaagtggattgtcaccgcggcacactgtgtggaaaccggggtgaagataaccgtggtggcaggggaacacaatatcgaggaaactgaacatactgagcaaaagagaaatgtcattcgtatcattccccatcacaactacaacgccgccatcaacaagtacaaccacgacatagcgttgcttgagttggatgagcccctcgtgttgaacagctacgttactcctatctgtattgcagataaagaatacaccaacatttttctgaaattcggttctggatatgtgtcaggatggggacgggtgttccacaagggacgcagcgcactggtgctccagtaccttcgggtcccattggtggaccgggcaacgtgcttgctgtccactaagtttaccatatacaataacatgttttgtgcaggtttccacgagggagggcgcgattcgtgtcagggggactcgggaggtcctcatgttacggaagtggaaggtactagcttccttaccggtattatctcgtggggggaagagtgcgcgatgaagggcaagtacggaatctacaccaaggtatcccgatacgttaactggatcaaggaaaagaccaagctcacg

SEQ ID NO: 9010 - DNA, 1383 bp, synthetic construct
  misc_feature 1..1383: note = source = /note="Description of Artificial Sequence: Synthetic coding sequence"
  source 1..1383: mol_type = other DNA
atgcagagggtcaatatgatcatggcagagtctcctggcctgataacaatctgtttgcttggttacctgttgagtgctgagtgcactgtattcctggaccatgaaaacgctaacaagatccttaaccggcccaaacggtataacagcggcaagttagaggagtttgtccaaggaaaccttgagcgggagtgcatggaggaaaaatgctcgttcgaggaagccagggaagtatttgaaaacacggagcgtacgaccgagttctggaaacagtacgtcgatggcgaccagtgcgagtcaaacccctgcctcaacggggggagttgcaaggacgatattaacagctacgagtgttggtgcccatttggcttcgagggcaagaattgtgagctagacgttacgtgcaacatcaagaacggccgatgtgagcagttctgtaaaaactcggcggataataaagtggtgtgctcctgcacagagggatacagactcgcagaaaaccagaagtcgtgcgagcctgcagtgcctttcccatgcgggcgtgtctctgtctcgcagacgtcgaaacttacgcgggccgaaactgtctttcctgatgtcgattatgtcaacagcactgaggccgagactatcttggataatattacccagtctactcaatcatttaatgattttacccgcgtcgtcgggggcgaggacgcgaagccaggtcagtttccgtggcaggtggtgttgaacggcaaggtcgacgcgttctgtggtggctctatcgtcaatgaaaagtggatcgttacagcggcccattgtgtggaaaccggtgtcaagataacagttgtcgctggagaacataatatagaggaaactgagcatacagagcaaaagagaaatgttattcgaattatcccgcaccacaattacaacgccgctatcaacaagtacaaccatgatattgctctccttgaactagacgagccactggtgttgaactcctacgttactccaatttgcatagccgacaaggaatataccaacatctttctgaaattcgggtccgggtacgttagcggctggggcagagtcttccacaagggtagatcggctcttgttcttcaatacctccgtgtacctctggtcgaccgcgcgacatgcctcttatcgaccaaattcaccatctataacaacatgttctgcgcaggttttcatgaaggcggaagggactcctgccagggggacagcgggggaccccatgtcacggaggttgagggcacttcctttctaaccggtatcatttcgtggggcgaagaatgcgccatgaaaggcaaatacggtatctacacaaaggtatctagatacgtaaattggatcaaggagaagactaagctcact

SEQ ID NO: 9011 - DNA, 1383 bp, synthetic construct
  misc_feature 1..1383: note = source = /note="Description of Artificial Sequence: Synthetic coding sequence"
  source 1..1383: mol_type = other DNA
atgcagcgcgtgaatatgatcatggccgaatcccccgggcttatcaccatctgcctgctcggctacctcctcagcgcggaatgcactgtgttcctcgatcacgaaaacgcaaataagatccttaatcggccgaaaagatacaactccggcaagctcgaagaattcgttcaaggcaacctcgagcgggaatgtatggaggagaagtgttcgttcgaggaggcaagggaggttttcgagaatactgagcggaccactgaattctggaaacagtacgtcgatggtgaccagtgcgaatcgaacccttgcctgaacggaggctcctgcaaagacgacatcaactcatacgaatgttggtgcccgtttggattcgaagggaagaactgtgagctggacgtgacgtgcaacatcaaaaatggaagatgcgagcaattctgcaagaactcggcagataacaaagtcgtctgcagctgcaccgaaggttaccgcctggccgaaaaccagaaatcatgcgagccggcagtgcccttcccatgcggccgcgtgtccgtctcccagacgtcaaagctgacccgcgccgaaaccgtgtttccagacgtggactacgtgaactcaaccgaggcggaaactattctcgacaacatcactcagtcgacgcagtcattcaacgacttcacccgggtcgtgggaggcgaggatgccaagcctggccagtttccatggcaagtggtgcttaatggcaaggtggacgccttctgtggagggagcatcgtgaatgagaagtggattgtgactgccgcacattgtgtggaaaccggcgtgaagatcaccgtggtggccggtgaacacaacatcgaggagactgaacacacggaacaaaagcgcaacgtgatcagaatcatcccacatcacaattacaatgcggcgatcaacaagtacaatcatgatatcgccctgctggaactggacgaaccgttggtgctgaactcctacgtgactcctatctgcatcgccgacaaggaatacaccaatatcttcctgaagttcggaagcggatacgtgtcgggatgggggcgggtgtttcacaagggacgcagcgcgctcgtcctgcagtacctgcgggtgcctctggtcgatcgcgcgacgtgccttctctctaccaaattcaccatctacaacaatatgttctgcgcagggttccacgagggcggaagggactcctgccagggggactcaggaggaccgcatgtgactgaggtggaaggaacctcgttcttgactggaatcatctcgtggggcgaggaatgcgccatgaaagggaagtacggaatctacaccaaggtgtccagatacgtgaactggattaaggaaaagactaaactgacc

SEQ ID NO: 9012 - DNA, 1383 bp, synthetic construct
  misc_feature 1..1383: note = source = /note="Description of Artificial Sequence: Synthetic coding sequence"
  source 1..1383: mol_type = other DNA
atgcagagagtgaacatgattatggcggaatctcctggactcatcacaatatgcctcctggggtatctcctgagcgctgaatgcaccgttttcctggatcacgaaaacgcgaataagattcttaaccgccccaaacgctacaattctggtaagctcgaggagttcgtccaaggcaacctcgagcgcgagtgtatggaagagaagtgttctttcgaagaggctcgtgaggtgtttgaaaataccgaaaggactacggaattttggaaacaatacgtcgatggagaccagtgcgagtccaacccctgcctgaatggaggcagctgtaaggatgacattaatagttacgagtgctggtgccccttcggctttgaaggaaagaattgcgagttggacgttacctgcaatatcaagaacggaaggtgcgagcagttctgtaaaaattctgccgataacaaggttgtgtgctcttgtaccgaggggtataggttagccgagaatcagaagagctgtgagcctgccgtgccgtttccttgcgggcgggtttcagtgtcacagacaagcaagctcacgcgagctgagacggtattcccagatgtggactatgtgaactctactgaagccgagacgattctcgacaacattacccaaagcacacaatcttttaatgattttacaagagtagtgggcggtgaagacgctaaacccggacaatttccgtggcaggtagttcttaacggtaaggttgatgccttctgtggcggttccatagtgaacgaaaaatggatcgtgaccgccgctcactgcgtggagaccggggtaaagataaccgtggtggccggggagcacaatattgaggagaccgagcatactgagcagaagaggaacgttattagaataattcctcaccataattacaatgctgcaattaataagtacaaccacgatatcgccctgctggagttggacgagcccttggtgcttaattcttatgtcacccccatctgcatcgcagataaagaatatactaacattttcttgaagtttggttcagggtacgtatctggctggggccgagtctttcataagggaaggtccgccctggtgttgcagtacctgagggtccctctggtggatagagcaacctgtctcctgtccacaaaatttacgatctataacaatatgttctgtgctgggttccatgaagggggcagagatagttgccaaggagattctggcggtccacatgtgacagaagtcgaaggtacgagctttcttaccggcattatcagttggggagaggaatgtgccatgaaagggaaatacggcatttacacaaaagtgtctcgctacgtcaattggatcaaagaaaaaaccaaactgacc

SEQ ID NO: 9013 - DNA, 1383 bp, synthetic construct
  misc_feature 1..1383: note = source = /note="Description of Artificial Sequence: Synthetic coding sequence"
  source 1..1383: mol_type = other DNA
atgcagcgtgtgaacatgataatggcggagagcccaggcttgataacaatttgtctattagggtatcttctgtctgccgagtgcactgttttcctcgatcatgagaacgcgaataaaatcttaaatcggcccaagcgctacaacagtgggaagctggaggagttcgttcagggcaacctggagagagaatgtatggaagagaagtgttcgttcgaggaagcaagagaggtcttcgaaaatacagagagaaccactgagttttggaagcagtatgtggatggcgaccagtgtgagtcaaatccatgtctgaatgggggtagctgcaaggatgatattaattcctatgaatgttggtgccctttcgggttcgagggcaagaattgcgagcttgatgtcacgtgtaatattaagaatggccggtgcgagcagttttgtaaaaacagtgctgacaacaaggtggtctgttcatgcactgagggctaccgcctggccgagaatcagaagtcttgtgaacctgcagtgccgtttccctgtggaagggtctcagtgtcccagaccagcaagctgactcgggccgagactgttttccctgatgtcgattacgtgaacagtacggaggctgaaaccattcttgataacattacgcaatcaacacaatcatttaatgattttaccagagtcgtcgggggagaggacgccaagcccggacagttcccttggcaagtagttctcaacggaaaagtcgatgctttctgcgggggatctatcgtaaatgagaagtggatcgtgaccgccgcgcattgcgttgagacgggggttaaaattacggtggtagccggcgagcacaacatcgaggaaaccgagcacaccgagcagaaaaggaacgtgatccgaatcataccccaccacaactacaatgccgccattaacaaatacaatcatgatattgcactccttgaactggatgaaccgttggtgctcaattcctacgtgactcctatatgcatagcagacaaagaatatactaatatcttcctcaagttcgggagcgggtatgtttccggatgggggcgggtttttcataaggggcgctccgccctcgtgctccaatacctccgcgtgccattagttgatcgagccacttgcctcctcagcactaagttcacaatctataataacatgttttgtgcaggtttccacgagggtggacgagattcatgtcaaggcgacagcggcggtccccatgttaccgaggttgaaggaacgtcattcctcacagggattatttcctggggtgaggagtgtgctatgaaaggtaagtacgggatatacactaaagtgagtagatatgtgaattggatcaaagagaaaactaaacttacc

SEQ ID NO: 9014 - DNA, 1383 bp, synthetic construct
  misc_feature 1..1383: note = source = /note="Description of Artificial Sequence: Synthetic coding sequence"
  source 1..1383: mol_type = other DNA
atgcagagagtgaatatgatcatggctgagtcccctgggctgattactatttgcctgttgggttacctactatctgccgaatgtaccgtattcctagatcatgagaacgccaacaagatcttaaatcgacctaaacgatataattcgggtaagttagaggagttcgtccagggaaatctcgaacgagagtgtatggaggagaaatgctcattcgaggaagctagggaggtattcgagaacactgagcggaccaccgaattctggaagcagtacgtagacggagaccaatgtgaatcgaacccctgccttaatggcggatcctgcaaggatgacatcaatagctacgaatgttggtgccctttcggtttcgagggcaaaaactgtgaattagacgttacctgtaatatcaagaacggccggtgtgagcaattctgcaagaattccgcggataataaggtagtgtgcagttgtaccgagggctaccgcttggccgagaatcaaaagtcctgcgagcctgccgtgcccttcccttgtggccgcgtgtcagtaagtcagacttctaagctgacacgagcagagaccgttttcccggatgtcgactacgtgaattcaaccgaagcggagactattctagataatattacccagagcactcagagcttcaacgacttcacccgcgtcgtgggcggcgaagatgccaagcccgggcaatttccatggcaggtggttcttaatggcaaagtggacgccttctgcgggggatcaattgtgaacgagaaatggatcgtgacagccgctcactgcgtggagactggcgtaaagatcactgtggtcgccggggagcacaacatcgaggagacagagcacacggaacagaagaggaacgtgattcgaattatccctcatcacaactataacgccgcaatcaacaaatacaaccacgatattgcgctcctcgaactcgacgagcccctcgtcttgaattcttatgtgaccccgatttgtatcgctgacaaggaatacacaaatatctttctcaaatttggctctggctatgtgtcagggtggggccgggtgttccataaaggccgttcagcactggtcctgcagtatttgcgcgttcccctggtagaccgcgcaacttgcctgttgtccactaagttcaccatatacaataatatgttttgtgctggatttcacgaaggcgggagggattcttgccagggtgattcaggggggccccatgtcaccgaggtggaaggtacatcttttctgacagggataatctcttggggtgaggaatgtgctatgaagggtaaatatggcatctacacgaaagtgtccaggtacgtgaactggatcaaggagaaaactaagcttaca

SEQ ID NO: 9015 - DNA, 1383 bp, synthetic construct
  misc_feature 1..1383: note = source = /note="Description of Artificial Sequence: Synthetic coding sequence"
  source 1..1383: mol_type = other DNA
atgcagcgcgtcaacatgattatggcagaatcgcccgggctgataaccatatgtcttttggggtacttgttgtccgcagaatgtactgtctttctggatcacgaaaacgctaacaaaatccttaatcgtcctaaacggtacaactccggaaaactcgaagaattcgttcagggaaaccttgagcgcgagtgtatggaagaaaaatgttcgttcgaagaagccagagaggtgttcgaaaacacggagcggactacggaattttggaagcagtatgttgacggggaccagtgtgaatcgaacccatgcctgaatggtggttcttgcaaggatgacattaacagctatgaatgctggtgccccttcggattcgagggcaagaactgtgagttggatgtgacttgtaacattaagaacgggagatgtgaacagttctgtaagaattccgctgataacaaggtggtgtgtagctgcaccgaaggttacaggctcgccgaaaaccagaagtcctgtgagcctgcagtcccttttccatgtggtcgagtctccgtgtctcaaacttccaaacttactcgcgcagagactgtgttccccgacgtcgactacgtgaattcaactgaggcggaaactattctcgacaacataacccaatccacgcagtcgtttaacgactttacccgggtggtgggaggtgaggacgccaaacccggacagtttccatggcaggtggtgctgaatggaaaagtggatgcgttttgtggggggtcaatcgtgaacgagaagtggattgtgaccgcagcacattgtgttgaaacgggtgtgaagatcaccgttgtggcgggtgaacacaacattgaagaaactgagcataccgaacagaaacgcaacgtgatccgcatcatccctcaccacaactataacgcagcgatcaataagtacaatcatgatatagccctgctggaattggacgagccacttgtgcttaatagctacgtcacccctatttgcatcgcagataaggagtacaccaacattttcttgaagtttggatcaggttacgtttcaggatggggaagagtctttcataagggacgttccgcactggtgctccaataccttagagtgcctctggtggatagagcaacctgtctgctgtccacgaagtttaccatttacaacaatatgttctgcgcaggttttcacgagggaggccgcgattcgtgtcagggcgattcggggggtcctcatgtgaccgaagtcgagggaaccagctttcttactgggatcatttcatggggtgaggaatgcgccatgaagggtaagtacggaatatacaccaaggtgtcgcgctacgtgaattggatcaaggaaaagaccaaactgacc

SEQ ID NO: 9016 - DNA, 1383 bp, synthetic construct
  misc_feature 1..1383: note = source = /note="Description of Artificial Sequence: Synthetic coding sequence"
  source 1..1383: mol_type = other DNA
atgcaacgggtcaatatgataatggctgaaagtcccgggctgatcaccatctgtttgctcggttatctcctgtctgcagagtgtacggtcttcttggatcatgagaacgccaacaagatcctgaacaggcctaaacgctacaactccggtaaattggaggagttcgtgcagggcaacctggaacgggagtgcatggaagagaaatgtagcttcgaggaggccagggaggttttcgagaacaccgaacggactacggagttctggaagcagtacgtggatggagatcagtgtgagtctaatccctgtctcaacgggggtagttgcaaagacgatattaacagctacgagtgctggtgtcctttcggatttgaaggaaagaattgcgagttggatgtgacttgcaatattaagaatggtcggtgcgaacagttttgcaagaacagcgcagacaataaagttgtttgctcatgcacagagggatatcgccttgcagagaatcagaagtcttgtgagccggccgtgccgtttccctgcggccgggtatctgtatcccagaccagcaaactgacccgggccgagaccgtgtttcccgatgtggactatgttaactccactgaggccgagacaattctggacaacatcactcagagtacccagtcctttaacgattttactagagttgtgggcggtgaggacgcgaagcccggtcaattcccatggcaagtggtcctgaacgggaaggtggacgccttttgtggcggatctatcgtgaacgaaaagtggattgtcacagccgcacactgtgttgaaacaggggttaaaattaccgtcgtggccggggagcataacatcgaggaaacagaacacacagagcagaaaagaaacgtgattcgcataatccctcaccataactacaacgctgcaatcaataaatataatcacgacattgctctgctggagctcgatgaaccgttggtgctgaatagctatgtaaccccaatctgcatcgccgacaaagagtataccaatatcttcctgaagttcggcagcggctacgtctccggatggggaagggtattccacaaaggtcggagtgcccttgtgcttcagtacctccgggtcccgctggtggatagggcaacttgcctgctcagtactaaatttaccatttacaacaacatgttctgtgcaggatttcacgagggcgggagggacagctgtcaaggcgactctggtggcccccacgtcacggaggtggaaggaacctcctttcttacaggtatcatctcctggggggaggagtgtgcaatgaagggaaaatatgggatatatacgaaagtctcccgctatgtgaattggatcaaggaaaaaaccaagctgact

SEQ ID NO: 9017 - DNA, 6672 bp, synthetic construct
  misc_feature 1..6672: note = source = /note="Description of Artificial Sequence: Synthetic coding sequence"
  source 1..6672: mol_type = other DNA
atgttccctggatgccccaggctttgggtcctcgttgtgctgggtacatcatgggtggggtgggggtcacagggaaccgaagccgcccagcttcgccaattttacgtcgctgctcagggtatcagctggagctataggcctgaacctacaaattcgtcattaaatttatctgtgacaagctttaagaagattgtgtacagagaatacgagccgtactttaagaaagaaaagccccagtccacaataagcggcctgctaggcccgacgctgtatgccgaggtgggcgatatcatcaaagttcactttaaaaacaaagctgataaacccctttctatccatcctcagggaatccgatattctaaactgagcgagggcgcctcctaccttgaccacacattccccgccgaaaagatggacgatgcagtggcaccaggcagagaatacacctatgagtggtcaatctcggaagactctggcccaacacatgacgaccctccttgcctcacacatatctactactcacacgagaatctgattgaagattttaattctggtctgatcggcccactcctaatatgtaagaaggggaccttgaccgaaggcggaacacagaaaacttttgacaaacaaatcgttctgcttttcgctgtgttcgatgaatctaagtcctggtctcagagctcttcattgatgtacacggtaaacgggtacgtgaatggcacgatgcccgacatcaccgtctgtgcacatgatcacatctcttggcacctcctcggtatgagctccggccccgaactgttttctatccactttaatggacaagtgctcgaacagaatcaccataaggtgtccgccataactctagtgtctgctacttctaccaccgcgaacatgacagtcggcccagaaggtaagtggatcatctcttccttgacgcctaaacatctgcaggctgggatgcaggcctacatagacatcaaaaattgtcctaagaaaacaaggaacctgaagaagattacgagagagcagcggcgtcacatgaaaagatgggagtattttatagccgcagaagaagtaatctgggattatgcccctgtgattcccgccaatatggacaaaaaataccgaagccagcacctggataacttttctaatcaaattgggaaacactataagaaagtgatgtatacacagtatgaagacgaaagtttcactaagcataccgtaaatccaaatatgaaagaggatggaattctggggccaattatcagggcgcaagtgagggacacactcaaaatcgtgtttaagaatatggcttctaggccctacagtatatacccacacggggtgactttcagtccttatgaagatgaggtcaacagcagtttcacctccggtagaaacaacaccatgatcagagcggttcaaccaggagagacatatacctacaagtggaatatcttggagttcgacgagcccaccgagaatgacgcgcagtgtttgacgcggccatattacagcgatgtggatattatgagggacatcgcctccgggctgatcgggctgctgctgatctgtaagagccgatccctggataggcggggcatacagagagcagccgacattgagcagcaggcagtgtttgctgtctttgatgagaataagagctggtacttggaggataacattaataaattttgtgagaatccagacgaggtgaagcgtgacgatcccaagttttatgagagtaacattatgtcaaccatcaatggctatgtacccgagtccatcaccaccctagggttttgcttcgatgacactgtccagtggcacttttgcagcgttgggacacagaacgagattcttaccatccacttcacaggccactcctttatttatggaaagcgccacgaagatacccttacactgttcccaatgaggggggaaagcgtaactgtcaccatggataacgtcggtacctggatgctgaccagcatgaattctagcccacgcagcaagaaactacgtctcaagttccgtgacgtgaaatgcatccctgatgatgacgaagactcttacgaaatttttgagccacccgaaagcacagtgatggccactcggaaaatgcacgatcgactggagccggaggatgaagaaagcgatgccgactacgattatcagaatcggctggccgccgccctgggaatccggagcttccggaacagcagccttaatcaagaagaggaagaattcaacctcaccgccctggcactcgagaacggcactgagttcgtcagcagcaacacggacatcattgtaggttctaattactcgtcccctagcaacatatctaagtttactgtgaataacctcgcggagccccagaaggcaccctcgcatcaacaggcaaccactgccggaagcccattgaggcatcttatcgggaagaacagcgtcctcaactcttccaccgcagagcactcctctccctatagtgaagatccaatcgaggatcccctccaaccggatgtgacggggatcagattattgtccctgggagcgggggaattcaaatctcaggagcatgccaaacacaagggcccaaaggtggagagagatcaagccgctaagcacagattcagttggatgaagcttctcgctcacaaggtgggtaggcatttgtcgcaggataccgggtccccaagcggcatgagaccctgggaggacctgccctctcaggacaccggatctccaagcagaatgagaccttggaaggacccacctagcgatctcctgctgttgaaacagagcaactcttccaagattcttgtcgggaggtggcacttggcctctgagaagggctcctacgagatcatccaggatacagacgaagacacagcggtcaacaattggctcatctcgcctcagaacgcctccagggcttggggagagtccacgcctttagccaacaagccaggcaaacagagcgggcatcctaagttccctagggtgcgtcataagtccctgcaagtgcgccaagacggggggaagtccagacttaagaaaagccagtttctcatcaaaacacggaagaaaaagaaggagaagcacacgcaccacgcacctttgtcacctaggacatttcatcctcttcgatccgaggcctataataccttttctgaacggaggctaaagcatagtctggtgctgcacaagtctaatgagacctctttgcctaccgatctaaaccagaccctaccctctatggattttggatggattgcgtcgcttccagatcacaaccagaattcttctaatgataccgggcaggcaagttgtcctcccggcctctatcagactgtcccgccggaggagcattatcagacattccctatccaggacccagatcagatgcactccaccagcgacccttctcatcggagttctagtccagagctgagcgagatgctggagtacgatagatcacacaaatccttcccaactgacatcagccagatgtctccctcatccgagcatgaagtctggcagaccgtgatttcaccggacctgagccaggtgacactgtctcccgagctctcacagacaaacctcagcccagatctgtcccatactacacttagcccggaactgattcaaaggaacttgtctccagcccttggccagatgccaatttctcccgacttgagtcatacaaccctcagtccagatctgtctcataccactctatccctcgacctgagtcagacaaatctctcgcctgaactcagccagactaatctctctccggctctggggcaaatgcctctgtctccagatctgtcgcataccactttgtctctggacttctcccaaactaacctctcacctgaactgagccacatgacgctgtcgcccgaattgagccaaacgaacctgagccccgcattagggcaaatgcctattagcccagacctgtcccatacaacattgtccttggacttctctcagacaaatctgtcgcccgaactgtcccagaccaatttgagtcctgcgttgggccagatgcccctgtctccagatcctagtcatacaaccttgtccttggatctgagccagacaaatctgtcacccgaactttctcagacaaacttaagtccagacctgtctgagatgccgctgtttgcagacctttcacagattcccctgacccctgatttggaccagatgaccctgtcgcctgatctgggtgaaacggacctgagtcctaatttcggacaaatgagcctctcgccggacctctcccaagtgacactgtccccagatatttctgacactaccctactccccgacctgtcgcagatctccccacctccagaccttgaccaaatcttctacccctctgagtcctcacagtccctgttgctacaggagtttaacgagagtttcccttatcccgatctggggcagatgccatcaccaagctcaccaacactaaacgatacatttctttctaaggaattcaaccccctagtcatcgtgggtctaagtaaagatggcactgattatatcgaaataatccctaaagaagaggtacaatcctccgaggacgactacgctgagatagattacgtgccctacgacgacccatacaaaaccgatgttcgcacgaatattaatagtagtcgtgacccagacaatattgctgcctggtacctgcgtagtaacaatggcaatcgacgtaattattatattgcggcggaggaaatttcttgggactatagtgagtttgtccaaagggagacagatatagaagattctgacgacattcccgaggatacaacttacaaaaaagtggtgttcaggaagtacctagatagcactttcacgaagagagacccccggggggagtatgaggaacatctcgggatcttaggacctattatcagagcggaggtcgatgatgtgatacaggttcgatttaagaatctagcgtcccggccatactcgctgcacgcccacggtctgtcctatgagaaatcctccgagggtaagacttatgaggatgatagcccggaatggtttaaggaggacaacgcagtccaacctaatagctcgtacacttatgtgtggcacgcgactgagaggagtggccccgagagccctgggtctgcgtgtcgagcttgggcctactacagcgccgttaaccccgaaaaagatattcatagtgggctgatcggaccgctgcttatttgccagaagggcatcctgcacaaagattctaacatgccaatggacatgcgtgaattcgtgcttttgtttatgacatttgatgaaaaaaagagttggtattacgagaaaaagagtagatcatcgtggcgcctgacctcgtctgagatgaagaagtcccacgaattccacgcgatcaatggaatgatctatagcttaccaggcctcaagatgtacgaacaagagtgggtccgactccacctgctaaacatcgggggatcccaggacatccatgtggttcattttcatggccaaacgttgttagagaacggaaacaaacaacatcagttgggagtgtggcctctcctcccaggcagttttaaaacccttgaaatgaaggccagcaagcccggctggtggttgctcaataccgaggtgggcgaaaaccaacgcgcggggatgcaaaccccttttttaattatggaccgcgattgcaggatgcctatgggattatctaccggaatcatttcagattcgcaaattaaagcgagcgaatttctgggctactgggagccccgactggctaggctgaacaacggcggatcatacaatgcgtggtccgttgagaaactggcagctgagttcgcctccaaaccctggattcaggtcgatatgcagaaggaggttattattacaggcatacagacccagggagcaaagcactacctcaagagttgctataccactgagttctacgtggcatactcctccaaccagatcaactggcagattttcaagggaaactctacacggaacgtgatgtatttcaatgggaactccgatgccagtaccattaaagagaaccaatttgatcctcctatagtcgctcggtacattcgcatatctccaacccgcgcgtataaccgtcccaccttgagactcgagctgcagggctgcgaggttaacggctgtagcacacccctggggatggagaacggcaagattgagaacaaacaaattactgcatcttcatttaagaagagctggtggggcgattattgggagccttttagggccaggctgaacgcacagggccgtgttaatgcatggcaggccaaagctaataataacaagcagtggctggagattgacctgttgaagatcaagaaaattactgccataatcacgcagggatgcaagagcctgtcctccgaaatgtacgtgaagtcctatactatccattactcggagcagggagtcgaatggaaaccctatcgcctcaagtcctctatggtcgacaaaatcttcgagggcaacaccaacaccaagggtcatgtcaagaatttctttaatcctccaatcatatcccgctttatccgagtgatccctaaaacatggaatcagtccatagccctccgcctggaactatttggctgtgatatatac

SEQ ID NO: 9018 - DNA, 6672 bp, synthetic construct
  misc_feature 1..6672: note = source = /note="Description of Artificial Sequence: Synthetic coding sequence"
  source 1..6672: mol_type = other DNA
atgttccctggttgccctcgcctgtgggtcctggtggtcctgggcacatcctgggtgggatgggggagccaagggactgaggctgcccagctcaggcaattttatgtggcagcccaagggatcagttggtcttatcggcccgaacccactaattcaagccttaatctctcagttacgagcttcaagaagatagtgtatagggaatacgaaccgtacttcaagaaagagaaacctcagagcactattagtgggcttttgggacctacgctatacgccgaagtaggggatataataaaggtgcactttaagaacaaggcagacaaacctttgtccatccacccacagggtatacgatacagcaagctctccgaaggggccagctatctcgatcatacttttccagcggaaaagatggacgatgccgtcgcccctggcagagaatacacctacgagtggtctatctctgaagattccggccccacccacgatgaccctccgtgcctgacccacatttattatagtcatgaaaatttgatcgaggattttaattccggtttgatcggaccacttttaatctgcaagaaaggcacactcactgaaggaggaacccagaaaactttcgacaagcagattgtcctcttattcgccgtcttcgacgaaagcaaaagctggtcacagtcaagttcactgatgtacacggtgaatggatacgtgaacggcacgatgccggacataacagtatgcgctcacgatcacatctcatggcacttgttgggtatgtcaagcggcccggaactctttagcatccactttaatggccaggtgttagagcagaatcaccataaggttagtgccattacactagttagcgcaaccagcacaacggccaatatgactgtgggtcccgagggaaagtggattatctcctcactgacacctaagcacctccaggcaggcatgcaggcctacatagacattaagaattgtcccaaaaagacccggaatctgaaaaagattacaagagaacagagaagacacatgaagagatgggagtactttattgctgccgaggaagtgatctgggactacgcaccagtgatccctgcaaacatggacaagaaatatagaagtcagcacctggacaacttttccaatcaaatcggcaagcactataagaaggtgatgtacactcagtatgaagatgaatcttttaccaaacacaccgtcaaccctaacatgaaggaggacggaatcttgggcccaatcatcagggcgcaggttagagatacattgaaaatcgtctttaaaaacatggcatcgaggccatattctatctaccctcacggggtgactttctcaccatatgaggacgaggtgaattcctcttttacctcaggacgaaacaatacaatgatcagagcggtgcagcccggagagacctatacctacaagtggaatatcctggaattcgatgaaccaaccgagaacgacgcccagtgtctgactcgaccatattatagtgacgtagatatcatgcgggatattgcctctggcctgatcgggctgctgctgatctgcaaatcacgctctctcgatcgtagaggcatacagcgtgctgctgatatcgaacaacaggccgtcttcgctgtgtttgacgaaaacaagagttggtacctagaggataatatcaacaaattttgtgaaaatcccgatgaggtgaagcgagacgatccaaaattttacgagtccaacataatgtccacaattaacggttatgtaccggagtccattacgactctagggttttgcttcgacgacaccgtgcagtggcacttctgcagtgtcggaacacagaacgaaatactgacgatccattttaccggacattcctttatttatggaaagcgccacgaagatacgctcacactcttccccatgcgaggcgagtcggttactgtgacaatggataatgtggggacctggatgctgacttccatgaattcaagccctaggtcgaagaaacttaggctgaagtttagggatgtcaagtgtatccctgatgatgacgaggacagctacgagatctttgagcctcctgaatcgaccgttatggccacccggaagatgcacgatcggcttgagcccgaggatgaggagtcggatgccgactacgattaccaaaataggttggcggccgccttaggaatccgatccttcaggaattcgtccctcaaccaagaagaagaggaatttaacctaactgctctggcccttgagaacgggactgagtttgtttcaagcaacaccgacatcattgttggcagtaattatagcagcccatccaacatctcaaaattcactgtcaataatctcgccgaaccccaaaaagccccttcacatcaacaggctactacagccggaagccccctaagacacctgatcggcaagaacagcgtgctcaattcatccactgccgagcactcatcaccatattcggaggatcctatagaggaccctttgcagccggacgtgactggaatcagactgctttctctgggcgcgggagaattcaaaagtcaggagcatgctaagcataagggaccaaaggttgagcgtgatcaagctgcgaaacacaggttttcatggatgaagctactggcccacaaggtgggacgccacctgtcccaggacaccggctcccccagtggaatgcggccatgggaggacttgccctcccaggataccggcagcccatctcgaatgcgcccttggaaagatccacccagtgatctgctgttgctcaaacaatctaactccagcaaaattctggtgggccgctggcatctggctagtgaaaagggcagctatgagataattcaggacacagatgaagacaccgccgtgaacaactggttaattagtcctcaaaatgcgagcagggcctggggagagtctacccctctcgctaataaaccgggcaagcaaagcggccaccccaagttcccgcgggtgcggcataaatccttgcaggttcgtcaggacggaggaaaaagtaggttaaaaaaaagtcagtttcttattaagactaggaagaagaagaaagagaaacacacacatcatgcgccattgagccctaggaccttccatccactacgctccgaggcatataatacgttttctgaaagacgcttaaaacactctctcgtgctccacaagtctaacgagacgagtttgcccacagatctcaaccagacgttgccatcaatggacttcggttggatcgcctcgttacccgaccacaatcagaattcttccaacgacactggacaagcaagctgtccccccggcctataccagacagtgccccccgaggaacactatcaaaccttccctatccaggacccagatcagatgcattcaacgagcgatccaagccatcgctcttcctccccggagctaagtgagatgctggagtatgaccgaagccataagtcatttccaacggatattagccagatgtctcccagctccgaacacgaagtgtggcagaccgtcatctcgccagatttgagccaggttactctgagcccggagctgtcacaaaccaacctctcccccgacctatcacatactactctgtcaccagagctgattcaacgcaacctgtctcccgcattgggccaaatgcccattagcccggacctgtcccatacgacactttcccccgatctatcccacaccacgctctcactagacctgagtcagacgaatctttcccccgaactgagccagactaacctgagtccagcactcgggcagatgcctttgtcacccgacctgtcgcacactaccttgtctctggacttttcacagacaaatctgtctcctgagttgagccatatgaccctttcccctgagttgtcacagacgaatttgagccccgcgctgggtcagatgcccatcagtcccgatctcagccacaccaccctgagcctggacttttcccagaccaacctgagccctgagttatctcaaaccaacctgtcccccgcattaggtcagatgcccttgtctcccgatcctagccataccacgctgagtctggatttatcccagaccaaccttagcccggaactgtcccagaccaacctgagcccagatctcagcgagatgccgctgtttgccgaccttagtcagatccctctgacccctgacctggaccagatgactctgtctccggacctcggagagaccgatttgtcacccaatttcgggcagatgagccttagcccggatttatcccaggtgaccctgagccctgatatcagtgatactacacttcttcccgatctttctcagatatcccccccgccagacctcgatcaaatcttttatccgagcgaatcgtcacaatctctgctgctgcaggagttcaacgagagctttccctatccagatctcggacagatgcctagcccttcgtcaccaaccctcaatgacactttcttgagtaaagaattcaaccctctcgtcatcgtggggctaagtaaagacgggacagattacatcgagattatcccgaaagaggaagtccagagcagtgaggatgattatgcggaaatagactacgtgccgtacgacgacccctataagaccgacgtcagaaccaacattaacagtagtcgcgacccagataatatcgctgcatggtacttacgcagtaacaatggaaatcgccgcaactactatatcgctgccgaagagatatcctgggattatagcgagtttgtgcagcgcgaaactgatatcgaggatagcgacgacatccctgaagacaccacctacaagaaggtggtgttccgtaagtacctggacagcacattcaccaaaagagatccaaggggagaatatgaggagcatttaggaatcttgggtccgatcattagagctgaggtggatgatgtaattcaagtacggttcaaaaacctggcttcaaggccatattcactccacgcacatgggttgtcttatgagaaatcaagcgaggggaagacctatgaggacgacagccccgagtggtttaaagaggataacgctgttcagcctaatagcagctatacttacgtttggcacgccacagagaggtccggacccgagtctccaggatcggcatgtcgagcctgggcgtactacagtgctgtgaacccagaaaaggatatccatagcgggttgatcggcccgctcttgatctgtcagaaaggaattctacacaaggattccaatatgccaatggacatgcgggaattcgtgctgctgtttatgactttcgacgagaagaaatcatggtattatgagaaaaaaagcaggtcgtcctggcgcctgacatctagtgaaatgaaaaaatcccacgaattccatgccatcaacggcatgatctattctctgcctgggcttaagatgtacgaacaagaatgggtgagactccatctgcttaacattggcggatcccaagacatccacgtcgtgcactttcatggacagactctcctcgagaacggcaataagcagcaccagcttggagtgtggccattgcttcctggtagttttaagacattggagatgaaggccagcaagcctgggtggtggctcctgaacacagaagtgggggaaaaccagcgggccggaatgcagacccccttcctcataatggacagggactgcaggatgcccatggggctctcaactgggatcattagcgactcccaaataaaggcttcagaatttctgggttactgggaaccacgactcgctagattgaacaacggcggatcatataacgcctggtcagtggaaaagctggctgccgagttcgcatccaagccatggatccaggtggatatgcagaaagaggttattatcacagggatccaaacccagggggctaaacactacttgaaaagctgctatactaccgaattttatgtagcttattcctctaaccagatcaattggcagatctttaagggcaattcgacccgcaatgtcatgtattttaacgggaactcggatgccagtacgatcaaagagaatcagtttgaccctcctatcgtggccagatatatccgaatcagcccaacacgggcgtataatagaccaactctcaggctagagttgcagggttgcgaggttaacggttgctccactcccctagggatggagaacgggaaaatcgagaacaagcaaattaccgcgagcagcttcaaaaaatcctggtggggtgattactgggaacctttccgagcacgtctcaacgctcaagggagggtgaatgcgtggcaagccaaggctaacaacaataagcagtggcttgaaatcgatctgcttaagataaaaaaaatcaccgccatcataactcagggctgtaagagccttagcagcgagatgtacgtgaagagctataccatccactactctgaacagggcgtggaatggaaaccttacagactcaagagttctatggtggataagatctttgagggcaatactaacaccaagggccatgttaaaaacttcttcaaccccccaatcatcagccgcttcattcgcgtgatccccaagacctggaaccagtctattgctctgcgcctcgagctgtttgggtgtgatatttac

SEQ ID NO: 9019 - DNA, 6672 bp, synthetic construct
  misc_feature 1..6672: note = source = /note="Description of Artificial Sequence: Synthetic coding sequence"
  source 1..6672: mol_type = other DNA
atgttccctggatgcccgcggctgtgggtgcttgtggtgctgggcacctcctgggtgggatggggctcacaaggaactgaagcggctcagctgcgccaattctacgttgcagcccagggaatcagctggagctaccggccagaacctaccaattcatcccttaatctctcggtcaccagcttcaagaagatcgtgtaccgggaatacgaaccgtacttcaagaaggagaagccgcaatccactatctccggcctgctgggaccgactctttacgcagaagtcggcgacataatcaaagtacactttaagaacaaggccgacaagcctctgtcgattcatccgcaaggcatccgctattcgaagctcagcgagggtgcgtcgtatttggatcatactttccctgccgaaaagatggacgatgccgttgcgccgggccgcgaatacacctacgagtggtccatttcagaggacagcggtccaacgcacgacgacccgccttgccttactcatatctactactcccacgaaaacctgatcgaagatttcaatagcggtcttatcgggccacttttgatctgcaagaaaggaactctgactgagggcggaacgcagaaaactttcgacaagcaaatcgtcttgctgttcgcggtgtttgacgagtcaaaatcctggtcgcaatcatcgtcactgatgtacaccgtgaacggatacgtgaatggaaccatgcccgacatcacggtgtgcgcccacgaccatatctcctggcatctcctcgggatgtcaagcgggcctgagctgttctcaatccacttcaacggacaagtcttggagcagaatcatcacaaagtgtcggccattaccctggtgtccgcaacctcgaccactgcaaacatgacggtgggacccgagggaaagtggattatcagttcactcaccccaaagcacctgcaggctggcatgcaggcgtacatcgacatcaagaactgtccgaaaaagactcgaaacctgaagaaaatcacccgggaacagcgcagacacatgaaaaggtgggaatactttatcgcagctgaggaggtgatctgggactacgcaccggtaatcccggcgaacatggacaagaagtaccggagccaacacttggacaacttctccaatcagatcggaaagcactacaagaaagtcatgtatacccagtacgaggacgagtcctttaccaaacatactgtgaatcccaatatgaaggaggacggcatcctcggacccatcatcagagcccaggtgagggacacccttaagatcgtgttcaagaacatggcatcaagaccttattccatctatccacacggagtgaccttcagcccttacgaagatgaggtgaacagcagctttacttccggtcggaataacactatgatccgcgctgtccagccgggagaaacgtacacgtacaaatggaatattctggaattcgacgagcctaccgaaaatgatgctcaatgcctcacgcgcccctactacagcgatgtcgacataatgcgggatatcgcgagcggactgatcggattgctgctcatttgcaagtcgcgctcgctggatcggcgcgggatccagagagccgcagacatcgaacagcaagcagtctttgccgtgttcgatgagaacaagtcatggtatttggaggacaacatcaataagttttgcgaaaacccagacgaagtgaaacgcgacgatccgaagttctacgaatccaacatcatgtctaccatcaacgggtacgtgccggagtcgatcaccaccctggggttctgctttgacgataccgtgcagtggcatttttgctctgtcggaacccagaacgagatcctcaccatccacttcaccggccatagcttcatctacggcaagcgacacgaggacaccctgactctgtttccaatgcgcggggaatccgttaccgtgactatggacaatgtcggaacttggatgctgactagcatgaactcatctccgcgtagtaaaaagctgcgtttgaaattccgggatgtgaaatgcatcccagatgacgacgaagattcgtacgagatcttcgaaccgcccgagagcactgtgatggccactcggaagatgcacgatagactggaaccagaggatgaagagtcggacgcggactacgactaccagaacagattggcggccgctttgggaatccgaagtttccgaaacagcagcctgaaccaggaagaggaggaattcaacctcactgcgctcgctctggaaaatggcaccgaattcgtgtcgagcaacaccgatatcattgtgggctccaactacagctcgccttcgaacatctcgaaattcactgtcaataacctcgccgaaccccagaaagccccctcgcatcagcaggccaccaccgccgggtccccattgcggcacctgatcgggaaaaactccgtgctcaatagctcaactgctgaacactccagtccctactccgaagatccgattgaagatccgctgcagcctgatgtcactggcatccggctcctttcgctgggagcaggagagttcaaatcccaggaacatgcgaaacataagggacctaaggtggaacgcgaccaggccgcgaagcataggttttcctggatgaagctgctggcccacaaggtcggacgacatctgtcgcaagacacgggctccccgagtgggatgcggccatgggaagatttgccatcgcaggatactggatcaccgtcgagaatgcggccgtggaaggacccaccttctgacctgctcctcctcaagcagtctaactcgagcaagattctggtgggacggtggcatctggcgtcggaaaagggttcatacgaaatcatccaagacactgacgaggacaccgccgtgaacaattggctcatctcgccgcagaacgcgtcccgcgcgtggggcgaatcgaccccgcttgccaacaagccgggtaagcaatcaggccaccccaaattcccgcgcgtgcgccataagtcacttcaggttcgccaagatgggggtaagtcgaggctgaaaaagtcacagttcctcattaagacccgcaagaagaaaaaggagaagcacacccaccacgctccacttagtccgcggaccttccatcccctgcgctcagaagcctacaatactttcagcgagcggcgattgaaacactccctggtgctgcacaagtccaacgagacttcgctccctaccgacctgaaccaaaccctgccttcgatggattttggatggatcgcctccctccctgaccataaccagaattcctcaaatgatactggacaggcttcctgcccacctggactgtaccaaaccgtgccacctgaggagcattaccagacgttccctatccaagatcccgaccagatgcattctacctccgaccctagccaccgctcgtcgtcgcctgaactttcggagatgctggagtacgatagatcgcacaagagcttcccgacggacatctcacagatgtccccatcctcagagcacgaagtgtggcaaaccgttatctcgccggatctgtcccaggtgactctcagcccggagctctcccagaccaatctgagtccggacctgtcacacactactctgtctccagaactcattcagaggaacctctctccagcactcggacagatgcccatctcaccggacctgagccataccacgctctccccagatctctctcacaccaccctctctctcgacctctcgcagaccaacctgagtccggaactttcacaaaccaatctgtcgcctgctctgggccaaatgccactgtctccggatctctcgcacactaccctctcgctggacttttcccaaaccaatctttcaccggaactgagccatatgaccctttcaccggagttgtcccagactaacctgtctccagccctcgggcaaatgccaatcagcccggacctgtcccacaccaccctgtcgctggacttcagtcagactaacctttcacctgaactgtcacaaactaacctgtcaccggcgttgggacagatgccgcttagcccggacccctcgcataccaccctgtccctggacttgtcgcagacgaatctctcacccgagctgagccagactaatctgtcacctgacttgagcgagatgcctttgttcgccgatctgagccagatcccattgaccccagacctcgaccagatgacgctgagccccgaccttggtgaaaccgacctctccccgaacttcggacagatgagcctgtcgccggatttgtctcaagtgaccctctcgccagacatctccgacactaccctgttgccagatctctcgcaaatctcaccaccccccgacttggaccagatcttctaccccagcgagtcgtcacaaagcctgctgttgcaagagtttaacgagtcattcccctacccagacctgggccagatgccatcgccgtcatcgccgacgctgaacgatacttttctgtcgaaggagttcaatccgctggtgatcgtgggattgtccaaagacggaactgactacatcgagatcatccctaaggaagaggtgcaaagcagtgaagatgattacgccgaaatcgactacgtgccctacgatgacccgtacaaaactgacgtccgcactaacatcaactcgtcacgcgacccagataacatcgccgcatggtacttgcgcagcaataatggaaatcgcaggaactattacatcgcggccgaagaaatcagctgggattactcggaattcgtgcagcgggaaaccgacatcgaggactcggatgacataccggaggataccacttacaaaaaggtcgtattcaggaagtacctggattcgacgttcactaagcgggatccgaggggagaatacgaagagcacctgggaatcctgggcccgatcatcagagcagaagtggacgacgtgattcaggtgcggtttaagaacctcgcctcaagaccatactcccttcacgcacatgggctcagctacgaaaagagcagcgaaggaaagacctacgaggatgactcgccggagtggttcaaggaagataacgccgtccagccgaactcgagctacacttacgtctggcacgctactgaacggtcgggaccagaatcaccgggaagcgcttgtagagcgtgggcatactactccgctgtgaatccggaaaaggacattcactcgggactgatcggtccgctccttatctgccagaaaggaatcctccataaggattcgaatatgccaatggacatgagagaattcgtccttctcttcatgactttcgatgaaaagaaatcatggtactacgagaagaagtcgcgcagcagctggcgcctgacctcctccgaaatgaagaagtcacacgagttccacgcaattaacggtatgatctactcactgccaggtctgaagatgtacgaacaagagtgggtcaggttgcatctgctgaatatcggcggttcacaagatattcacgtcgtgcacttccatggacagactctcttggaaaacgggaataaacaacaccaactcggagtctggccgctcctgccgggtagcttcaagactcttgaaatgaaggcgagcaagcccggctggtggctcctcaacactgaggtgggagaaaatcagcgggccggaatgcagacgcctttcttgattatggatcgcgactgtcggatgccaatgggcttgtcaactggaattatctctgacagtcagatcaaggcttcggaatttctgggttactgggaaccgcgcctggcccgcctcaacaatgggggctcgtataacgcctggagcgtggagaaactggccgcggaattcgcctccaaaccgtggatccaagtggatatgcaaaaggaggtgatcatcaccggcatccagactcagggagccaagcactatctgaagtcgtgttacaccactgaattctatgtcgcatacagctccaaccaaatcaattggcagattttcaaagggaactccactagaaacgtgatgtacttcaatggaaactcggatgcgtcgacgatcaaagaaaatcaatttgatccaccgatcgttgctagatacatcagaatctcgccgacccgggcctataaccgtccgaccctgaggttggagctccagggctgtgaagtgaatggctgttcgaccccactgggaatggagaatgggaagatagaaaacaaacaaattactgcatcctcgtttaagaagagctggtggggggactactgggagcctttcagggcaagactgaatgcgcaaggacgcgtgaacgcttggcaggccaaagccaacaataacaagcagtggctggagatcgacctgctgaagatcaagaagattactgctatcattactcagggttgcaagtctctgtcatccgagatgtacgtgaagagttacactattcattactccgagcagggagtcgaatggaaaccttaccggctgaaaagctccatggtcgataagatcttcgagggcaacaccaacacgaaaggccacgtgaagaactttttcaacccgcctatcatttccagattcatacgcgtcatccctaagacctggaaccagtccatcgcgctgcgcctggaactgtttggttgcgacatctac

SEQ ID NO: 9020 - DNA, 6672 bp, synthetic construct
  misc_feature 1..6672: note = source = /note="Description of Artificial Sequence: Synthetic coding sequence"
  source 1..6672: mol_type = other DNA
atgtttcctggttgcccgcgcctctgggtcttggtcgtgctcggaacttcctgggtgggatggggatcccagggaaccgaggcagctcaactgagacaattctacgtggcggctcaaggcatctcatggagctaccggcctgagccgactaattcttcgctgaacctctccgtgacctcattcaagaagatcgtctaccgtgaatacgagccatacttcaagaaagaaaaaccacaatcgaccatctcgggcctcctgggcccaaccttgtacgccgaggtgggagacatcatcaaagttcactttaagaataaggcagacaagcctctctccatccatccacagggaatcaggtactctaagctgtcagaaggagcttcatacctggaccataccttcccagccgagaagatggacgatgcggtcgcccctggcagggagtacacttatgaatggtcgatctcggaagattcagggcctactcacgatgacccgccttgtctgactcacatctattactcacacgagaatctgatcgaagatttcaacagcggactgatcggtccactcctgatttgtaagaagggaactctgaccgaagggggaacccaaaagactttcgataagcagattgtcttgctgtttgctgttttcgatgaatcaaagagctggagccaatcgagctcgctcatgtacaccgtgaacggctacgtcaacggcacgatgccggacatcactgtctgcgcccatgatcacatctcatggcacctgctgggaatgtcgtcgggaccggaactcttctccatccacttcaatgggcaggtgctggagcaaaatcaccacaaagtgagcgctatcaccctcgtgtcggctacttccaccactgcgaacatgaccgtcggaccagaaggcaaatggatcatctcctccctgaccccgaaacacttgcaggcaggtatgcaggcctacattgatatcaagaactgccccaaaaagaccagaaatctgaagaagattaccagggaacaacgccggcacatgaaacgctgggaatacttcatagctgcagaggaggtcatctgggattacgctccggtgatcccagcaaacatggacaaaaagtaccggtcgcagcacctggacaatttctctaaccaaatcggtaagcactataagaaagttatgtacacccagtacgaggacgaatcctttactaaacataccgtgaatcctaacatgaaggaagatggaattctggggcccattattcgagcccaggtccgggacactttgaaaattgttttcaaaaacatggcctccaggccgtactcaatctacccgcacggggtgaccttcagcccatacgaagatgaggtcaacagctctttcacctccgggaggaacaacactatgatccgcgccgtgcagccgggcgagacttacacttacaagtggaatatcctggaattcgacgaaccgaccgaaaacgacgcgcagtgccttacgcgtccttactactcggatgtggacattatgcgcgatatcgcctcaggcctcatcggtctgctcctgatatgcaagagccggtccctcgaccgccggggaatccagagagcagctgacattgaacaacaagctgtctttgcagtgttcgacgaaaacaagagctggtacctcgaggacaacatcaacaagttctgcgaaaacccggatgaggtgaaaagggacgaccccaagttctacgagtccaatatcatgtcgacgatcaatggatacgtgcccgagtccatcaccaccctgggtttttgcttcgacgacactgtgcagtggcatttctgctccgtcggaactcagaacgaaatcctgaccatccattttaccggacattcctttatctacggcaagagacacgaagataccctcactctgttcccgatgcgcggagaatcagtcaccgtgaccatggacaatgttggaacttggatgctgacttccatgaactcgtccccccggtccaaaaagctccggctcaaattccgggacgtgaagtgcataccagacgatgacgaagattcgtatgagatcttcgaaccccctgagtcaaccgtgatggccacgcgcaagatgcacgacagactcgagccggaggatgaggagtcagatgctgactacgactaccagaatagactcgctgcagcactgggaatccggtcttttaggaacagctccttgaatcaggaggaagaggaattcaatctgactgcgctggccctggagaatggtaccgagttcgtgtcgtcaaacaccgacatcatcgtcggcagcaactacagctcccccagcaacatttcgaaattcactgtgaacaatctggcagagcctcagaaggccccatcccatcaacaagccaccacggccggctcaccactgcggcacctgatcggaaagaattcggtcctgaattcgtcgactgccgagcactcctccccatattccgaggatccgatcgaagatcctctccagcccgacgtgacggggatcagactgctgtcgcttggcgccggcgagttcaagtcgcaggaacacgccaaacacaagggcccaaaggtggagcgcgaccaggctgccaagcatagattcagctggatgaaactgcttgcccacaaggtgggacgacatctctctcaagacactggatccccgtcaggaatgcgcccgtgggaagatctgcccagccaggacactggaagcccttccagaatgcggccgtggaaggaccccccgagcgacttgttgctccttaagcagagcaattccagcaagatcctggtgggtcggtggcatctggcttcagaaaagggttcatacgaaatcatccaggacactgacgaagataccgcagtgaacaattggcttatctcaccgcagaacgcctccagagcctggggagagtcgacccctctggcgaacaaaccggggaaacagtccggccaccctaagtttcccagagtgcggcacaagtcgctgcaagtccgccaagatggaggcaagtccaggctcaaaaagtcgcagttcctgatcaaaactcggaagaagaaaaaggaaaagcacacccatcacgcgcccctgtccccacgtacctttcatccactcagatcggaggcttataacaccttttccgagcgccgcttgaagcactccctggtcctgcacaagagcaacgagacttcgctccctacggacctgaaccaaacgttgccgagcatggacttcggatggatcgcttcgctgcccgaccacaaccaaaacagcagcaacgacaccggccaggcatcctgtcccccagggctgtaccagacggtcccgccagaggaacattaccaaaccttcccgatccaggatccggatcaaatgcactcgacttccgacccatcacataggagctctagcccagaactcagtgaaatgctcgagtacgacagatcccataaatccttcccgaccgatatctcacaaatgtcaccatcatccgaacacgaggtctggcagaccgtaatctcgccagatctgtcgcaggtgaccctctcccctgaactcagccagacgaatctgtcaccagacctctcacacaccactctctccccggaactgatccaacgcaacttgtcccctgccctgggacagatgcctatttcgccggatttgtcgcacactactctctcgcccgatttgtcccacacgactctttcgctggaccttagtcaaactaatctgtcgccggagctgtcccagactaacctgtctcctgccctggggcagatgccgctttcaccagatctgtcccatactaccctttcgttggacttctcgcagactaatctcagcccagaactttcgcacatgactctctcaccggaactgtcgcagaccaaccttagtcccgccctgggccagatgccgatcagccctgatctgagccatactactttgtcgctggacttttcgcaaacgaatctgtcccctgagctgtcgcagacgaacctgtccccggcactcgggcagatgcccctgagccccgatccgtcccacactacgctctccttggacctgtcacagaccaatctgtcgcctgaactctcgcagaccaatttgtcaccggacctgtcagaaatgccgctgttcgccgatctctcccagatcccactcacgccggatctggatcaaatgaccctgtcccccgatctgggtgaaacggacctgagcccgaattttggacagatgagcctgtcgccagacctcagccaggtgaccctgtcaccggatatcagcgacacgactctcctgccggacctctctcagatctcaccgccgcccgatctggatcagatcttctacccttcagagagctcgcagtcactgctcctgcaagagttcaatgaatcgttcccataccctgaccttggacagatgccctccccgtcaagcccgaccctcaacgacacctttctttcaaaggagtttaatccgctggtcatcgtggggctctccaaggatggcactgactatatcgagataatccctaaggaagaagtgcaaagctccgaggatgattatgctgagatcgactacgtgccctatgacgacccctacaagactgatgtgcgcaccaatatcaattcatcgagggaccctgataacattgccgcatggtacctgcgctcgaacaacggaaaccgcagaaattactacatcgccgcagaagaaatctcatgggattactcggaattcgtgcagagggaaactgatatcgaggactcggatgatatccctgaggacacgacctacaaaaaagtggtgtttcgcaaatacttggacagcaccttcacgaagcgcgatccacggggagaatatgaagagcatctcggtatcttgggaccgatcattagagcagaagtggacgatgtcattcaagtccgcttcaagaacctcgcttccagaccgtacagccttcatgctcacggactgagctacgaaaaatcatccgagggaaagacttacgaggatgactccccagaatggtttaaggaggacaacgcggtgcagccaaatagctcgtacacctacgtatggcacgccactgagcggtctggcccagagtcacctggaagcgcgtgtagggcttgggcgtactactccgcggtgaacccagaaaaggacatccatagcgggctcattggaccactcctcatttgtcaaaagggaatcctgcacaaagacagcaatatgcctatggacatgcgggaattcgtgctcctcttcatgacttttgatgagaagaaatcgtggtactacgaaaagaagagccgcagctcgtggcgcctcactagctcagaaatgaaaaagtcacatgaattccacgccattaacggaatgatctactcgttgccaggactcaagatgtacgaacaagagtgggtgcgactgcatctgctgaacattggcggttcacaggatattcatgtcgtgcacttccacggacaaaccttgctcgagaacggtaacaagcagcatcagctcggagtgtggcctctgttgccgggatccttcaaaaccctcgagatgaaggcgtctaagcctggatggtggttgcttaataccgaggttggagaaaatcaaagggccggcatgcagactccgtttctcattatggacagggactgcagaatgcccatgggattgtcgaccgggataatctcggactcccagatcaaggcgtccgagttcctcgggtactgggaaccacgtcttgcccgcctgaacaacggtggctcatacaatgcctggtcagtggagaagctcgccgccgagttcgcgtctaaaccatggatccaagtggacatgcaaaaggaggtgatcatcaccggaatccaaactcaaggcgcaaaacactatctcaaaagctgttacactactgagttctacgtggcctacagctcaaatcagataaactggcaaatcttcaagggaaattcgaccaggaacgtgatgtacttcaatggaaatagcgacgcgtccacgatcaaggaaaaccagttcgatcctccgatcgtcgccaggtacatccggatctcccccacccgggcttacaaccgtcctaccctcagactggaactgcaagggtgcgaggtgaatgggtgcagcactccattgggtatggaaaacggcaagatcgagaacaagcagatcactgcctcatcgttcaaaaagtcatggtggggagactactgggaaccgtttagagcccggctcaacgcccaggggcgcgtcaacgcatggcaggccaaagccaacaacaataagcagtggctggaaatcgacctgctcaagatcaaaaagataaccgccatcattactcagggatgcaagtcgctgtcatcagagatgtacgttaagtcctacactattcattacagtgaacagggcgtggaatggaaaccgtacaggcttaaatcatcaatggtcgataagatctttgaaggaaataccaacaccaagggccacgtgaagaatttctttaacccgccaatcatctcgcggtttatcagggtgattccaaaaacctggaaccagtccatcgctctccgcctggaactgttcgggtgcgatatctac

SEQ ID NO: 9021 - DNA, 6672 bp, synthetic construct
  misc_feature 1..6672: note = source = /note="Description of Artificial Sequence: Synthetic coding sequence"
  source 1..6672: mol_type = other DNA
atgttcccgggctgccctaggctgtgggtgctcgtggtcctgggtacgtcctgggttggctggggttcacaggggaccgaagcagcacagcttagacagttttacgtagccgcacagggaatttcatggtcataccgcccggagcctacgaacagctcccttaacctcagcgtcacttcctttaagaagattgtgtacagagaatacgaaccttacttcaagaaagaaaagccacagtcgaccatctcggggttgctcgggcctaccctttatgctgaagtgggcgacatcattaaggtgcactttaagaataaggctgacaaacctctttcgattcatcctcaaggaatcaggtactcaaaactttcggaaggagcatcctaccttgaccatacctttcctgcagagaagatggatgacgccgtggccccgggtcgagaatacacctacgaatggtccatctccgaagatagcggccccacccatgacgaccctccatgtctgactcatatctactactcccatgagaacctcatagaagatttcaactcaggtcttatcggccctctcctgatttgtaagaaaggtaccttgaccgaaggtggaactcaaaagacgtttgacaagcagatcgtcctgcttttcgccgtgttcgacgaatcgaagtcgtggagccaatcctcgtcacttatgtacaccgtgaatggctacgtgaatggaactatgccagatatcactgtgtgtgctcatgatcatatttcgtggcatctgcttgggatgtcgtcgggaccagagcttttttccattcatttcaatggacaagtgctggaacagaaccatcacaaagtgtcagctattacgcttgtttcagctactagcaccactgccaacatgactgtgggacccgaagggaaatggatcattagtagcctgaccccaaaacacttgcaagccggtatgcaagcatacattgacattaagaattgtcccaaaaagactagaaatctcaagaaaatcactagagaacaacggcgccacatgaagaggtgggaatactttattgcagccgaagaggttatttgggactacgcaccagtgattcctgccaatatggataagaagtaccggagtcaacatttggacaacttttcaaaccaaattggaaagcattacaaaaaggtgatgtacacgcaatacgaggacgaatcgtttactaagcacaccgtgaatccgaacatgaaggaagatggtatactgggtccgataatcagagcacaagtgagggacaccctgaagattgtctttaagaatatggcaagcagaccctacagcatttacccgcatggagtcaccttctccccatacgaggatgaagtcaactcgtcgtttacctcgggacgaaataacacgatgattcgggcggtgcaacccggtgaaacgtacacttacaaatggaatatactggagtttgacgaaccaaccgagaatgatgcacaatgtctcaccaggccctattactcggatgtcgatatcatgcgggacattgcgtccggtctgataggacttcttcttatttgcaagtcccgctcacttgatcgacgtggtattcagagagcagcagacattgagcaacaggcagtgtttgccgtgtttgacgagaacaagtcgtggtacttggaggataacatcaataagttttgtgaaaacccagatgaggtcaagcgggatgatcccaagttttacgaatccaacataatgtccactatcaatggttacgtgcctgaatccataacgaccttgggtttttgttttgatgatactgtgcaatggcatttttgcagcgtgggaacccagaatgagatactgaccattcattttactggtcactccttcatttatggaaagagacatgaggacactctgactctctttcccatgcgtggagaaagcgtgaccgtgactatggataatgtcggaacctggatgcttacttcgatgaactcatcgccgcgcagcaaaaagctgcgattgaagttcagggacgtgaagtgcatcccggacgacgacgaggattcctacgagatctttgagccccccgaatcgaccgtcatggcgactcgcaagatgcacgaccgtcttgaacctgaggatgaagaatcagatgctgactacgattatcaaaacagactggctgcagcgttgggaatccgctcgtttagaaactcgtccctgaaccaagaagaggaagagtttaaccttacggctcttgcactggaaaacggaacggaatttgtcagttccaacaccgacataatagtcggaagcaactactcatcgccatccaacatcagcaaattcactgtgaacaacctggccgagccgcagaaagcaccttcgcatcaacaggccaccaccgccggatcacccctgagacaccttatcgggaagaattctgtgcttaactcttcgaccgcagaacattcgagcccctactcggaggatcccatcgaagatcctctgcaaccggatgtgactgggatccggctgctgtcgcttggagcaggcgaattcaagagccaagaacatgccaagcataaggggcctaaggtggagagagatcaagcagcaaaacacagattttcgtggatgaagctgctggcccataaggtcggtagacatctttcgcaggacactggttcaccatcgggcatgcgaccttgggaggatctcccttcccaggacaccggcagcccctcgagaatgcgcccttggaaggatcctcctagcgatcttctgctgttgaagcagagtaattcctcgaagatccttgtgggtcggtggcatcttgcaagcgaaaagggttcctacgaaatcattcaagatactgatgaagataccgcagtcaataactggctgatctcacctcaaaacgcaagccgcgcctggggagaatccactcccctggcgaataaacctggaaaacaatccggacatccgaagttcccaagagtgaggcataagtccctccaagtcaggcaggacggaggtaagtcacgactgaaaaagtctcagtttctgataaagaccagaaagaaaaagaaagaaaaacatacgcatcacgcgccattgtcccccagaacttttcatcccctgcgctccgaggcatacaatacttttagcgaacgtaggttgaagcacagcctggtgctccataagtcgaacgagacttccctccctaccgacctgaaccagaccctgccatcaatggactttggttggattgcctccctgccagatcataaccagaactcctccaacgatactgggcaagcatcatgtccacccgggctgtaccagaccgtgcctcccgaagagcattaccaaaccttcccaattcaggatccggaccaaatgcattccacctcggacccatctcatcgctcatcctccccagaacttagtgaaatgctggaatacgatcgctcgcataagtcttttccaaccgatatttcacaaatgtcgccttcgtccgagcatgaagtttggcaaaccgtgatatcgccggatctctcccaggtcacgctgagccctgagctctcccagactaatcttagcccggacctctctcacaccaccttgtcgcctgagctcatccaaaggaacctgagcccagcgctcggtcaaatgccaatctcacccgatctgtcgcacacgactttgagcccggacctttcccacacgaccctcagtctggacttgtcgcagaccaatctgtcaccggaactgtcgcagactaacctgtcgccagcactgggacagatgcctctttctcccgatctgtcacacaccactttgtcgcttgatttctcgcaaaccaatctctccccagagctttcacatatgacgctttcacctgagctttcgcaaacgaacctttcacccgccctcggccaaatgcctatatcgccagacttgtcgcacactaccctgtccctggatttctcccaaactaatctcagtcccgagctttcacagacgaacctcagccctgcactgggtcaaatgccgctttcgccagatccgagccatactactttgtccctggacctgtcacagaccaatctttcaccagaactgtcccaaaccaacctttcgccggacctttcggagatgccacttttcgcggacctgagccaaattcctctgacgcctgatctcgatcagatgaccctctccccagatcttggtgaaactgacttgtcgcctaatttcggacaaatgtcccttagccctgacctttcccaagtgactctctcacctgatatttcagataccaccctcctgccagacctctcgcagatttcgccgcctccggatctggaccaaatcttttacccaagcgagtcatcacagtcgctgctgctccaagagtttaatgagagcttcccctaccctgaccttggacagatgccctcgcccagctcgcctacgctgaacgatacctttctctcgaaagaattcaatcctctggtgatcgtcggtctgtccaaggacggaacggattacatagagattattcctaaggaagaagtgcagtcgtccgaagatgattacgcggaaattgattacgtgccatacgacgatccttacaagacggatgtgagaactaacatcaactcctccagagatcccgacaatatcgcagcgtggtatcttaggtccaacaacggaaataggagaaactactacatagccgccgaggaaatcagctgggattactctgaattcgtgcagagagagactgatatcgaagattcggatgacatcccggaagatacgacttataagaaggtggtctttcgtaaatacctggattccacgtttactaagagagatcctagaggggaatacgaagaacacctcggcattcttggcccaattatcagggcagaagtggacgacgtgattcaagtgagatttaagaacctggcatcccggccttactctcttcatgcccatggccttagctatgaaaaaagctcagaagggaaaacctacgaagatgatagcccagagtggttcaaggaagataacgctgtgcaacctaatagctcctacacctatgtgtggcatgcgactgaacgatcggggccagagtcaccgggttcggcatgtagggcatgggcatactactcagcagtcaacccagaaaaggatattcattcagggttgattggaccactgcttatttgtcaaaagggaatattgcataaggatagcaacatgccaatggacatgagggaattcgtgttgctgttcatgactttcgacgaaaagaagtcatggtactacgaaaagaaaagccgatcttcctggcgcctgacttcatccgaaatgaagaagtcacatgaattccatgccattaacgggatgatctactcactccctggactgaagatgtacgagcaggaatgggtccggcttcatcttcttaacattggcggtagccaagatattcatgtcgttcattttcacggacagaccctgcttgagaatggcaacaagcagcatcaactcggagtctggcccctgctgcctggtagttttaagaccctcgaaatgaaggcatccaaacctggatggtggttgctcaacaccgaggtaggagagaaccaacgtgcaggtatgcagacgccattcctgattatggatcgagattgtcggatgccaatgggcctgtcgaccggaatcatatccgatagccagattaaggcatccgagtttcttgggtactgggagcctcgactcgcacgccttaacaacggtgggagctacaacgcatggtccgtggagaagttggcagcggaatttgcatcgaaaccatggatccaggtggatatgcagaaggaggtgattatcactgggattcagactcaaggagctaaacattacctcaagtcctgttacactactgaattctacgttgcatactcatccaaccagatcaattggcagattttcaagggcaactccactcgcaatgtcatgtactttaacggcaatagcgatgcctcgaccattaaggaaaatcaatttgatccacctattgtcgcccggtacattcgtatttcgcctaccagggcttacaaccgtcctactttgaggcttgaactgcaggggtgcgaagtcaacggatgctcgaccccccttgggatggaaaacggcaagattgaaaacaagcaaattactgcctcgtcgttcaagaaaagctggtggggggattattgggaacccttcagggcaagactgaacgcacaaggcagagtgaatgcctggcaggcgaaggctaacaataacaagcaatggcttgagattgatctgctgaagattaagaagatcaccgcaattatcacccagggttgcaagtcactgtcctcggagatgtatgtgaagtcttacactattcattattcggaacaaggagttgaatggaaaccttacagactcaagtcatcaatggtcgataagattttcgaaggcaacaccaacaccaagggacacgtcaagaactttttcaatccacccatcatttcaagattcatcagggtgattcctaagacttggaatcagtcgattgcactgcgcctcgagctgtttggatgcgacatctac

SEQ ID NO: 9022 - DNA, 6672 bp, synthetic construct
  misc_feature 1..6672: note = source = /note="Description of Artificial Sequence: Synthetic coding sequence"
  source 1..6672: mol_type = other DNA
atgttccccggatgtccgcgcctctgggtgctcgtggtgctggggactagctgggtgggctggggaagccagggcaccgaggccgcgcagcttagacagttttacgtcgcggcacaagggatctcatggtcgtatagaccggaacctaccaactctagcttgaacctgtcagtgacgtcgttcaagaagatcgtgtaccgcgaatacgaaccgtacttcaagaaagagaagcctcagtccaccatctcgggcctgctggggcctaccctctacgccgaagtcggagacatcatcaaggtgcatttcaagaacaaagcagataagccgctgtccatccacccacagggcatccggtacagcaaactttcggaaggggcctcgtacctcgatcatactttcccggcggaaaaaatggacgacgcagtggcgccgggacgggaatatacgtacgagtggtcaatctcggaggactcaggcccgactcacgacgaccccccatgcctcactcatatctactactcccatgagaatctgattgaggatttcaactccggcctcatcggcccgcttctcatctgcaaaaagggaacccttactgaaggaggcactcaaaagacctttgataagcaaatcgtcctgctcttcgctgtgttcgacgagtcgaaatcctggagccagtcgtcctccctcatgtacaccgtcaatggatacgtgaatggaaccatgccggatattacggtgtgcgcccacgaccacatttcatggcacctgttgggtatgtcgagcggaccggagctgttctccatccacttcaacgggcaagtgctggagcagaaccatcacaaggtgtccgcaatcactctcgtctcagcgactagcaccactgcgaatatgactgtcggaccagaaggaaagtggattatctcgtccctgaccccgaagcatctgcaagccggcatgcaagcctacatcgacatcaagaactgcccgaagaaaactcgcaacctgaagaagatcacccgggagcagcgccgacacatgaagcggtgggaatacttcattgccgccgaagaagtgatttgggattacgcgccagtgatccccgctaatatggacaaaaagtacagaagccagcatctggacaacttcagcaatcagatcgggaaacactacaagaaggttatgtacactcagtatgaagatgagtcgttcactaagcacactgtcaatccaaatatgaaagaggatggcattctgggcccgattattcgcgcgcaggtgcgcgataccctcaagattgtgttcaaaaacatggcgtcacgcccgtactcgatctatccacatggagtgactttctcaccgtacgaggacgaagtcaacagttccttcaccagcgggcgcaataacactatgatcagagctgtgcaaccgggtgaaacttatacctacaagtggaatatcctggaattcgatgaaccaaccgagaatgatgcgcagtgcctgactcgcccttactactcagatgtggacatcatgcgggacatcgcctcaggactcatcggactgctgctgatctgcaaatcgcgcagtctggaccggcgcggaatccaacgcgcagccgatatcgaacagcaggcagtgtttgctgtctttgatgagaacaagtcgtggtacttggaagataacattaacaagttctgtgaaaacccagatgaggtaaaaagggatgaccccaagttctacgaatcaaacatcatgtctactatcaacggttacgtcccggagtccatcaccaccctgggtttttgtttcgatgatacggtgcagtggcatttctgctcggtgggaacccagaatgaaatcctgactatccactttaccggtcactcgttcatctacggcaagagacatgaagatactctgacccttttcccgatgcggggcgagtccgtcaccgtgactatggacaacgtgggtacctggatgctcactagcatgaatagctccccaaggtccaagaagctcagactgaagtttcgcgacgtgaagtgcatcccggatgacgatgaagatagctacgaaatttttgaaccgccggagtcgaccgtcatggccactagaaaaatgcacgaccgccttgagcctgaggatgaagaatcagacgcggactacgactaccaaaacaggctggcagccgctttgggtatccgtagcttccggaattcctccctgaatcaggaagaggaagagttcaatctcaccgccctcgctttggaaaatgggaccgagttcgtgagctcgaatactgacatcatcgtgggatcgaattactcatcaccaagcaatatctcgaagtttaccgtcaacaacttggccgaaccgcagaaagccccgtcgcaccaacaagcaactaccgcaggctccccgctgagacatcttatcggaaagaactcggtgctgaacagcagcaccgcggagcattcctctccgtattcggaggacccaatcgaagatcctctgcagccggacgtgactggcattcggctcctgagcttgggggctggcgagtttaagagccaggaacacgctaagcacaagggccctaaggtcgaacgggaccaggcagccaagcatagattcagctggatgaagctgttggcgcacaaagtgggacggcatctctcacaggacaccggatccccgagcggaatgcgtccgtgggaggacctgccatcccaggacactggttcgccgagcaggatgcggccgtggaaggacccgccttccgacctcctcctgctgaagcagtcaaattccagcaagatcctggtcggacgctggcacctggcttcggagaagggatcgtacgagatcattcaagatacggacgaagatactgcagtcaacaattggctgatctccccgcagaacgcctcaagagcctggggagaatcgactccattggctaacaagcctggaaagcaaagcgggcaccctaaatttccgagggtgaggcacaagtccctgcaggttcgccaggacggcggaaagtcgcggctgaaaaagagtcaatttcttattaagacccgcaagaagaagaaggaaaaacacacccatcacgccccactgtcgccgcgcacttttcacccgctgcggtcggaagcctacaacaccttcagcgaacgccggctgaagcactctctggtgctccataaatcaaacgaaacttccctgccaactgatttgaaccagactctcccctcgatggacttcggatggatcgcatccctgccagaccacaaccagaactcatcaaatgacactggccaagccagctgtccacccggactgtaccaaaccgttccaccagaagagcattatcagaccttccctatccaggaccctgaccagatgcactcgacctccgatccgagtcacaggtcgtcatcccctgaactgtccgaaatgctggagtacgaccggagccacaaatcgttcccgaccgacatcagccaaatgtcgccctcgtcggagcacgaggtttggcagaccgtgatctcgccagacctgagccaggtgacgctgtcgccagagctgtcccagaccaaccttagcccggacttgagccacaccaccctttcacccgagctcatccagcgaaatctgtcacctgccctggggcaaatgcctatcagccctgatctcagccacacgaccctgtcgcccgacctgtcccacactacgctttcgctcgatctgtcacagacgaacttgtcaccggaactgtctcagactaatctcagcccggctctgggccaaatgccgctgtctcctgatctgtcgcataccactctttcactggacttctcccagactaacttgagcccggagttgtcgcatatgacgctttcccctgagctctcacagactaacctctcgcctgcccttggtcagatgcctatatctccagacctgtcacataccaccctgtcattggactttagtcaaaccaacctgtctccagaactgagccagaccaatctcagtccggcactgggacaaatgcctctgtccccagatcctagccatactaccctctcgttggatctctctcaaacgaacctctccccagaattgagccaaacgaatctctcacccgatctctcggagatgcccctgttcgcggacctttcacagatccccctgactccggacctcgaccaaatgacgcttagccctgacctgggggaaacggatctttcgcctaacttcggccagatgagcctgtccccggacctctcccaggtgaccctttccccagacatcagcgataccacgctcctcccagacctctcacaaatcagcccgccgcccgatctggatcagatcttctacccgagcgaatccagccaaagcctgctgctccaagaattcaacgaatctttcccataccctgaccttggccagatgccttccccctcatcaccgacgctgaatgataccttcctctcgaaagagtttaacccgctcgtgatcgtgggcctgtccaaagacggaactgactacattgagatcatcccaaaagaggaagtccaaagctccgaagatgattatgctgaaatcgactacgtcccttatgatgatccatacaagaccgacgtgcgaaccaatatcaacagctcccgggacccggacaatatcgcagcctggtacctccgctccaacaatggaaacaggcgcaactactacatcgcagccgaggaaatctcctgggactactcggagtttgtgcaacgcgagactgacatcgaggactccgatgacatcccagaggataccacttataaaaaggtggtgtttcggaagtacctggactccacgttcaccaaaagagatccgcgcggtgagtacgaagaacacctggggatcctcggccctatcatccgggcggaagtggacgacgtgatccaagttaggtttaagaacctggcctcgcgcccatactcactgcacgctcatggactgtcgtacgaaaagtcctcggagggtaaaacttacgaagatgactccccagagtggtttaaggaggataacgccgtgcagccgaattctagctacacttacgtctggcacgcgaccgaaagatcaggccccgaatcgccgggatcggcctgtagggcgtgggcctactactctgcggtgaacccggagaaggatatccattccggacttattgggcccctgttgatctgccagaagggaatcctgcacaaggattcgaacatgccaatggatatgagagaattcgtgttgctgttcatgaccttcgatgaaaagaaatcatggtactacgagaagaaaagtcggtcgtcatggcggctgacctccagcgagatgaagaaatcgcacgagttccatgccatcaatggaatgatctactcacttcccggcctgaagatgtacgagcaggagtgggtgagacttcacctgttgaacatcggaggatcacaagacatccatgtggtccatttccacgggcagaccctcctcgaaaacggaaacaaacagcaccagctcggagtctggcccttgctccccggatccttcaaaactctggaaatgaaggcgtccaagccaggctggtggctgctgaacactgaagtgggagaaaaccagagagccggaatgcagaccccgttcctcattatggacagggactgccgcatgccgatgggtctgtctactggaatcatctcggactcgcagatcaaggcttcagaatttctcgggtactgggaacctcgcctggctcggctgaacaacggagggtcctacaacgcgtggtcagtggaaaagctggcggcagagttcgcgtcgaagccctggatccaagtcgacatgcaaaaggaagtgattatcactggaatccaaacccaaggagcaaagcactacctcaaaagttgctacaccactgaattctacgtcgcttactcctcaaatcaaattaattggcagatcttcaagggaaactccaccaggaacgtgatgtactttaacggaaactccgacgcatcgactataaaggaaaatcagttcgacccgccgatcgtcgcacgctacatccggatcagccctactcgggcgtacaacagaccgactctccggctcgagctgcaaggatgcgaagtgaacggatgcagcactccactcggtatggagaatggaaaaattgaaaacaagcagatcaccgcctcgtcctttaagaagtcatggtggggggattactgggagccgttccgggcccgcctcaacgcccagggacgcgtcaatgcctggcaggccaaggccaacaacaacaagcagtggctggaaatagacttgctgaagatcaagaaaattaccgccatcatcacccagggttgcaagtcactgtcgagcgagatgtacgtgaaatcctacaccatccactactccgagcaaggtgtggaatggaaaccataccgcctgaaatccagcatggtcgacaagatcttcgagggcaacaccaataccaagggccatgttaaaaatttcttcaatccaccgatcatctcgcgattcattagagtaattccgaaaacttggaaccagtcgatcgctctcagactggagctcttcggatgtgacatttac

SEQ ID NO: 9023 - DNA, 6672 bp, synthetic construct
  misc_feature 1..6672: note = source = /note="Description of Artificial Sequence: Synthetic coding sequence"
  source 1..6672: mol_type = other DNA
atgtttcctggctgtccgaggctgtgggtcctggtcgtcctgggcactagctgggtgggatgggggtcccagggtactgaggcggcacagctgcggcaattctacgttgctgcgcagggaatttcctggtcgtatcgacctgaaccgactaactcttccctgaatctgtccgtgacctcgttcaaaaagatcgtgtatcgggagtacgagccgtacttcaaaaaggaaaagcctcaatcgaccatctccggtctgcttggcccgaccctgtacgccgaagtgggagacatcatcaaggttcacttcaaaaacaaggcagacaagccgctgtcgatccatccgcaaggaatcagatactccaaactgtccgaaggagcgtcatacctggatcataccttcccggcggagaagatggatgacgcagtggccccggggagagaatacacctacgaatggtcaatctcagaggactcaggcccaacccacgatgatccaccgtgtctcacccacatctactattcgcatgaaaatctgatcgaggactttaacagcgggctgatcggaccgcttttgatctgtaagaagggaacccttactgaaggcggaacccaaaagactttcgacaagcagatcgttctgctgttcgctgtgtttgatgagtcgaagtcgtggtcacagtcgagcagcctgatgtacactgtgaacggttacgtgaacggtaccatgccagatatcactgtgtgcgcgcatgaccatatttcatggcatctgttgggaatgtcgtcgggaccggaactcttttccatacactttaacggacaggtgctggaacaaaatcaccacaaagtctcggcgattacccttgtgagcgcgacctccactactgcgaacatgaccgtgggaccggaaggaaagtggatcatctcctccttgacgccaaaacatctgcaagcaggcatgcaagcctatatcgacattaagaactgtccgaaaaagactcgcaacctcaaaaagatcactcgggaacagaggcgccacatgaaaaggtgggaatactttatcgccgcggaggaagtgatctgggactatgcacccgtgatcccggccaacatggataagaagtaccggtcccagcatctggacaacttctcaaaccagattggtaagcactacaaaaaagtcatgtacactcagtacgaggatgagtcttttaccaagcataccgtcaacccgaatatgaaggaggacggaatcctcggcccgatcattagagcccaggtgcgcgacaccctcaagatcgtgttcaagaacatggcttcgcgcccatactcgatctacccgcatggcgtgactttcagcccgtatgaagatgaagtcaactccagctttacgagcggacggaacaatacgatgatccgggccgtccaaccgggcgagacttacacctacaaatggaatatcttggagttcgacgagccaaccgaaaatgacgcccaatgcctgactcgcccatactattccgacgttgacatcatgcgggatatcgcttcgggattgataggcctgctgctcatctgcaagtcgaggtcgctcgatcggcgggggatacaacgcgctgccgacatcgagcagcaagctgtctttgctgtctttgatgagaataagtcgtggtacttggaggataacatcaataagttttgcgaaaatccggacgaagtcaagcgggacgacccgaagttctacgaatcaaatatcatgtcgaccatcaacggatacgtgccggaatcgattaccactctgggcttctgcttcgacgacaccgtccagtggcacttctgctcggtcggaacgcagaacgaaattctgactatccactttactggccacagctttatctatggaaagcggcacgaagatactcttactctcttcccaatgcggggagagtcggtgaccgtgactatggacaatgtcggcacgtggatgttgacttccatgaactcgtcgccacgcagcaagaagctgcggctcaaatttcgggacgtcaagtgcatcccagacgatgatgaggattcttatgagatcttcgagccaccggaatcgactgtgatggctactcggaaaatgcatgatcggctggagccagaggacgaggagagcgatgccgactacgactatcaaaataggctcgcggcagcgctgggcatccgctccttccgcaactcctccctcaaccaagaggaagaagaattcaacctcaccgcactggcgctggaaaatggaactgaattcgtgtcaagcaataccgatatcatcgtgggatcgaactactcctccccgagcaatatcagcaagttcacggtgaacaatctggccgaaccccaaaaagccccatcgcaccaacaggccacgaccgcaggatccccactgagacacctgatcggcaagaactcggtgctgaactcaagcactgctgagcattcatcaccgtactctgaggaccctatcgaggacccgctgcagccagacgtgacgggcatcagactgctgtcgcttggagctggagagtttaagtcccaggaacatgccaaacacaagggaccaaaagtggagcgggaccaggcagccaaacatcgcttctcgtggatgaaactgttggcgcacaaggtgggacgccacctgtcacaggacactggctccccgagcgggatgaggccgtgggaggacctcccatcgcaggataccggatcaccctctcggatgcgcccgtggaaggatcctccgagcgacttgctgcttctgaaacagtcgaattcgtcaaagatccttgtgggtcgctggcacctggcttccgaaaagggatcttacgaaatcattcaggatactgacgaggatactgccgtcaacaattggcttatttccccacagaacgcatcaagagcctggggtgagagcactccgttggcgaacaagccggggaagcaatccggacacccgaaattcccccgcgtcaggcataagtcactccaagttcgccaggacgggggcaagtccagactgaaaaagagccaattcctcattaagactcggaaaaagaagaaagaaaagcacacccaccatgcaccgctctcgccgcgcaccttccacccactgcggtcggaagcctacaacactttcagcgaaagacggctcaagcactcattggtcctccataaatccaatgagacttctctgccgaccgatctgaatcagactctcccgtcaatggacttcggctggatcgccagcctgccggaccacaaccagaacagcagcaacgacaccggacaagcgtcgtgcccacccggactgtaccaaaccgtgccgcccgaggaacattaccagacttttccaatccaggacccagaccagatgcattcaacctccgatccgtcacatcgctcctcgtccccagaactgtcagagatgctggaatacgatcggagccacaagtcgttcccaacggacatcagccaaatgtccccatcttcggaacacgaagtgtggcagaccgtcatctcaccggacctgtcccaggtgaccctgtctcctgagctgtcgcaaactaacctttcaccagatttgtcgcacaccaccctcagcccggagctgatccaacgaaatctcagccccgccctggggcagatgccaatcagcccagatctgtcacacaccaccctttctcccgacctgtcccataccactctgagcttggatctttctcagaccaacctctccccggaactgtcgcagaccaacctgtcgccggcgctcggccaaatgcctctctcccccgacttgtcgcatactaccctttccctcgacttttcacagactaatctctccccggagttgtcccacatgactctgtcaccagagctctcacaaacgaatctgtcaccagcgctgggacagatgccgatttccccggatctctcccataccacgctctcccttgatttctcgcaaacgaacttgtcccctgagctctcccaaaccaacctgtcacctgctctcgggcagatgccgctcagcccggacccttcgcacaccactctgtcgctggacctctcccagacgaaccttagccctgaactgtcccaaacgaacctgtcgccagatctctccgagatgccactcttcgcggacttgtcacagattcctctgactcccgacttggatcaaatgactcttagccccgacctcggggaaaccgacctgtcaccgaacttcggacagatgtccctgtcgccggatctgagccaagtgaccctgtcgcctgacatcagcgacaccaccctgctgcctgacctctcgcagatcagcccgccacctgatctggaccagatcttttacccttcggagtcgtcacagagcctccttctgcaagagttcaacgaatcgtttccgtacccggacctgggccagatgccatcgccatcatcgccgaccctgaacgataccttcctctcaaaggaattcaaccccctggtcattgtgggcctgtccaaggatggaactgactacatcgaaatcatcccgaaggaagaagtccaaagcagcgaggacgactacgccgagatcgactatgtgccgtacgacgatccctacaagaccgatgtgcgcactaacatcaactcttcccgcgacccggacaacatcgccgcatggtacttgcgctctaacaatggcaacaggcgcaactactacatagcggcggaggaaatcagctgggattactccgaattcgtccaacgggaaaccgatatcgaggactcagacgacatcccagaggacacgacttacaagaaggtggtgtttcggaagtaccttgactcgactttcacgaagcgcgaccctagaggagaatacgaggaacatctgggcatccttgggccgatcatccgcgcagaggtggatgatgtcatccaagtgcgcttcaaaaatctggcaagcaggccatattcacttcatgcgcatggattgtcgtacgaaaagagctctgagggaaaaacctacgaagatgattctccggagtggttcaaagaagataatgcggtccagcctaactcgtcgtacacgtatgtctggcacgccactgagaggagcgggcctgaatcgccgggctccgcctgccgcgcatgggcctactactcggccgtgaatccggagaaggacattcactcaggattgattggacctctgttgatctgccaaaaaggcatccttcacaaagattcgaatatgcctatggatatgagggaattcgtgctcctgttcatgaccttcgacgagaaaaagtcctggtactatgaaaagaagagccgctcgagctggagattgacgtcaagcgagatgaagaaatctcacgagttccacgccatcaacggaatgatctactccctgcccggactgaagatgtacgaacaggaatgggtgaggctgcacctcctcaacatcggaggcagccaggatattcacgttgtgcactttcacggacagactcttctggaaaacgggaataagcagcaccaattgggagtgtggcccctcctgcctggatcgttcaaaactctcgagatgaaggcctcgaagcctggttggtggctgctgaacaccgaggtgggtgaaaatcagcgcgcaggtatgcagacccctttccttatcatggaccgggactgcagaatgccgatggggctgtccactggtattatctccgactcgcaaatcaaggcctccgaattcttgggatactgggaaccgcggctggcaagacttaacaatgggggtagctacaatgcctggtccgtggaaaagttggccgccgaattcgcctccaagccctggatccaagtggacatgcagaaagaagtgataatcactggaatccagacccagggcgccaagcactaccttaaaagctgctacaccactgaattctacgtggcgtacagctcgaaccagattaactggcaaatcttcaaggggaactcaacgaggaatgtcatgtacttcaacgggaactccgacgcatccaccatcaaggagaaccagtttgatcctccaatcgtcgccagatacatcagaatttctcccactcgggcctacaatcgaccaactctgagactcgaactgcagggttgtgaggtgaatggctgctccaccccactcggaatggaaaatggcaaaatcgagaataagcagatcaccgcctcctcattcaagaaatcctggtggggcgattattgggagcccttcagagccagactgaatgctcaaggccgggtgaacgcctggcaggcgaaggcgaacaacaacaagcaatggctcgaaattgacctgctcaagatcaagaagattaccgccatcattacccagggatgtaagtccctgtcgtcggaaatgtacgtgaagtcatacactatacattactccgaacagggcgtggagtggaagccttaccgcctgaagtcctcgatggtggacaagatcttcgagggaaacactaacactaaaggacacgtgaagaactttttcaacccgccgattatctcccgcttcatccgggtgatcccaaagacctggaatcaatctatcgcactgagactggaactgttcggatgcgatatctac

SEQ ID NO: 9024 - DNA, 6672 bp, synthetic construct
  misc_feature 1..6672: note = source = /note="Description of Artificial Sequence: Synthetic coding sequence"
  source 1..6672: mol_type = other DNA
atgttcccgggatgtccccgcctgtgggtcctggtggtgctcggcacttcgtgggtcgggtggggaagccaaggaactgaagccgcacagctgcggcagttttatgtcgctgctcaaggaatcagctggagctatcgcccggagcccaccaacagctccctgaacctttccgtgacctcgttcaagaaaatcgtgtacagagaatatgagccttacttcaaaaaggaaaagccacagtcaaccatctctggcctcctgggaccgaccctgtacgcggaagtgggagacatcatcaaggtccactttaagaataaggccgacaagcctctctccatccatccgcagggaatacgctactcaaaactgtcggaaggtgcctcataccttgatcatacctttccggccgagaaaatggacgatgcggtggccccgggacgggaatacacttacgaatggagcatctccgaggactccggtccgacgcatgatgaccctccgtgcctgactcacatctattacagccacgaaaatctcatcgaggatttcaatagcggactcatcgggccattgttgatttgcaagaagggaactctgaccgagggagggactcaaaagacgtttgacaagcagatagtgctcctgtttgccgtgtttgatgaatcaaaatcatggagccagtcgtcctcgttgatgtacactgtcaacggatacgtgaacgggactatgccggacatcacggtgtgtgcgcacgaccacatttcctggcatcttcttggaatgtcatcgggaccagagctcttctcgatccatttcaatggacaggtgctggagcaaaaccatcacaaggtgtcagcgattactctggtttccgcgacctcaaccaccgcgaatatgaccgtgggcccagagggtaagtggattatcagctcgctgacccctaagcaccttcaggcgggaatgcaggcgtacattgacatcaaaaactgtccaaaaaagactagaaacctgaagaagatcactagagagcagcgtcgtcacatgaaaagatgggagtacttcatcgctgccgaagaagtgatctgggattacgccccagtgatcccggcaaacatggacaagaagtacaggtcgcagcatcttgataacttttcaaatcaaatcggcaaacactacaaaaaggtgatgtacacgcagtacgaggatgagtcttttaccaaacacactgtgaatcctaacatgaaggaagatggaattctgggccctatcatccgcgcccaagtgcgcgacacgttgaaaatcgtgtttaagaacatggcttctcggccatactcgatttaccctcacggagttaccttctcaccgtacgaggacgaagtgaattccagctttacgtccggtaggaataacaccatgatccgcgcagtccagccaggtgaaacttacacctacaagtggaatatcctggaattcgacgaacctaccgaaaacgacgctcagtgtcttaccagaccttactattcagacgtcgacatcatgagagacatcgcaagcggcctcatcgggctgctgctgatctgcaagtctcggtcactcgacaggcgtggaatccaaagggccgccgacatcgagcagcaagccgtgttcgccgtgttcgatgagaacaaatcttggtacctggaagataacatcaacaagttctgcgagaatcctgacgaggttaagcgcgatgatccaaagttctacgaaagcaatatcatgtcgactattaacggttacgtgccggaatcgatcaccactctgggattttgcttcgacgacaccgtgcaatggcacttctgctccgtggggacgcaaaacgagatcctgactatccatttcaccggacactcgttcatttacggcaagcgacacgaggacactctcacgctctttccaatgagaggagagtccgtgactgtcactatggacaacgtgggaacctggatgttgacctcaatgaacagctcaccgcggtcaaagaagctgcggctgaagtttcgcgatgtgaagtgcatcccagacgacgacgaggattcgtacgaaatcttcgaaccgccagagtcgaccgtgatggcgactcggaagatgcacgaccggctggagcccgaagatgaagaatcagatgccgactacgactaccaaaatcggcttgcggcagccctcggtatccggagctttcggaactccagcctgaatcaagaagaagaagaattcaatctgaccgcgctcgcattggaaaatggaacggaatttgtctcctcgaacactgacatcattgtgggaagcaactacagctctccctcgaacatcagtaaattcactgttaacaacctggcagaacctcaaaaggcgccgtcgcaccagcaagctactactgctggatcccctctgcgccacttgatcggaaaaaacagcgtgctgaactcctcaactgcggagcatagctcgccctattccgaggacccgatcgaagatccactgcagccagacgtgacgggtatcaggctgctctctctcggagcgggtgaattcaagtctcaagagcacgccaagcataagggaccaaaagtggaacgcgaccaggccgctaagcaccgctttagctggatgaagctcctcgcccacaaagtcggccgccacctcagccaggataccggatccccgtcgggaatgcggccatgggaggacctcccatcacaagacactggctccccatcgcggatgcgcccatggaaggacccgccgtcggatctgctcctgctgaagcaatcgaacagctccaaaattcttgtgggacggtggcatctcgcttccgaaaagggatcctacgaaatcatccaagacactgacgaggacactgcagtcaataactggcttatttccccgcaaaacgccagcagggcgtggggggagagcactccgctcgctaacaagccaggtaaacagtccggacaccccaaattcccgcgcgtgcgccataagtcactgcaggtgcggcaggacggaggcaaatcgcggctcaagaagtcccagttcctcatcaagacccgcaagaaaaagaaggaaaagcacactcaccatgcgccgttgtcaccccggaccttccacccactgcggtcggaagcgtacaataccttctctgaacgcagattgaaacacagcctcgtgctccacaagtccaacgaaacctcattgccaaccgaccttaaccagactctgccgtcaatggacttcggatggatcgcttcactgcctgatcataaccagaactcctcaaatgacaccggacaagcgtcctgtccgccgggactgtaccagaccgtgccgccagaagaacactaccaaacctttccgatccaagatccggaccagatgcactccacttctgacccatcgcaccggtccagctcaccagaactttcggaaatgctggaatacgatcgcagccacaagtcctttccgaccgacatttcacagatgtcgccttcctcggagcatgaggtgtggcaaaccgtcatctcaccggatctctcgcaggtgacgctctccccggaactgtcgcaaactaacctgtcgcccgacctgtcccacacgaccctgagcccggaactcatccaacgcaacctctcgccagcactcggtcaaatgccaatttcacctgatctttcacataccaccctgagcccagacctgtcacacaccactctgtccttggacctgtcccaaactaacctctctccggaactctcccagaccaatttgtcccctgccctgggtcaaatgcctctctcaccggatttgtcgcatactacgctctcgctggacttctcacaaaccaacttgtcgccagagctgtcccacatgactctgagcccagaactgtcgcagactaatctgtcacccgctctgggacaaatgcccatcagcccggatctttcgcatactactctgtctctggatttctcgcagacgaatctctcgcctgagctgagtcagaccaacctgtcaccagctctgggccagatgcctctttcgccagatccgtcgcacactactctgtcgctcgatctgtcccagactaacctgagccctgaactttcacaaacgaaccttagcccggacctgtccgagatgcccctgtttgccgacctctcccaaattccgctgaccccagacctcgaccagatgacccttagccccgacttgggggagactgatctttccccaaatttcgggcagatgtccctgtcgccggatctctctcaggtgaccctgtcgccagacatctcggatactactctcctccctgacctgagccagatctcacctcccccggatctggaccagatcttctacccttccgagagctcgcagtccctcctgctgcaagagttcaatgaatcttttccgtaccctgatcttggacagatgccatccccctccagcccgacgctgaacgatactttcctgtccaaggaattcaatccactcgtgatcgtgggcctgtcaaaagatggaactgactacattgagatcatccctaaagaagaggtgcagtcaagcgaggacgattacgcggagatcgactacgtgccctacgacgacccgtacaagaccgacgtccggactaatatcaatagctccagggatccagataacattgccgcctggtacctccgctcaaacaatggaaatcggagaaactactatattgcggccgaggaaatctcctgggattactcggagtttgtgcagagggagactgatatcgaagattcggacgacattccggaagataccacttacaagaaagtcgtgttcagaaaatacctggactcaaccttcaccaagcgggatccgcggggcgagtacgaagaacacttgggaatccttggacctatcattcgcgcagaggtcgatgacgtgatccaggttcggttcaagaacctggcctccagaccctacagcctgcacgcgcatggattgtcatacgagaagtctagcgaaggcaagacctacgaagatgattcgccagaatggttcaaggaggacaacgccgtacagccaaactcatcctacacgtatgtgtggcatgctaccgagcgcagcggacctgagtcgcccggatctgcgtgtcgcgcgtgggcctactatagcgcggtgaacccagagaaggatatccattcgggtctgatcggaccgttgctcatctgccaaaaaggaatcctgcataaggattcgaatatgccgatggacatgagagaattcgtgctgctgttcatgacgttcgacgagaagaaatcatggtattacgaaaagaagtcccggtcatcctggcgcctgacctcaagcgaaatgaagaagtcgcatgaattccacgccattaacggtatgatctactccctcccgggcctcaagatgtacgagcaggaatgggtgcgccttcacctgctcaacattggcgggagccaagacatccacgtggtgcatttccatggtcaaactctgctcgaaaatggtaacaaacaacatcagctgggagtgtggccgctcctgcctgggtcgttcaaaaccttggagatgaaagcatcgaagccggggtggtggctgctgaacactgaggtgggcgaaaatcagcgggcaggaatgcagaccccgtttctgatcatggatagagactgccgcatgcctatggggctctcaaccggaattatctccgactcgcaaatcaaggcatcggaatttctgggatactgggaaccgaggctggccagactgaataatggcggctcttacaacgcgtggtcagtcgagaagctggccgccgaattcgcgtcgaaaccgtggatacaagttgatatgcagaaggaggtgatcatcactggaatacaaactcagggagccaagcactacttgaaaagctgctacactaccgagttctacgtggcctactcctccaaccaaatcaactggcaaatcttcaaaggcaattccacccgcaatgtcatgtacttcaacggaaattccgacgcatcaaccatcaaggaaaaccagttcgacccccctatcgtggccagatacattcgcatcagccctactagagcatacaaccggcctactctgaggttggaactccagggttgcgaggtcaatggatgcagcacgcctttgggaatggagaacggtaagatcgagaacaaacaaatcactgccagcagcttcaaaaagtcctggtggggagactactgggagccctttcgggcccgcctgaacgcccaggggcgcgtcaatgcctggcaggcgaaagcgaacaacaataagcagtggctggagattgacctgcttaagattaagaagatcaccgccatcatcactcagggatgcaaatcactgtcctcagagatgtacgtgaagtcatacaccatccactactcggaacaaggcgtggagtggaagccataccggctgaagtccagtatggtggataagatcttcgaaggaaacactaataccaaggggcatgtgaagaacttcttcaacccaccaatcatctcgcgctttatcagggtcattccaaagacctggaatcagtccatcgccctgaggcttgagctcttcggatgtgatatctac

SEQ ID NO: 9025 - DNA, 6672 bp, synthetic construct
  misc_feature 1..6672: note = source = /note="Description of Artificial Sequence: Synthetic coding sequence"
  source 1..6672: mol_type = other DNA
atgtttcctggatgtcctcgcctgtgggtacttgtggtgctgggaacttcatgggtcggctggggctcacagggaaccgaggcagcacagctgcgccaattctacgtggccgctcaaggaattagctggtcctacaggccagagccaactaactcgtcgttgaacctttcggttacgagctttaagaagatcgtgtacagagaatacgaaccttacttcaaaaaagaaaagccacaatcgacgatttcaggcctcctcggtcccactctttacgcagaggtcggagacataatcaaagtccacttcaaaaacaaggcagacaaaccactgtccatccacccccagggtattagatacagcaaacttagcgaaggtgcaagctaccttgatcacacgttccctgcagaaaagatggatgacgcagtggcacctggtcgggaatacacttacgaatggagcatttcggaggacagcggaccgactcatgatgaccccccttgtctgacccacatctactactctcacgagaacttgatcgaagatttcaactcaggcctgatcggtccacttctgatatgtaagaagggaaccctgaccgagggcggaacccaaaaaacttttgataagcagatcgtgcttctgttcgcagtgttcgacgaatccaagtcctggagccagtcgtcatcccttatgtacactgtgaatggatacgttaatggaactatgcccgatataaccgtgtgtgcacatgatcatatttcctggcatcttttgggaatgtcgtcgggacccgaacttttttcgattcatttcaacggacaggtgttggagcaaaaccatcacaaagtgtcggccatcaccctggtcagcgcgacctcaactaccgcgaatatgaccgtcggacctgagggtaagtggataatcagctcattgaccccaaaacaccttcaagcgggaatgcaagcatacatagacataaagaattgtccaaaaaagacccgaaacctgaagaagattactcgagaacaacgccggcatatgaagagatgggagtactttattgccgctgaagaggtgatttgggattacgcacctgtgattcctgcaaatatggacaagaaatacagatcgcaacatcttgataacttttccaatcagataggaaagcattacaagaaggttatgtacacccagtatgaggatgaatcttttactaaacacaccgtgaatcctaacatgaaggaggacggaattcttggacctatcatccgtgcacaggtccgcgacaccttgaagattgttttcaagaatatggcatcccggccgtactccatttatcctcacggtgtgaccttttccccctacgaggacgaagtcaacagctcgtttacgtcgggtaggaacaacaccatgattcgggctgtgcaacctggtgagacttacacctataagtggaacattctcgaattcgacgaaccgactgaaaacgatgcacaatgcctgaccagaccatactactcagatgtggacataatgcgggatatcgcctccggcctcattggattgctcctgatttgtaaatcgcgttcgctcgaccgacgtggtatccagagggcagcggacattgaacaacaagctgtctttgcagtgttcgatgagaataagtcttggtacctggaagataacattaacaaattctgcgaaaaccccgacgaagtgaaaagagatgaccctaagttctacgaatccaacattatgtcaacgattaacggatacgtgcctgaatcgatcaccacgctgggcttctgttttgatgataccgtgcaatggcatttctgttccgtcggcactcaaaatgaaattctgacgatccattttaccggacattcctttatctacggaaagcgccatgaggacactctgactcttttccctatgagaggtgaatcagtgactgtcaccatggataatgtggggacctggatgctcacgtccatgaattcaagcccgagaagcaaaaagctgcgattgaagtttcgggatgtgaagtgcatacccgacgacgatgaggacagctatgagatttttgaaccccctgaatcaacggtcatggccacgcgcaagatgcatgacagattggaacccgaggacgaggagtccgacgcggattacgattaccaaaaccgtttggccgccgcactgggcatccggtcctttagaaactcatccctgaatcaggaggaagaggaattcaatctgacggcactggctctcgagaatggaactgaatttgtgtcgtcaaataccgacataattgtcggaagtaactactcgtcaccatcaaacatatcgaaattcactgtcaataacctggccgaaccccaaaaggcaccctcgcatcaacaagcaaccactgcaggcagtccactgagacatctcatcggcaagaattcagtgctgaattcatcaactgcggaacattcgtccccctacagcgaagatcctattgaagatcctctgcagcctgatgtcaccggaatcaggctccttagcctcggtgcgggggagtttaagtcccaggaacacgcaaagcataagggtcccaaggttgagcgcgaccaagcagcaaaacataggttctcttggatgaagctgcttgcccacaaggtcggacggcacttgagccaagacactggatccccgtcgggaatgcgcccatgggaagatctgccatcgcaggataccggatcaccaagccgcatgaggccgtggaaggatcctccttcagaccttctcctgctgaagcaatcaaattcgtccaaaatcctcgttgggagatggcatctggcctcagaaaaggggtcatacgaaatcatacaggatacggacgaggacactgccgtgaacaattggcttatttcacctcaaaacgcatcccgagcttggggggagtcaactcctctggccaacaagccaggtaagcaatccggacacccaaaattccctagagtgagacataagtcgctgcaagtgcgccaggacggaggaaagtcacgtttgaagaagtctcagtttctcattaagactcgcaagaagaaaaaggaaaaacatacccaccatgcacctctttcgcctagaactttccaccctcttcgtagtgaggcctacaatacgttttccgaacgcagacttaagcattcgctggtgctccataaatccaatgagacttcattgcctactgatcttaaccagactcttccctcaatggacttcgggtggatcgcttcgcttccggatcacaaccagaactcctcaaacgatactggccaagcatcctgtcctcctggattgtatcagacggtccctccggaggagcactatcagacgtttcctatacaagaccctgatcagatgcattccacttcagatccgtctcataggtcgtcgagcccggaactttctgagatgctcgagtacgatcgctcgcacaaatcctttcccacggatatttcacagatgagcccttcatccgagcatgaggtgtggcaaactgtgatttcgcctgatttgtcgcaagtgactcttagcccagaactctcccagacgaatctgagccctgacttgtcccataccaccttgtcccctgaactcatccaacggaacctgtccccagcacttggacagatgccaatttcacccgacctttcacacaccaccctttcccctgatctgtcccacaccactctgtctttggatctgtcacaaaccaatctctccccagagctttcccagactaacctctcgccggcgcttggtcaaatgcctctgtctccagacctttcgcataccaccctctctctcgacttttcgcaaacgaacctgtctcctgaacttagccatatgaccctgtcgcccgaactgagccaaacgaatctgtcgcctgcactcggtcaaatgcccatcagtcccgacctctcccacacgactcttagcttggatttttcccagaccaacctgtcgccagaactctcgcagaccaatcttagcccagcactgggtcagatgccgctttccccggatccctcccatactaccctttcactggacctctctcaaaccaacctcagccctgaactgagccagactaatctctcgcccgacctcagcgaaatgccacttttcgccgacctttcgcagatcccactgactccagatctcgaccaaatgaccctgtctcccgatttgggtgaaaccgacctgtccccaaactttggtcagatgagcttgtcgccagacctttcccaagtgaccctctcgcctgatattagcgataccaccctcctgcctgacctttcacaaatctcgccccctcctgaccttgatcaaatcttttacccatcagaatcgagccagtccctgctgcttcaggaattcaacgagtcgtttccatacccggatcttgggcaaatgccctcgccttcatcgcctactctgaacgacacctttttgtccaaggagtttaatccactcgtgatagtcgggctcagtaaggatggcactgactacattgaaatcattcctaaggaggaagtgcaatcctcggaagatgattacgcggagatcgactacgtcccatacgatgatccctacaagaccgacgtgcggactaacatcaattcatcccgggatcctgacaatattgcagcgtggtacctccgctccaacaatggaaacaggcggaattactacattgcagcagaggagatcagctgggattacagcgaattcgtgcaaagagaaaccgatattgaggattcagatgatattccagaagatactacctacaaaaaggttgtctttagaaaataccttgatagcacttttaccaaacgagatcctagaggtgaatacgaagaacacctggggatcctcggcccaataatcagggccgaagtggacgatgtgattcaggtcagattcaaaaacctcgcatcgaggccatattcgcttcatgcacacggcctgtcctacgaaaagtcctctgagggaaagacttacgaggacgattcgcctgaatggtttaaggaggataacgcagtgcaacctaacagctcctacacctacgtgtggcatgcaactgaaagatcaggccctgaatcgccaggtagcgcatgcagggcgtgggcgtactacagtgcagtgaatcctgaaaaggacatacattcgggtcttatcggcccacttctcatctgtcagaaggggattctgcacaaggattccaacatgccaatggatatgcgtgaatttgtgctgctctttatgacctttgatgagaagaaatcgtggtattatgaaaagaagtcccgaagctcctggagactcacgagcagcgaaatgaagaagtcccatgaatttcacgcaattaacggtatgatctacagcctgcctggactgaagatgtacgagcaggaatgggtgcggcttcatcttttgaatataggaggatcacaagatatccatgtcgtccacttccatggacagactcttcttgagaacgggaacaagcagcaccagcttggggtgtggccgctgctcccaggttcgtttaagaccctggaaatgaaggcatcaaaaccgggatggtggctgctgaataccgaagtgggggaaaaccagcgggctggaatgcaaacccctttcctcataatggatagagattgtaggatgccaatgggtctgtccactgggatcatatcggacagccaaatcaaggctagcgaattcctcgggtattgggagcctcgccttgccagactcaacaacggagggagctacaatgcatggtcagtagagaaacttgcagcagagttcgcttcaaaaccgtggatccaggtcgatatgcagaaagaggtgattatcacgggtattcaaactcaaggagctaaacactacctcaagagctgttacaccactgagttttatgtggcctactcgtcgaaccaaatcaactggcagattttcaaaggtaacagtaccagaaacgtgatgtactttaacggtaactctgatgcttccaccattaaggaaaatcaatttgatcctccaattgtggcgcggtacatccgaatttcgcctacgcgagcatacaaccggccgacccttagacttgagctgcagggctgcgaggtgaacggctgttcgacgcccctgggaatggaaaacgggaaaatcgaaaacaagcaaattacggcctcgtcgttcaagaagtcatggtggggagactactgggaaccgttcagagctcggcttaacgcacagggaagagtgaacgcatggcaagcaaaggcaaacaacaacaagcaatggcttgagattgatcttctgaaaatcaagaagatcactgcgatcattacccagggttgcaagtcactgtcgagcgagatgtacgtgaagagctacaccattcattacagcgaacaaggggtcgagtggaagccctaccgcctcaagtcgagtatggtggacaagatctttgaaggcaacactaataccaaaggacatgtaaagaacttctttaaccccccaatcattagccggttcattagggttattcctaagacctggaatcagtcgatcgcactccggcttgaactcttcggctgtgacatttat

SEQ ID NO: 9026 - DNA, 6672 bp, synthetic construct
  misc_feature 1..6672: note = source = /note="Description of Artificial Sequence: Synthetic coding sequence"
  source 1..6672: mol_type = other DNA
atgtttccggggtgtccacggctgtgggttctcgtagtgttgggcactagctgggttgggtggggtagtcaaggaaccgaggcagctcaactgaggcagttttatgtcgcagcacagggcatctcatggtcataccgccccgagcccaccaatagctccctcaatctgtccgtgacctcctttaagaagattgtgtatcgggaatatgagccttacttcaagaaagagaaacctcaatcaacaatttcggggctgctcgggccgactctgtatgcagaggtgggcgacatcattaaagtccatttcaaaaataaggcagacaaacccctgagcatacacccccaggggattcggtactctaaattaagtgagggggcaagctatctcgatcatacctttccggccgaaaaaatggacgatgccgtcgccccaggtagggagtacacttacgaatggagtatttctgaggactccggccctacccacgacgacccaccatgcttgacacacatttactactctcacgaaaacttaatcgaagatttcaattccggactcattggtcccctgctcatttgtaagaaaggaacactgaccgaggggggaacccagaagacttttgataagcaaattgttttgctgttcgctgtctttgatgaaagcaaatcttggtcacagtctagtagcctgatgtataccgtcaacgggtacgtcaatgggacgatgccggacatcacagtgtgtgcccacgatcatatctcgtggcacctgctgggcatgagttccggccccgagctgttctctatccattttaacggccaggtgttggagcagaaccatcacaaagtgagtgccattaccttggtaagtgccactagcacgacagctaacatgacggtcgggcctgagggtaagtggattattagctcgctaacccccaagcacttacaggctggtatgcaggcatacatcgatataaagaattgtccaaagaaaacgcgaaatcttaagaaaatcaccagagagcaacgacgccacatgaagaggtgggagtatttcattgccgcagaggaggtgatttgggattatgctcctgtcatccctgctaacatggataaaaagtaccggagtcagcatttggacaattttagcaatcagattggaaagcactacaagaaagtgatgtatactcagtacgaggacgagtcatttacaaaacacaccgtgaatccaaatatgaaagaggatggcatactgggtccaatcattcgcgctcaggtgcgtgacaccttgaaaatagtttttaagaacatggcctctagaccttattccatttacccacatggtgtgacctttagcccgtacgaagatgaagttaacagttcctttacgtcgggaaggaacaatactatgatccgggccgtccagcctggcgagacctatacctacaaatggaacattcttgagtttgatgagcccaccgaaaacgatgctcaatgcctaactcggccttattattcagatgtcgacattatgagagacattgcatcgggcctgataggcctactactgatttgtaagagcaggtcattggatcggcgtggcatccagcgggctgccgacattgagcagcaagctgtgttcgctgtgttcgatgaaaataagtcctggtaccttgaagataacataaacaagttttgcgagaaccctgacgaagttaagcgggatgaccctaagttctacgagtctaacattatgagtactatcaacgggtatgtgccggagagcattacaacccttggattctgcttcgatgacaccgtccagtggcatttctgttccgtcggcacgcagaatgaaattcttacaatccacttcacagggcattctttcatctatggcaagaggcacgaagacaccctcactctctttccaatgcggggcgaaagcgtgacagtgactatggacaacgtcggaacttggatgctgaccagtatgaactctagcccgcggtcaaaaaagctacgcctgaagtttagggacgtcaaatgcatacctgacgacgacgaggattcctacgaaatttttgagcctccagaatctacggtaatggctaccaggaaaatgcatgaccgcctggaacccgaggatgaagagagcgacgcagactacgattaccagaaccggttagcagcggcacttggcatcagatctttcaggaactcttccctgaaccaggaggaagaggagtttaatttgaccgcactggctcttgaaaatggaacagaattcgtcagtagtaatacagacatcatcgtaggctctaattacagttccccctcaaacatcagcaagttcaccgtaaacaatctagccgaacctcagaaggctccctcgcatcagcaggcaaccaccgccggttcaccccttcggcatctgatcgggaaaaactctgtgcttaactcctcaaccgcagagcactcctcaccatacagtgaggatccaatagaggatcccctgcagcccgacgtgaccggtattaggttactaagccttggagcgggagagtttaaaagtcaggaacacgccaagcacaaaggccctaaagtcgaacgggatcaagccgcaaagcatcggtttagctggatgaagctgttagcccataaagtgggcagacacttaagtcaggacacgggctcgccctcaggcatgaggccttgggaggacctgccttcgcaggatacaggttcacccagtcggatgcggccatggaaggatccgccatctgacctactcctgctgaaacagagtaattcctccaaaatcctcgttggcaggtggcacctcgcatcggagaaaggtagttatgagatcattcaggatacagatgaagacacagcagtcaacaactggctgattagtccacaaaatgccagcagagcttggggagaatcaacccctctggctaacaagcccggtaagcaatccggccatcctaagttccccagagtgcgacataaatccttgcaggtgagacaagacggaggtaagtcacggcttaagaaatcacagtttctcatcaaaaccaggaaaaagaaaaaggagaaacacacacaccatgcaccattgagtccccgaacttttcacccccttcggtctgaagcgtacaatacattttcggaacgacggctgaagcattctctagtcctccacaagtcgaatgagacctccctccccacagatctcaaccaaactctgccctcaatggattttggctggatcgcgtctttgccagatcataaccagaacagctccaatgacaccggccaggcttcctgcccccccggcctctatcaaaccgttccccccgaagaacactaccagacgttcccaatccaggaccctgaccagatgcacagcacatccgacccgagccatcgctcttcatctcctgaactctccgaaatgctggagtacgaccgctcccacaaatcttttcccaccgatataagccagatgtctccctcttccgaacacgaggtctggcaaactgttatatcacctgacctgagccaggtgacgctgtcccccgaattatcccaaacgaatctgtcccctgacctgtcgcacaccaccctgtctcctgaactgattcagcggaatctttcccctgcgttgggccaaatgcctatctcccccgacctttcccacaccacactctcccccgatctttcccacactactttgtcactagacttgtcccagacgaacctgtcgccggagctctctcagacgaacctgtccccagcactgggccagatgccactaagtcctgacttatcacacaccactctatcgctggatttttctcagactaacctctcacctgagttatcccacatgacactatccccagaactctcccagacaaatttgtcccccgcccttggacaaatgccaatctcccccgacctgtcacatactaccctgagtttggactttagtcagacgaacctgtcccctgaactgtcacagactaatttatccccagcactgggacagatgccactctcccctgatccaagccataccacactctcactggatctgtcccagactaacctttcacccgagctgtcccagactaacctcagtccagacctgtccgagatgccacttttcgcggacctgagccaaatccccctcacaccggatttggatcagatgactctttctccagaccttggcgagactgacctgtccccgaactttggacagatgagcttgagtcctgatctctctcaggtcactctgtctcccgatatctccgacacaacgctgctgccggacctcagccagatttctcccccccctgacctagaccaaatcttttacccaagcgagtcatcacagtccctactgctgcaggagttcaatgagagtttcccataccccgacttggggcagatgccctcgccaagctccccaaccttgaatgatactttcttgtccaaggaatttaatcccctggtgatcgtgggcttgtctaaagatggcactgattatatcgagatcattcctaaagaagaagttcagtctagtgaggacgattatgccgagattgactacgtcccctacgacgatccttacaaaaccgacgtgcgtaccaatatcaactcctcccgggacccagacaatatcgcagcctggtacctcagaagcaacaacggcaacaggcgcaattactatatcgcagccgaagaaatttcgtgggattacagcgagttcgtacaaagggaaacagatattgaagacagtgatgacattccagaagacactacttataagaaggtggtttttagaaagtatctcgatagcactttcaccaagcgggatccgcgtggggaatacgaagagcatcttggaatcctaggacctataatacgggctgaggtcgatgatgtcattcaggtccggtttaagaacttggcttctcgaccttattcactgcacgcacacgggttgtcatatgagaaaagttcagagggtaaaacctatgaagacgatagcccagagtggtttaaggaagataatgcagtgcaaccaaactccagttacacctatgtctggcacgcgaccgagagatctggcccggaatctccgggctccgcttgtagggcatgggcttactacagcgccgtgaatcctgagaaggatattcactcgggcctcatcggccctctcctgatatgtcagaagggcatcctgcacaaagattccaacatgcccatggacatgcgcgagttcgtattattgttcatgacattcgatgagaaaaagagctggtactacgaaaaaaagagtcgcagctcttggcggttgacctcgtctgagatgaagaaaagtcacgaattccacgctattaacggaatgatctacagtttaccagggttgaagatgtacgagcaggaatgggtccggctacatttactgaatatcgggggttcacaggacatacacgtggttcacttccacggtcaaacacttctggagaacggaaataaacagcatcagctcggtgtatggcctcttcttcccggctcatttaaaacactggagatgaaggccagcaaaccaggatggtggctgctgaacacggaagttggagaaaaccagagggccgggatgcagacaccattcctgatcatggatcgggattgtcggatgccaatgggcctgagcacaggcattatatccgactcccagatcaaggcctcggagtttctgggttactgggagccccgtctcgctcgcttaaataacggtggttcttataatgcgtggtctgtagaaaagctggcagcggaatttgcatccaaaccttggattcaggtggatatgcagaaagaggttataattaccggaattcagacacagggggctaaacattacctcaagtcttgctacactacggaattctatgtggcctactccagtaatcagatcaactggcaaatatttaagggcaattccacgcgaaatgtcatgtacttcaatggaaacagtgacgcctctacgattaaggaaaatcagtttgatcccccgattgttgccaggtatattagaatttctccaactcgggcctataaccgtccaacactgcggctggaattacaggggtgtgaggtgaatgggtgctccactccgctgggaatggagaatgggaaaatcgagaataagcagattactgccagctctttcaagaaatcttggtggggggattattgggaaccttttagggcacgactgaatgcgcagggtcgtgtcaacgcttggcaagccaaagctaataacaataagcagtggttggaaatcgatttactgaagatcaaaaaaatcacagctatcatcacacaaggctgtaagtctctgagttccgagatgtatgtcaaatcctatacaatccactattcagagcagggcgttgaatggaaaccttatcggctcaagtcttctatggtcgataagatcttcgaaggcaatactaacaccaagggtcatgtcaaaaatttctttaatcctcctattatttccaggtttattagagtgatacccaagacctggaaccagtcaatcgccctgcgactggagcttttcggctgcgatatatat

SEQ ID NO: 9027 - DNA, 6672 bp, synthetic construct
  misc_feature 1..6672: note = source = /note="Description of Artificial Sequence: Synthetic coding sequence"
  source 1..6672: mol_type = other DNA
atgtttcctgggtgccctagactgtgggtgctggtcgtactgggtacatcctgggtcggatgggggtctcagggcaccgaggcggctcaactgaggcagttctatgtggctgctcagggaattagctggtcgtaccgcccagagccgaccaactcatctttgaatctgtccgtgacatcttttaaaaaaattgtataccgagagtatgaaccttacttcaagaaagaaaagccccaaagtacgatttctggcttactgggacccaccctctatgctgaggtgggagatattataaaggtacatttcaagaataaggccgacaagcccctttctatccacccacaaggtatcagatactcgaaactctctgaaggtgcctcctaccttgaccacacgttccccgccgaaaaaatggacgatgcagttgcgcctggacgagagtacacgtacgagtggagcatatcagaggacagtggtcctacccatgacgacccaccgtgtctaacgcatatatactacagccacgagaacctcatagaagacttcaacagcggcctgatcggacccctgctgatctgtaaaaaggggacactgaccgagggcggcacacagaagacttttgataaacaaatcgtgctgctgtttgccgtttttgatgagtctaaatcctggagccagagctcctccctgatgtacaccgtcaatgggtatgtcaacggaacgatgcccgacatcactgtgtgcgctcacgaccacatttcgtggcacttgctaggaatgagtagcggacctgagttgttttctattcatttcaatgggcaggtgctggaacagaaccaccacaaggtttctgccatcacactcgttagcgcaacatcaacaaccgcaaacatgactgtcggcccagaagggaagtggattataagtagcttgacaccaaaacacctgcaggcagggatgcaagcatacattgatatcaagaactgccctaagaaaacccggaacctaaagaaaatcactcgggagcagcgaaggcacatgaagaggtgggagtacttcatcgcagctgaggaggtgatctgggactacgccccggtcatcccggccaacatggacaagaagtaccgctcccagcatcttgacaacttcagcaaccagattggaaagcactacaaaaaggttatgtacacccagtacgaagacgagagttttaccaaacatacggtgaacccaaatatgaaagaggacggcatcctgggaccgattattagggcccaggtgagggacaccctaaagatcgtattcaagaacatggccagcagaccctacagcatttatccccacggagtcacatttagtccatatgaggacgaggtcaattctagttttacgtctggacggaacaacactatgatacgggctgtgcaaccaggggagacttatacctataagtggaacatcctggaatttgatgaacccaccgaaaacgacgcccagtgcctgacacgcccctattatagcgacgtggacatcatgcgcgatatcgcctctggcctcatagggctgcttcttatctgtaagtccaggtctcttgaccgtcggggtatccagagggctgccgatatcgagcagcaggctgtctttgcagtctttgacgagaataagagctggtacctggaggataacataaacaaattctgcgaaaaccccgatgaagtgaaaagggatgatccgaaattctatgagtctaatataatgtcaaccatcaacggatacgtccctgagagcatcactaccctggggttctgttttgatgacacagtacagtggcatttttgctcggtgggcacacagaatgagatactgacaattcatttcacaggtcatagttttatctacggtaagaggcacgaagatacgctcacactcttccctatgcgtggagaatctgtcactgtgacgatggacaacgtgggaacctggatgcttacttccatgaactcctcccctcggtcgaaaaagcttcgactgaagtttagggatgttaagtgtatccccgacgatgatgaagatagctatgagatttttgagcctcctgagtcaactgtgatggccactagaaagatgcacgataggctcgagccagaggacgaggaatctgacgctgattacgactatcaaaaccgcttggcagctgctctgggcatacgatccttccggaactcctctctgaaccaggaggaggaagaattcaatctgactgcattagctctcgaaaacggcacagaatttgtaagtagcaatacggacatcatcgttggaagcaactattctagcccaagcaatatttcaaaatttactgtaaataatcttgccgaaccccagaaggcaccttctcaccagcaagctacaactgccggtagtccgctgcgtcacctcattggtaagaactccgtccttaatagtagtaccgccgagcattcatcaccatactctgaggaccccatcgaggatcccctccagccagatgtgaccggaatacggctactgtccctgggagcaggcgaattcaagtctcaggaacacgccaaacacaagggtcccaaggtggagcgcgatcaggcggcaaagcaccggttttcctggatgaaattgctggcacataaggtcggacgtcatctctcgcaggatactggttccccgtcaggaatgaggccctgggaggaccttccatcccaggatactgggagtccaagccgcatgcgcccatggaaggatcctcctagtgacttgctgttgctgaagcagtccaatagcagcaagatactggtagggcggtggcaccttgcctccgagaagggctcctatgagatcatccaggatacagatgaggataccgccgttaacaactggttgatcagccctcagaatgcctcacgcgcatggggcgaatccacacccctggcgaataagcctggaaaacaatctggacacccgaagtttccgcgagtgcgtcataagtcactccaggtgagacaggatggtggcaaaagtagactaaagaagagccagtttctcatcaagacacggaaaaagaagaaggagaaacatacccaccatgccccattgtccccaagaactttccacccactgaggtctgaggcatataacacttttagtgagcgccgattgaagcattctctggttctacacaagagcaatgagacttcacttcccacagatctcaatcagaccctgccatctatggactttgggtggatcgcttctctgcccgatcataatcagaattcgtctaacgacacgggtcaggcctcttgcccaccagggctgtaccaaactgttccgcctgaggagcactatcagacctttccaattcaggaccccgaccagatgcacagcacttctgatcctagtcataggagcagctccccagagctctctgagatgctcgaatacgatagaagtcacaaatcttttcctaccgatatcagccaaatgtcacctagtagcgagcatgaggtatggcagacggtgatttccccggacctctcccaggtgaccctttctcccgagctttctcagaccaacctgagcccggacctcagtcacacgaccttaagtcctgagctgatccagcgaaaccttagccccgccttggggcagatgcctatctcaccggacctctctcatacgaccctctcacctgacctgtcacacactaccctatcccttgacctgagccagactaatctgagcccagagctatcacagacaaacctatctcccgctctcggccagatgcccttgagtcccgatctttctcacaccacactttctctggacttcagccaaacgaatctttctcctgagctgtctcacatgaccctgagtcctgaactttcccaaaccaacctatctcctgcccttgggcaaatgcccatcagtccagacctatctcataccacactctccctggacttctcccagacaaatctttcacctgaattgtcacaaacaaatctgtcccctgccctgggacagatgcccctgtctcctgacccctcccatactacattgagcctggatctcagtcagacaaacctcagcccagaattgagccaaacaaacttatctccggacctcagcgaaatgcccttattcgccgacctgagccagatcccactgacacccgatctggaccagatgacactgtccccagacctgggtgagaccgacctcagcccaaattttggacagatgtctttgtctcccgacctttcccaggtcacgctatctcccgacatcagtgacacgacattgctccctgacctcagtcagatctctcctccaccggacctggatcagattttttacccgtccgaatcttcccagtctctgctgctgcaggaattcaacgagtcatttccataccctgacttgggccagatgccttccccttcctcccccaccctcaatgacaccttccttagcaaggagttcaatccgctcgtaatcgtgggactgtcgaaagacggaacagattacatagagatcatacccaaagaagaggtgcaatctagtgaggatgactacgccgaaatcgattatgtcccctacgatgacccttacaagaccgatgttcggactaacatcaatagctcgcgtgaccctgataacatcgctgcctggtatctgcggtctaacaacgggaaccggagaaactactatatcgcagcggaagaaatatcctgggactacagtgagttcgtgcagcgtgagactgatattgaggactctgatgacatcccagaggacacaacttacaaaaaagttgtgttccgcaaatacctggactcgacattcactaagagggacccgcggggcgagtatgaagagcacctcgggattctcggccctataattcgcgctgaggtggatgacgtgatacaggtgcgttttaaaaaccttgcctctagaccttattcccttcacgcacatggactcagttacgagaaatcaagcgagggtaagacttacgaagatgattcgcctgaatggtttaaggaagataatgccgtgcagcctaactcttcttacacatacgtgtggcacgcaacagaacgttccgggccagagtctccgggctccgcttgtagggcatgggcatactactcagctgtcaaccctgaaaaagacatccacagcggtctgataggccccctattgatttgtcagaagggaattctgcacaaggatagcaacatgccaatggatatgcgggaattcgttctcctgttcatgaccttcgacgaaaagaagtcttggtattacgaaaagaagtccagaagctcctggcgccttacatcttcagagatgaaaaaatctcatgagttccacgccattaatgggatgatctactctttgccaggcttgaagatgtacgagcaggagtgggtgcggttgcaccttcttaacataggaggctcccaggatattcacgtggtacatttccatggacagaccctattggaaaacggcaacaagcagcaccagctcggggtctggcctttgctgcccgggtcatttaaaaccttagaaatgaaagcttccaaaccagggtggtggctcctgaacactgaagtgggggagaatcagcgagcaggcatgcaaaccccatttcttattatggatagagattgccgcatgcccatggggttgtccaccgggataatttcagacagtcagattaaagcatcggagtttttgggctattgggagcctcgcctggccagattgaataacggaggttcatacaacgcctggagcgtagagaagttggccgcagagtttgcttctaaaccctggatacaggtcgatatgcagaaagaggtcatcatcaccgggatccagacacagggagctaagcactatttaaaaagctgttatactactgaattctacgtggcatacagcagcaaccagatcaattggcagatcttcaaagggaactcaactcgtaacgtaatgtactttaatggcaattctgacgcatctaccattaaagaaaaccagttcgatcccccaatcgtggcacgctacatacgaattagtcctacccgagcttacaacagaccgactctgcggctggaattacagggttgcgaagttaacgggtgttccacgccgctcggaatggaaaacggtaaaatcgaaaataagcagatcacagcctcttcgttcaagaaaagctggtggggagactactgggagccatttcgtgctcggctgaacgcacaaggcagggttaatgcctggcaggcgaaggccaacaacaacaagcagtggttagaaatcgatttgcttaagatcaagaaaataaccgcaatcattactcagggctgtaagtccctgagcagtgagatgtatgtgaaaagttacaccatccactactcggaacagggggttgagtggaagccttatcgtctgaagtccagcatggtagacaagatattcgaggggaacacaaataccaaaggacacgtaaagaatttcttcaaccctccaatcatttccagatttattagggtgattccgaagacctggaaccagtctatcgctctccgcctggaactcttcggatgtgatatttac

SEQ ID NO: 9028 - DNA, 6672 bp, synthetic construct
  misc_feature 1..6672: note = source = /note="Description of Artificial Sequence: Synthetic coding sequence"
  source 1..6672: mol_type = other DNA
atgtttcccgggtgccctcggctgtgggtgctcgtagttctgggaacttcatgggtcgggtgggggtctcagggtacggaagccgcccaactgcgacagttctacgttgccgctcagggaatatcttggagttacaggcctgaaccaaccaactctagtctgaatctgagtgtgacgtcattcaagaaaatagtgtatcgcgagtacgaaccctattttaagaaggagaaacctcagagtactatctccggtttgctgggccccactttgtacgcagaggtgggcgacatcatcaaggtgcattttaagaataaagcagacaagcccctgagcatccacccccagggaataaggtactcaaaacttagcgagggtgcctcgtacttggaccatacttttcccgcagaaaaaatggatgatgctgttgctcccgggcgggaatatacttatgagtggtccattagcgaagactcgggccccacacatgatgaccctccgtgcctgactcatatctactactctcatgaaaatctcatcgaggattttaacagcggactcatcggtccgttgttgatttgcaaaaagggtacgctcactgaaggcggaacccagaagactttcgacaaacagattgtgctcctgttcgccgtgttcgacgagtccaagagttggtcccagtctagtagcctcatgtacaccgtcaacggctatgttaacggcactatgcccgatataacagtttgtgcgcacgaccacatcagttggcatctcctgggaatgagttctggtccagaacttttttctatacatttcaatgggcaggtcctcgagcagaatcatcacaaagtttcggctattacactcgtgagtgccacctctacaacagcaaacatgaccgtagggccagagggtaagtggatcatctcctctctgacacccaaacatctccaggcaggcatgcaagcatatattgatattaagaactgccctaaaaagacaagaaacctgaaaaaaatcacaagggaacaaaggcgccacatgaaacggtgggaatactttatcgctgcggaagaagtcatatgggactacgcacctgtcatcccggccaacatggacaagaaatacaggtcacaacaccttgacaacttcagcaaccagattggtaagcattacaagaaggtgatgtatacgcagtacgaagatgagtcttttactaagcatacagtcaatcctaacatgaaagaggacggcattctgggacccattatcagagcacaggtccgggacacactgaagatcgtatttaagaacatggcgtcccggccttacagcatttatccccatggcgtaacctttagcccatatgaggatgaagtaaactcaagttttacaagtggacggaacaataccatgattagagcggtacaacctggagaaacgtatacttacaaatggaacattctagaattcgacgagccaacggagaatgatgcacagtgcctgactcggccttattattctgatgtggatatcatgcgggacatcgcctctggcctcataggtttgctgctcatatgtaaatcaagaagtttagatcggcgcggcatccagagagccgctgatattgagcagcaggctgttttcgccgtttttgatgaaaataaatcttggtacttggaggacaacatcaacaagttttgtgaaaatcccgatgaagtcaagcgggatgatccgaagttctatgagtcaaatattatgagcacaatcaacggctatgttccagagtccatcactaccctgggcttttgtttcgatgatactgtccaatggcatttttgttccgtcggcacgcagaacgaaatccttacaattcactttactggccactcctttatttatgggaagagacacgaggatacgctcacactttttcctatgcggggtgagtccgttaccgtcacaatggacaacgtgggtacatggatgctgaccagcatgaactcttccccccgcagcaagaaactccggttgaagttccgtgacgtcaagtgcatcccagacgatgatgaggactcctatgagatctttgagccaccagagtccactgttatggccaccagaaagatgcacgataggctcgagccggaggacgaggagtctgatgctgattacgattaccaaaacagactggctgccgcactcgggatacggtcctttagaaatagttcgctaaatcaggaagaggaagagtttaatctaactgcccttgccttggagaatgggacggagttcgtttcaagtaacactgatataatcgtgggttccaactattcctctccatcaaacatctccaagtttaccgtaaataacctggctgagccacagaaggcccccagtcaccagcaggctactacagcaggttctccgctgcgacacctaatcggcaagaatagtgtgcttaacagctcgactgccgagcactctagtccatactcagaagacccaattgaagatcccctgcagccggatgtgacaggcattagactcttaagtctgggcgctggagagttcaagtcacaggagcatgccaaacacaagggtcccaaggtagagcgcgatcaggccgcaaaacatcgattctcctggatgaagctgttagcccacaaggtggggagacacctgtcacaagatactgggagccctagcggaatgaggccttgggaggatctgccatcccaggatactgggagtccatcccgaatgcgtccttggaaggatcccccatccgacctgttgctgttgaagcagtctaacagtagcaaaattctggtagggagatggcatctggcctcggagaaaggctcatatgagattattcaggataccgacgaggatacagcagtcaataactggctgatttctccccagaatgcctcccgtgcctggggcgagtctactcctctggctaacaagcctgggaagcagtcaggacaccctaaattcccccgcgtgcggcacaagagcctgcaagtgcgacaggatggtggcaaaagtcgcctaaagaagtcacagttcttaattaaaacacgcaaaaaaaagaaggagaaacatacccaccacgcccctctttcacctaggactttccacccgctaaggtcggaggcttataatacgttttcagaaaggcgtctcaagcacagcttagtcctccataaaagcaacgagacttccctcccaaccgacctgaatcaaaccctcccttccatggatttcgggtggatagcctcactccctgatcacaatcaaaacagctccaatgatacaggtcaggctagttgccctcccgggctgtatcagactgtgccaccagaggagcattaccagacattcccaatccaggaccctgatcagatgcacagtacttcagatcccagtcataggtccagctcacctgagctgtcagagatgctcgagtacgacagaagccacaagtcattccctactgatatcagtcagatgagtccatccagcgaacacgaggtctggcaaacagtgatctcacccgacctgtcccaggtcaccctgtcacctgagctttcccagactaacctgtctccagatctgtcacacacaacactgtcccccgaattaatccagaggaacctgtctccggcattaggccagatgccgatcagccccgatctgagccacacaacactgtctccggatctttcccatacgaccctttcgttagacctctctcagaccaatttaagtcccgagctgagccaaaccaatctttcgcctgccctgggccagatgccattgtcccccgatctctctcacactacgctgagtttagactttagtcaaaccaacctcagtcctgagcttagccacatgactctatctcctgaactgagccagacaaacctgtccccagcactgggccagatgcccatctcccctgatctgagccacacgacactcagccttgacttctctcagacaaacctttcccccgagctgagccagaccaatttgagcccagccttgggccaaatgccactttctcccgatccgtcgcacaccacactgagtctggacttgtcacagactaacttatcccctgagctgtcccaaacaaatttgtcgccggacctgtccgaaatgcccctattcgccgacttatctcagattccacttacccctgacctggaccaaatgacgttaagcccagaccttggggaaacagatctttcacctaatttcgggcaaatgtccctatcccccgatctgagccaggtgacactgtctcccgatatttcagacaccaccctgctacctgacctctctcaaataagcccgccaccggacctggaccaaatcttctacccctctgaaagctcgcagagtcttctgctgcaggaatttaatgagagttttccttaccctgacctggggcagatgccaagcccatcatcgcccaccttgaacgacacattccttagcaaggaattcaatccgctggttatcgtcgggctgtcaaaggatggcaccgactatatcgagatcatccccaaggaggaggtccaatcttcggaggacgattacgcggaaatcgattacgtcccttatgacgatccatacaagactgatgtaaggacaaatatcaattctagtcgggaccctgataacatcgctgcctggtatctcagatctaataatggtaacaggcggaattactacattgctgctgaggagatctcgtgggattattcggagttcgtacagcgggaaactgacatcgaagactctgatgatattccagaagatacaacctacaaaaaagtggtcttccgcaaatatcttgattccacgtttactaaacgtgaccctcgcggggagtatgaggaacatttaggaattctgggccctatcatccgagccgaggtcgacgatgtcatccaggtacgatttaagaacctcgcgtctagaccctacagtttacacgcgcatgggttgtcatacgagaagtcttccgagggaaagacatatgaagatgacagtcccgagtggtttaaggaggataatgcggtccagcctaattccagttatacttacgtgtggcatgccacggagaggtcgggcccagaatctcccggatccgcttgcagagcatgggcctattacagtgctgtgaacccagagaaagatatacactccggattaataggccctcttctcatctgtcagaagggcatactacacaaggattctaacatgccaatggacatgagggagtttgttctgctatttatgactttcgacgagaaaaagagctggtactacgaaaagaaaagtcgatccagctggagactgacttcctcagagatgaaaaaaagccacgaattccatgctatcaacgggatgatctacagcctcccaggattaaaaatgtacgaacaagaatgggtgcgcctgcacttgctaaacattgggggttcacaggacatccatgtggtccatttccacggccagacactcttagaaaatggcaataagcagcatcagctgggggtttggcccttactgcctggatcctttaaaacgctggagatgaaggcgagtaaacccggctggtggctgctgaacacggaggtcggagagaatcaacgggccggtatgcagacaccatttctgatcatggacagggactgtaggatgcccatggggctgtcgacggggattatctcggattcacaaattaaagcaagcgagttcctgggttactgggagccccgattagcccggttaaacaacgggggcagttataacgcttggtccgtggagaagcttgctgctgagttcgcctcaaaaccctggatacaagttgacatgcagaaggaagtgattatcaccgggatccagacacagggggcaaaacattatctgaagagctgctacactactgaattctatgtggcatactcgtccaaccagattaattggcaaatctttaagggcaattctacccgcaacgtgatgtacttcaacgggaactccgacgcttcgaccataaaggagaaccagttcgatcctccaatcgtagctaggtacatcagaatatccccaacgcgggcctacaacagacctacactcagattggagttgcagggctgcgaagtgaacggatgttctacccccctcggtatggaaaacggaaagatagagaataaacagattacggcgagcagctttaaaaaatcctggtggggggattattgggagcctttccgggcaagactgaacgcacaggggagagtgaacgcttggcaagccaaagctaacaataacaaacaatggctcgagatagatcttctaaagatcaaaaagattacagcaatcatcacgcaagggtgcaagagcctgtctagcgagatgtacgtcaaaagctatacgatccattactctgaacagggagttgaatggaaaccctaccgtctcaaatcatctatggtagacaagatttttgagggcaacaccaataccaagggacacgttaagaactttttcaatccaccaatcatttctagatttatacgggtaatccctaagacctggaaccagagcatagcactccgactggagcttttcggatgtgatatttat

SEQ ID NO: 9029 - DNA, 6672 bp, synthetic construct
  misc_feature 1..6672: note = source = /note="Description of Artificial Sequence: Synthetic coding sequence"
  source 1..6672: mol_type = other DNA
atgtttcctggatgtccccgactctgggtgctggtcgtcctgggaacttcctgggtggggtggggatcgcaaggaactgaagctgcgcaactgcgccaattctacgtagcggctcagggaatctcatggtcgtaccggccggaaccaactaattcgtccctcaacctgtctgtcacctcgttcaagaagatcgtgtaccgcgaatatgagccatacttcaagaaggaaaaaccgcaaagcactatctcgggactgctggggcccacgctttacgcagaagtcggagacattatcaaggtgcatttcaagaataaggcggataagccgctgtccatccaccctcaaggcatccggtactccaaactgagcgagggggcctcctacttggaccacacctttccggccgagaagatggacgacgctgtggcgcccggacgggagtacacgtacgagtggtccatctcggaagatagcgggcctacccacgatgacccgccctgccttacccacatctactactcccacgagaacctgatcgaggatttcaattcgggcctcatcgggccacttctgatctgcaaaaaaggaactctgactgagggaggaactcagaaaacttttgacaagcaaatcgtgcttttgttcgctgtgttcgatgaaagcaagtcttggtcccaatcgtcgtcgctgatgtataccgtgaacgggtacgtgaacggaaccatgcccgacatcaccgtatgtgcccacgaccatattagctggcatctgctgggcatgtcctccggaccggaactgttttcgatccatttcaatggacaggtgctggaacaaaaccaccacaaagtttcagcgattaccctggtgtccgccacctccacgactgcgaacatgaccgtcggaccggaggggaagtggataatctcgtccctgaccccaaaacacttgcaggcagggatgcaagcctacatcgatatcaaaaactgccctaagaaaacccggaacctgaagaagataactagggaacagcgtcggcatatgaagagatgggaatacttcatcgctgcggaagaagtgatctgggattacgcaccggtgatcccggcgaacatggacaagaaataccgctcgcagcatctcgacaatttctccaatcagatcggcaaacactataagaaggtgatgtacacccagtacgaggacgaatcgttcaccaagcacacggtgaatcctaatatgaaggaggacggaatcctcggcccaatcatccgagcgcaggtccgcgacaccctgaagatcgttttcaagaatatggcctcacggccttactcgatctaccctcacggagtcaccttttcgccttacgaagatgaggtgaacagcagctttacttcgggacggaataacaccatgatccgggcagtgcagcccggcgaaacttacacctacaagtggaacattctggagttcgatgagcctaccgagaacgacgcccagtgcctcaccaggccctactattctgatgtggacattatgcgggacatcgcctcaggacttatcggcttgctgcttatctgcaaaagtagatctctcgacagacgcggcatccagagagccgctgatatcgaacaacaggcggtctttgccgtgttcgacgaaaacaaatcgtggtacctggaggacaacattaacaaattctgtgagaacccggacgaagtgaaacgcgatgacccgaaattctacgagtccaacatcatgtcgaccatcaacggttatgtgccagaatccatcaccaccctgggcttttgcttcgacgataccgtccagtggcatttctgttcggttggcacccaaaacgagatcctcaccatccattttactggacactccttcatctacggcaagcgccacgaagatacccttacgctgttcccaatgaggggcgagtctgtgaccgtgaccatggataacgtgggtacctggatgctcacgtcgatgaacagttcgccgcgctcgaagaaacttcggctgaaatttcgcgatgttaaatgcatcccggacgatgatgaggactcatacgaaatctttgagccgccggaatcaaccgtcatggccacccgcaaaatgcacgaccgcctggaaccggaggatgaggaatccgacgccgattacgactaccaaaaccggctggcggcagccctgggaatccgctcgttcagaaattcgtccttgaatcaggaagaagaagaattcaacctgactgccctcgctctcgaaaatggaacggaatttgtctccagcaataccgacatcatcgtgggatccaactactcatccccgtcgaacataagtaaattcactgtgaacaatctcgccgagccacagaaggccccgtcgcaccaacaggctaccaccgctggttcaccactgcgccacctgattggcaagaactcggtgcttaattcatccacggcggaacattcatccccatacagcgaagatcctatcgaagatccgctgcagccggacgtgactggtattcggcttctgtcgctgggagccggagagtttaagtcacaagagcacgcaaagcacaagggacctaaggtcgaaagagatcaggctgctaagcatagattcagctggatgaaattgctggcgcataaagtggggaggcacctgtcccaggacactggaagcccgtcggggatgcgcccatgggaggacttgccttcccaggacaccggatcgccttcccgcatgcgcccttggaaggacccgccgtccgacctgcttctgttgaagcaaagcaattcatctaagattctcgtcggacgctggcatctggcgtcagaaaaggggtcgtatgaaatcattcaggatactgacgaggataccgcagtcaacaattggttgatctcgccacagaacgcgtcgagggcatggggggaatccactccgctggccaacaaaccgggaaagcagagcggtcatccaaagttcccgcgggttagacacaagtccctgcaggtgcgccaagacgggggaaagtcccgcctcaagaagtcgcaattcctgatcaagaccagaaagaagaagaaggaaaagcacactcatcatgccccgctgtcgccaagaactttccatccgctccgctcagaggcgtacaacactttctccgaacggcgcttgaagcacagccttgtgcttcataagtccaatgaaactagcctgccgaccgaccttaaccagactctgccatccatggacttcgggtggatcgccagcctgcctgatcacaatcaaaatagctcgaacgacaccggtcaagctagttgtccgccgggactgtatcagactgtcccgccggaagaacattaccagactttcccgatccaggacccagatcagatgcactcgacctcggacccgtcgcaccgctcgtccagcccagaactcagcgagatgctcgagtacgacaggtcgcacaagtcgttcccgactgacatctcccagatgtcgccaagcagcgagcacgaggtgtggcagaccgtgatttccccggatttgagtcaggtcacgctgtcaccggaactttcccagacgaacttgtccccagacctcagccacaccaccctgagccccgaactcatccagagaaatctgtcaccggcccttgggcaaatgcctattagtcccgacctctcccacactacgctctcaccagatctgtcacacaccactctgagtttggacctgtcccagactaatctctcgccggagctgagccagacgaacctgtcaccagcccttggccaaatgccgctgtcaccagacctttcccacaccactttgtctctggatttttctcagactaacctttccccagagctctcacacatgaccctctcaccagaacttagccaaacgaacctttctcccgccctgggtcagatgccgatatcacccgacctgtcacacacgacgctgtccctcgacttctcgcagacgaacctcagccctgaactctctcagacgaatctttcacccgcactggggcaaatgccgctctcccccgacccctcgcatactaccctctcgctggatttgtcgcaaactaacctctcgcccgagctgtcacagactaatctgtcgccggacctgagtgagatgccactttttgccgatctcagccagatccctctgaccccggatctggaccaaatgaccttgtcgccagatttgggtgaaactgacctcagccctaactttggacagatgagcctctctcctgacctgagccaggtcactcttagcccggacatatctgataccaccctgctgccagatctctcgcaaatcagccctccgcctgacctggatcagatcttctacccctctgaatcaagccagtcgttgctgctgcaggaattcaatgaatcattcccgtaccccgacttgggacagatgccttcaccgagttcaccaactctgaacgatactttcctctccaaagagttcaatcctctcgtgatcgtgggcctgtccaaggacggaaccgactacattgagattatcccaaaggaagaagtccagagttccgaagatgattacgctgaaatcgattacgtgccgtacgacgatccatacaagactgacgtgcgcaccaacatcaactcgagccgggacccggataacatcgccgcctggtacctgaggagtaataacggcaatcggcgcaattactacatcgcagcagaggagatttcatgggattactccgaattcgtgcagcgagagactgacattgaagatagcgacgacatccctgaggatactacctacaagaaggtggtgttccgcaagtacctcgattcaactttcaccaaacgcgacccaaggggtgagtacgaagagcatctgggcatcctgggaccgatcatcagagccgaagtcgacgacgtgatccaagtcagattcaagaacctggcctcaagaccgtacagcttgcacgctcacggcctgtcatacgagaagtcgtccgaaggcaagacctacgaagatgactcgcctgagtggttcaaggaagataacgcggtgcagcctaactcctcctacacttacgtgtggcatgcaactgaaagaagcggtccggagtcaccgggttccgcctgccgtgcctgggcctactacagcgcggtgaacccagagaaagatatccactccggtctgatcggacctctgctcatctgccagaaaggaatcctgcataaagactcgaacatgccgatggacatgcgggaattcgtcctgctctttatgactttcgatgagaagaaatcctggtactatgaaaagaagtctcggtcctcgtggcggctcaccagcagcgaaatgaaaaagtcccacgaatttcatgccattaatgggatgatttactcgctccctggactcaagatgtacgaacaagaatgggtgcgcctgcacctgctgaatatcggaggatcacaggacatccacgtcgtgcatttccatggtcaaacgctgctcgaaaacggaaacaagcagcatcagctgggagtgtggccgctgctcccgggatcgttcaagactctggagatgaaggcatcaaagccaggatggtggctgctgaatactgaggtgggcgagaatcagcgcgctggaatgcaaaccccattcctcatcatggatagagattgccggatgccaatgggtctgagcactggaatcatttccgattcgcagattaaagcatccgagttccttggctactgggagccgcggttggcaagactcaataatggcggctcatataacgcttggtccgtcgagaagctcgcggccgaatttgcatcgaagccgtggatccaggtggacatgcagaaggaggtgatcattactggaattcagacccaaggcgcgaagcattacctcaaatcttgctacaccactgagttttacgtggcttacagctcaaaccaaatcaactggcaaatctttaagggaaactctacccgaaacgtgatgtactttaacggcaattcagacgcctcgaccatcaaagaaaaccaattcgacccgcccatcgttgcaaggtacatccggatcagcccaactcgggcgtacaaccgcccaaccctcagactggaactgcagggctgcgaggtgaatggatgttcgactcctttgggaatggaaaacggaaagatcgagaacaagcagatcactgcctcatcgttcaaaaagagttggtggggcgactactgggaaccgtttcgggccaggctcaatgctcagggacgggtgaacgcctggcaagccaaggcgaacaacaacaaacaatggctggagatcgacttgctcaaaatcaaaaagataaccgcaatcatcactcagggttgcaagagcctgtccagcgagatgtacgtcaagtcgtacaccatccactactcagaacaaggcgtggaatggaaaccctatcgcctcaagagcagtatggtggacaaaatcttcgagggaaacaccaacaccaagggacacgtcaagaatttcttcaatccgccaatcatcagccggttcatccgcgtcatccctaagacttggaatcaatcaattgcactgcggctcgaactcttcggctgcgacatctac

SEQ ID NO: 9030 - DNA, 6672 bp, synthetic construct
  misc_feature 1..6672: note = source = /note="Description of Artificial Sequence: Synthetic coding sequence"
  source 1..6672: mol_type = other DNA
atgtttccggggtgccccagattgtgggtgcttgttgtcctgggaacaagctgggtgggctggggatcccaggggacagaagcagcccaacttcgccaattttacgttgccgcgcagggcataagctggtcttaccgccccgaacccacaaactccagtctgaatctgtctgtgacttcatttaaaaagatcgtttaccgggagtacgagccatatttcaaaaaggagaaaccacagagtaccatttcaggactgttgggacctaccttgtacgccgaggtcggcgatatcataaaagtgcactttaaaaacaaggccgacaagcccctgtccattcatccacagggcatccgatatagtaagctgtctgagggtgcaagttacctggaccacactttccccgccgaaaaaatggatgatgcagtggcacctgggcgggaatatacctatgagtggtccatctcagaagacagtggtcccacacacgatgacccaccctgtctgacacacatctattattcccacgagaatttgatcgaagattttaacagtgggcttatcggccctctcctcatctgcaagaaaggaactctgactgaaggcggcacacagaagaccttcgacaaacagatagttttactatttgccgtctttgatgaatctaagtcctggagccagagcagctcactgatgtatactgtgaatggctatgtaaacgggacaatgcctgatatcaccgtgtgcgcccacgatcatatcagttggcatctgctggggatgagcagcggtccagagctcttttccattcatttcaatggacaagttctggaacagaatcatcacaaggtttcagctatcacactggtctcagccacgagcacaacagccaacatgaccgtcggaccagagggtaagtggattatttcgagtctcactcctaaacacctgcaagcggggatgcaggcatatatcgatataaaaaattgtcccaagaaaacgcgcaatctcaaaaagatcacgcgggagcaacggaggcacatgaaaaggtgggaatacttcattgccgccgaggaagtcatctgggactatgcacctgtgatccccgccaatatggacaagaaatatcgatcccagcatctagataatttcagcaatcagattggaaagcattacaaaaaggtgatgtatacacagtacgaggacgagtcgttcacgaagcataccgttaatcctaatatgaaggaagatggtatcctgggacctatcatccgagcgcaagtgagggacaccctgaaaattgtcttcaaaaacatggccagtagaccatattcaatttatcctcatggggttacctttagcccatacgaggatgaagtgaacagctcctttaccagcggtcggaacaatacaatgatcagagctgtccagcctggagagacctacacctataagtggaacatactcgaattcgacgaacccacagagaacgacgcccaatgtctgacccggccttactattcagacgttgatatcatgcgagatattgcctcgggattaatcggcctcctgctcatttgtaagtctcgaagcttggacagacgtgggattcaacgcgctgctgatattgaacagcaggctgtatttgccgtcttcgacgaaaacaagtcatggtacctcgaggacaacatcaataaattttgcgaaaaccctgatgaagtgaagagggacgatcccaagttctacgagtctaacatcatgagcaccatcaacggatacgttcccgaaagtataacaacactgggcttttgctttgacgatacggtgcagtggcatttttgttcggtgggaacccaaaacgaaatcctcacaattcactttacaggtcacagtttcatctacggtaaacgacacgaagataccctgaccctgttccccatgagaggtgagtctgtgactgtcaccatggataatgtggggacatggatgctcacttcaatgaactcttctcccaggtcgaagaagctgcgccttaagttcagggatgtcaagtgtatcccggacgatgacgaggactcttacgagatcttcgaacctccagaatcaactgttatggccacacggaaaatgcacgaccgcctggaaccagaagatgaggagtccgacgcagattatgattatcagaaccgcctcgccgccgctctcggcataaggagcttccgcaattcctctctcaatcaggaggaggaggagttcaatctgaccgcgttagccctagaaaacggcacagagtttgtatcttccaataccgatatcatcgtgggctcgaactacagtagcccaagtaacatctccaagttcactgtgaataatcttgccgagcctcagaaggcaccaagccaccagcaggctaccaccgccggtagcccattgcgtcatcttataggaaagaattccgtcctgaatagcagcactgccgaacattcgagcccatacagcgaggacccaattgaggatcctctccaacccgacgtgaccggcatcaggctcctgtctctcggagccggggagtttaagtctcaggagcatgcaaaacataagggacctaaagtggaacgtgatcaggccgccaaacatcggttcagctggatgaagctcctagcacacaaggtggggcggcatctgagccaggacactgggtctccatctggcatgagaccatgggaggacctgccctctcaggacaccggtagccctagccggatgcgcccgtggaaagatccaccgtctgacctcctgctgttgaagcagagcaattcctcaaagattctggttggacgctggcaccttgcttcagagaaagggtcgtacgaaattatccaggacacagatgaagacactgccgtcaataattggctgatttcgccccaaaatgcgtctcgagcgtggggcgagagtacccctttggccaataagccgggaaaacaaagcggacatccaaaattcccacgcgtcaggcacaagtctctccaggtaaggcaagacggcggtaaatcaagactcaagaagagtcagtttttgataaaaacacgcaaaaagaagaaggagaagcacacccatcatgcccccctctctccaagaacattccacccgctgcggtccgaggcctataacacgttttccgaacggagactgaagcactccttagttctgcataagtcaaatgaaacatccttgccaaccgatcttaatcaaacgctgccgagcatggactttggttggatcgcaagcctcccggaccacaaccagaatagctcaaacgacacaggtcaggcctcatgccccccaggcctgtatcagactgtcccaccagaagagcactaccagacttttcctattcaggaccccgaccaaatgcactccacatctgacccgtcccaccggtcatcctcacctgagctgagcgagatgttggagtatgatagaagccataaaagctttccaaccgacatctctcagatgtccccatccagtgaacacgaggtctggcagaccgtaattagcccagatctaagtcaggtcacactgagcccagaactgtcccagactaatttaagtcctgatttgagtcacacaaccctgtcacccgagttgattcagagaaatctgtccccagctctggggcaaatgccaatctcaccagatctaagtcacaccacgctctcgccggatttatcgcataccacattgagtcttgacctgtcccagacaaacctttctcctgagctgtcccagaccaatctcagccccgctttagggcagatgccgttgtctccagatctaagccacaccactctgtcccttgatttctcccagacgaatctttcgcctgagcttagtcacatgacgctcagtcctgaactttcccagacaaatctgagcccggcgttgggtcagatgcccatcagcccggatctaagtcatacaacgctatctctggatttctcccagaccaacctctccccagagctgtcccagacaaatctcagtcccgccctgggtcagatgccactgtcccccgacccgtcccatacaaccctctcgcttgatctgtcccaaaccaacttatcccctgaattgtcacagacaaacctgagtccggatttgtccgaaatgccactctttgcggatctcagccagatcccattgacgccagatcttgatcagatgacactcagtccggatctcggcgagacagatttgtcccccaacttcggccaaatgtccctctcgcccgatctctcacaggtgaccctgagtcctgacatttcggatactacgctgctgccagatctcagtcagatcagtccaccccccgacctggaccaaatattttacccctcagagagcagtcagagcctcctgctgcaggaattcaatgagtcctttccttacccggacctcggacagatgccctccccatcatctcccacattaaatgacacatttctgtccaaagagtttaatcctctggtcatcgtaggtctgagtaaggatggaactgattacattgaaataattcctaaagaagaggtccaatctagcgaagacgattatgcggaaatcgattatgtgccttatgacgatccttacaaaacagacgtcaggacaaatattaactccagcagagacccagataacatcgccgcctggtacttacgatccaataacggtaacagacgtaactactatatagcagctgaagaaatatcatgggactatagcgaattcgtgcaacgggagacagatattgaggactcagatgatatcccagaggacaccacttacaagaaggtggttttccgaaaatacctggactcaaccttcactaagagggatccccggggcgagtacgaagagcaccttgggattctggggcctattatacgggcggaggtggatgatgtaatccaggtccgttttaaaaacctcgcgagccgaccctacagcctgcacgcccacggcctcagctacgagaaaagttcggagggcaaaacgtatgaagatgatagtcctgaatggtttaaagaagacaacgctgtacagcccaactcatcttatacctatgtgtggcacgccacggaaaggtccggacccgagagcccaggctcagcttgtagggcctgggcatactactccgcagtcaaccctgagaaggacatccactcagggctgatcgggccactgctgatctgtcagaagggaatcctacacaaagactctaacatgcctatggatatgcgcgaatttgtgctgctgtttatgacatttgacgaaaaaaagtcgtggtactacgaaaaaaagtcccgatcaagttggcgtctgacgtcctcagaaatgaagaaaagccatgaattccatgctatcaacgggatgatctactccttgcccgggctgaagatgtacgagcaggagtgggtgaggctgcacctacttaacatcggcggcagccaagacatccacgtagtgcactttcacgggcagacgctgttggagaacggaaataagcagcaccaactcggagtgtggccattacttcccggttcatttaagaccttggagatgaaggctagtaagcctgggtggtggctgctcaatacagaagtcggggaaaaccagcgggctgggatgcagaccccattcttaattatggatagagactgtagaatgccaatgggcctgtcgacggggattatctctgattcacagatcaaagcgtccgagttcctcggttactgggaaccacggttggctcggctgaacaacggaggcagctataatgcgtggtccgttgaaaagctggctgccgagttcgcgtccaagccttggatccaagttgatatgcagaaagaggttatcatcacagggatccagactcaaggcgcaaaacactatttgaagtcttgttataccaccgagttttacgtggcttactcttctaatcagatcaattggcaaatatttaaagggaattctactcgcaacgtcatgtacttcaacggtaactctgacgcgagtactataaaggagaatcaatttgacccccccatagtggctcgctacatcaggatcagcccaactcgcgcttataaccgcccgacactgaggttggagctgcagggttgcgaggtgaacggatgctcgactcccttgggaatggagaacgggaaaatcgaaaacaaacaaattactgcttcttcctttaaaaagtcctggtggggcgactattgggaacctttcagggctcgcctgaatgcacaggggagggtcaatgcctggcaggcgaaggcgaataataataaacagtggcttgagatcgacttactgaagatcaagaagatcaccgctattatcacccagggctgcaagtcactcagctcagagatgtatgtaaaaagttatactatccactattctgagcaaggggtcgagtggaaaccatacagactaaaaagttcgatggttgacaaaatcttcgagggaaacacgaacaccaaaggacatgtgaaaaatttcttcaacccccccattatttctcggtttattcgagtgattccgaaaacatggaaccaatccattgcacttcgtctagaattgtttgggtgtgacatctat

SEQ ID NO: 9031 - DNA, 6672 bp, synthetic construct
  misc_feature 1..6672: note = source = /note="Description of Artificial Sequence: Synthetic coding sequence"
  source 1..6672: mol_type = other DNA
atgtttcctggatgccctaggctgtgggttctcgtggtacttggtacaagctgggtgggatggggatctcaaggaactgaagctgctcagctacgacaattctacgttgcagcccagggaattagttggtcttatagaccagaaccaacaaactcaagtctaaacctgtcagtgacaagcttcaaaaagatagtgtaccgggaatatgaaccttacttcaagaaagagaaacctcagtctacaatcagtggactcctcggccccaccctgtatgctgaagttggggacatcatcaaggtccatttcaagaacaaggctgataagcccttaagtatccaccctcagggaatccggtatagtaagttaagcgagggggcctcttacctggatcataccttcccagctgaaaaaatggacgatgctgtggcccccgggagggagtacacgtatgagtggagcatatctgaagactccggtcctacccacgacgaccccccttgtctcacacacatttattacagccatgagaacctgatagaagactttaactctggattgatcgggcccctgctgatttgcaaaaagggcaccttaaccgagggaggtactcagaagacatttgataagcagatcgtcctacttttcgccgtcttcgacgaaagcaagtcctggagccaatcaagtagtttgatgtatacagtcaatggatatgtgaatggaactatgcccgatattactgtgtgcgcgcacgaccatatcagctggcaccttctgggcatgagtagcggtcctgaactgttcagtatacattttaatgggcaggtgctggaacagaaccaccataaagtgagtgctataaccttggttagcgccacttcaaccacggccaacatgacggttgggcctgagggaaagtggatcatttcaagccttacacctaaacacctgcaggcgggcatgcaggcctacattgatatcaaaaattgtcccaagaaaactcggaacctgaagaagataacacgcgaacaaaggcggcacatgaaaaggtgggagtactttattgctgctgaagaggtcatctgggactatgcgcctgtcataccagctaacatggataaaaaatacaggagtcagcatctagataacttctccaaccaaataggcaaacactataagaaggtaatgtatactcaatatgaggacgagagttttacaaagcataccgtcaatcccaatatgaaggaggacggtattttgggcccaatcattagagctcaggtcagggatacactgaaaatagtttttaagaacatggcttcccggccctactcaatctacccacatggcgtaaccttctccccttacgaggatgaggttaactccagcttcactagcggcaggaataatacaatgatcagggcagtgcagcccggtgaaacatatacctacaagtggaacatactggagttcgacgagccaaccgagaacgatgcccagtgtctgacacgaccctattattcagatgtagatatcatgcgggacattgctagtgggctgattggactcctgctgatttgtaagagcaggagcttagacaggcgcgggattcagcgcgccgcagacatagaacagcaagccgtatttgcagtctttgatgagaacaagtcttggtatctggaagataatatcaataagttctgtgaaaaccccgacgaagttaagagggacgatccaaaattttacgagagtaatataatgtcaacaattaacggatatgtaccagagagcattactactcttggattctgcttcgatgatacagtccagtggcacttttgcagcgtgggcacgcagaatgaaattttgacaatccactttactggacatagtttcatctatgggaagagacacgaagatactctaaccctgtttcccatgcgcggggagtcagtcactgtaaccatggataacgtaggaacttggatgttgacatccatgaactcctcaccgagatctaaaaagctgcgacttaagttcagagatgttaagtgtatacctgacgatgacgaggactcttacgagatatttgagcctccagagtccaccgttatggccactcgcaagatgcacgatagactggagccagaagacgaggagtccgatgcagattacgactatcagaaccggctggctgcagctctggggataagaagtttccggaacagtagtctgaatcaggaggaagaagagtttaacctgacagcgctagctctcgaaaatggcactgagtttgtgtcttctaacacagacatcatcgtaggcagtaattattcatctccaagtaatatatcaaagttcacggttaataatcttgccgaaccacagaaagcaccgtctcaccaacaggctacgaccgctggatcccctctgagacatctcattggcaaaaactccgtcttgaactcctctaccgcagaacactccagcccctatagtgaggatccaattgaagaccccctgcagccagacgttactgggatccggctgctgtcccttggggccggggagtttaagagccaagagcacgccaagcacaagggaccaaaggtcgagcgggatcaggcagccaaacaccgcttttcctggatgaaactgcttgcgcataaggtcggccgacatctatcccaggataccgggtcacctagtggcatgcgaccctgggaggatttgccaagtcaggatactggttcaccttcacgcatgaggccctggaaggatccaccttccgaccttctactgctcaagcagtctaacagttctaagatcctcgtgggtagatggcacctggcctctgagaaaggctcttatgagataatccaggacaccgatgaagataccgcagttaacaactggttgatttcacctcaaaatgccagcagagcctggggggagtccactcccctggccaataagccgggcaagcagtcaggacaccctaagttccccagagtaaggcacaagtccctgcaggttcggcaggatggaggcaagtcgcgactgaagaagagccagttcttaattaaaacgagaaaaaaaaagaaggaaaaacacactcaccatgcacccttaagcccccgcacattccaccccctgcgctccgaagcttacaatacattttccgagcgaagactcaagcatagcctggtccttcacaaaagcaacgagaccagtctgcccactgatcttaaccaaactctaccttctatggattttggatggatagcgagccttccggatcacaatcagaacagcagtaatgataccggccaggccagttgtccaccaggcctatatcagaccgttccacctgaggagcattatcagactttccccatacaggaccctgatcaaatgcattccactagcgacccgtcccaccggagctcatcccctgaactctcagaaatgttagaatacgaccggagccacaaaagctttccaactgacatatcacaaatgtctccgagttctgagcatgaggtgtggcagactgtgatctccccagatctttctcaagttactctgagtccagagctaagtcagaccaacctatctccggacttaagtcacactactctgtcaccggaattaatccagagaaatctgagtcccgcccttggacagatgcccatctctccggacctgagccatacgactctttcccccgatttaagccataccactctgagtctcgacctgtcccagacaaatctgtccccggagctgtcacagacaaacctgagccctgccctaggccagatgcctttgagcccagacctcagtcacaccaccttatcactggattttagccagaccaatttgtcgcccgagctgtctcacatgacgttatcacccgagctgtcccagaccaatctgagcccagccctcggccagatgcctatctctcctgacttgtcgcatacaacactttctctggacttttcccagactaatctgtctccagaactgagtcagactaatcttagtccagccctcggccagatgcccctgagcccagacccgtctcacaccacattaagtctggacctctcacagaccaatctttcgccagaactcagtcaaaccaatctttcccctgacctttccgagatgcccctctttgcagacctgagtcagatccccttgacccccgacttggatcagatgacgctctcaccagacttaggggaaacggatctcagccctaatttcgggcaaatgtcactctccccagacttgagtcaggttactttatcaccagatatctccgacaccacattgctccccgacctgtctcagatatctcctcccccagatctggaccagatattctaccccagcgagtccagccagtctcttctcttgcaggagttcaacgagagctttccataccctgacctgggccagatgcctagtccgagcagcccaacactgaatgacacgtttctttccaaggagttcaaccctttggtcatagtgggcctctcgaaggacggtacagactacatcgagatcattcctaaagaagaggttcaaagttccgaagacgactatgcggagattgactatgtgccatatgacgatccctacaagaccgacgtacgtacaaacatcaattctagcagagatccggacaacatagcagcctggtacctccgatcgaacaatggaaacagacgcaattattatatcgccgcagaagaaatttcatgggactactctgagttcgtccagcgggaaaccgacatcgaagacagcgacgacataccagaagatacaacttacaaaaaagtggtcttcagaaagtacctggatagcacattcacaaaacgggatcctagaggagaatacgaggagcacctcggtatccttggccccattattcgggctgaagttgatgatgtgattcaagttaggtttaagaatctggcttcccgtccctactctctgcacgctcatggcctgagctatgagaagtcatccgaaggaaaaacctacgaggacgacagccccgaatggttcaaagaggacaacgccgttcagcctaacagctcatatacgtacgtgtggcacgccaccgagcgctctggtcccgagagccctggctccgcatgtcgggcatgggcttattactcagctgttaaccctgaaaaagatatccatagtgggttgattggaccactcctcatatgccaaaagggcatcctacacaaggactccaatatgcctatggatatgcgggaattcgtgctgctgtttatgactttcgatgagaagaagtcatggtactatgaaaagaaatctcgctcttcctggagacttacctcatccgagatgaagaaatcgcatgagttccacgccatcaacggaatgatctacagccttcccggtctaaaaatgtatgagcaggaatgggtgcgactccatctgctgaacatcggagggtcccaagatatccacgtagtgcactttcatggtcagactctgctggagaacggaaataaacaacaccaactaggtgtctggccgctcctgcccgggtccttcaaaactctcgaaatgaaggcttccaaaccgggctggtggctacttaacacagaggttggagagaatcagcgcgcggggatgcaaacccccttcctgataatggacagggattgccgcatgcctatggggctctctacaggaatcataagcgattcacagatcaaggcttcagaatttctggggtattgggaaccacgattggcccgcctgaacaacgggggctcttataacgcttggtcggtggaaaaactggctgccgaattcgctagcaagccctggatccaggtggatatgcagaaagaagtcatcatcaccggaattcagacccaaggggccaagcactatctcaaatcatgctatactactgagttttacgttgcttatagctctaaccagattaattggcagatctttaagggcaactcaactcgaaatgtgatgtactttaacggaaactctgacgcttcgacgattaaggagaaccagtttgaccctcctattgttgccaggtacatccggatcagccccaccagggcatacaatcggccaaccttacggctggagcttcagggttgcgaagtgaatggctgttcaactcctcttggtatggagaatggcaaaatcgaaaacaaacaaatcaccgctagcagctttaagaagtcttggtggggagactactgggaacctttccgcgccagactgaacgcacaggggagggtgaacgcttggcaggctaaagccaacaacaataagcagtggctagagatagacttactgaagatcaaaaagattacggcaatcattactcaggggtgtaaatccttgtcatccgagatgtacgtaaagtcgtacacaattcattactcggaacagggcgttgagtggaagccgtaccgattgaagtcctcgatggtggacaagatcttcgaggggaataccaataccaagggtcatgtaaagaatttctttaatccccctatcatttctagattcatacgcgttattccgaaaacctggaaccagtcgatcgcactgcgattagaactttttggatgcgatatctac

SEQ ID NO: 9032 - DNA, 6672 bp, synthetic construct
  misc_feature 1..6672: note = source = /note="Description of Artificial Sequence: Synthetic coding sequence"
  source 1..6672: mol_type = other DNA
atgtttcctggttgccctagattatgggtgctggtggtcttaggaacttcttgggtgggctgggggagtcaagggacggaagctgcacagctccgacagttctatgttgccgcacagggaatatcctggtcctatcgccccgagccaacaaatagctcccttaatctcagcgtgaccagtttcaagaaaatagtctacagagagtatgagccttattttaagaaggaaaagcctcagtccacaatctcagggctgctgggacctaccctctatgcggaggtgggagatatcattaaggtgcacttcaagaacaaggcagacaagcccttatcgatccatccccaaggcattcgctactccaaactgagcgagggcgctagctaccttgaccacacctttccagctgaaaagatggacgatgccgtagcacctgggagggaatatacttatgagtggagcatttctgaggattccggtccgactcacgatgaccctccctgtctgactcatatttattacagtcatgagaacctgatcgaagacttcaacagtggtctcatcggcccacttctgatctgtaagaagggcaccctgacggaggggggaacccagaagaccttcgataagcagatagtgttactctttgcggttttcgacgaatccaagagctggagccagagcagttctctgatgtatactgtgaacggctacgtaaacggcactatgcccgatatcaccgtgtgtgcccatgatcacataagctggcacctgctggggatgagtagcggccccgagcttttttccatacattttaacggccaagtcctggagcagaaccaccacaaggtgtccgcaattaccctggtgagcgcaaccagcaccactgccaatatgaccgtaggacctgaaggtaaatggatcatctcctccttaacaccgaagcacctgcaggccgggatgcaggcctatatcgacatcaagaattgtcccaagaagaccagaaatcttaagaaaattacccgcgagcagcgtcggcatatgaaacgctgggaatacttcatcgcggcagaagaagtcatctgggattacgccccggttataccagcgaatatggacaagaagtacagaagccagcacctcgacaacttcagcaatcagattgggaagcactataagaaggtgatgtacacacaatacgaggacgagtccttcacaaagcataccgtgaacccaaatatgaaggaggacggcatcctggggcccattatcagggcacaggtgagggatacactgaaaattgtgttcaagaatatggctagcaggccttacagcatatatcctcacggcgtcacattttctccttacgaagacgaggtgaatagtagctttacatctggtaggaacaatacgatgatccgggcagtgcaaccaggcgagacatatacctacaagtggaacatcctcgagttcgatgagcctactgagaatgacgctcagtgtttgaccaggccatactatagcgacgtcgatatcatgcgcgacattgcctccggcctgatcggtctgctgctcatttgcaagagccgcagcctggaccgacgtggtatccaacgggcagctgacatcgagcaacaggccgtgttcgcagtcttcgacgagaacaagtcttggtacctagaggacaacattaataaattctgcgagaatcctgacgaggttaagcgtgatgaccctaagttctacgagtctaacatcatgagtaccatcaacggatacgtgcctgagtctataactaccttaggattctgcttcgacgacactgttcagtggcatttctgttccgtgggcacacagaacgagattctgacgatccactttacaggtcatagcttcatatacggcaaacgacatgaagacaccttaaccctgttccccatgagaggcgagtctgtgacagtaacaatggataacgtgggtacttggatgctgacctccatgaactcttcgcctcgctcaaaaaagctccggctgaaattcagggacgtcaagtgtattcctgacgacgatgaagattcatatgaaatctttgaaccccccgagtctaccgtaatggccacccggaagatgcacgaccgactcgaacccgaggatgaggaaagtgatgccgactacgactatcagaacagacttgccgccgcccttgggattaggagttttcggaattcgtcgctgaaccaggaagaggaggagttcaatttgaccgcactcgcactggagaacggcacagagtttgtgtccagtaacactgacatcattgtgggctccaactatagtagcccctcaaacatctcaaaattcaccgttaataacctggccgagccccagaaggcacccagtcaccaacaggcaaccactgccggcagcccccttcgacacctgataggtaaaaattctgtgctcaacagctcaactgccgagcattccagcccatacagcgaggatcccattgaggacccgctacagcctgacgtcacagggatccgcctcttgtcgttaggtgccggagagttcaagagccaggagcatgcgaagcataagggccccaaggtggagcgcgaccaggcggcaaagcatagattcagctggatgaagctcttggctcataaagtgggccggcacctgtctcaggacactggaagccctagcggaatgaggccttgggaggatctgcccagccaagacacaggcagccccagtagaatgcggccttggaaagaccccccaagcgacctgctgctcctgaagcagagtaactcctctaagatcctggttggaagatggcacttggcaagcgagaaaggatcttacgaaatcatacaggataccgatgaggatacggccgtcaataattggctgatatcaccacaaaacgctagccgagcatggggcgagagtacaccactcgccaataaacccggcaagcagtctgggcatcccaagtttcccagagtgcgtcataaaagcctccaggtgagacaggacggcgggaagagtcggttaaaaaagtcccagttcctgataaagacacgtaagaagaagaaggagaagcacacacatcatgcacccctctctcccaggacctttcatccactaagatcagaggcctacaacacctttagtgaaagacggctgaagcatagcctcgtgcttcataagtcaaatgaaacgtctctgcctacagacctgaatcagactctgcccagtatggattttggatggatcgcatcactgccagaccacaatcagaattcctcaaacgacacgggccaggcttcatgcccaccagggctttatcagacagttccgccggaggagcactatcagacttttccgatccaggacccagatcagatgcactccacgtccgaccccagtcaccgatcctcttctcccgagctgtccgaaatgctggaatacgaccgatcacataagtcctttccaacagacatctcacagatgtcacccagctcggaacatgaagtgtggcagacagtgatctcacccgatctttctcaggtgaccttgtccccagagcttagtcagacgaatctctctcccgacctctctcacacaacattgtcacctgaactgattcaaagaaatttgagccctgccctgggacagatgcctatatcgcctgatctgtcacacactaccttgagtcccgatctgagccacaccactttatctcttgacctttcgcagaccaacctgagccccgagctctcccagaccaacttgtctcccgcactgggacagatgcccctgtctcctgatctgagccacactacgctgtctttggacttctcccagacgaatttgtcacctgaactctcacacatgaccttgtctcctgaactcagtcagactaacctgagcccggccttaggccagatgccgatatctccagatctatcacatactacgctctcgctggattttagccagactaatctgtcacccgaactgtctcagactaacctctccccagctttgggacaaatgcctctcagccccgatccttctcataccacgctgagcctcgacctgagccagaccaacttgtcccctgaactgagccaaactaatctgtccccagacctttccgagatgcctctgtttgcggacttgtcccagatcccgttgaccccagatctggaccagatgactctgtctcctgatctgggagaaacagatctgtcacctaatttcgggcagatgagcctgtcccctgatttgtcgcaagtcaccctgtcccccgatatttcagatacgacactgctcccagatctttcacaaatcagcccgccccccgacttagaccagattttctacccttccgagtctagtcagagcttgctgctacaagaattcaacgaatccttcccataccctgacttggggcaaatgccctccccctcttcccctaccctgaacgacacctttctgtctaaagagttcaacccgctggtgatcgtagggctctccaaagacggaactgactacatcgagatcatacctaaggaggaagtgcaatctagtgaggacgattacgccgagatcgattacgtgccctacgatgacccgtacaaaacggacgtcaggacgaacatcaactccagcagggacccagacaatattgccgcatggtatctaagatctaataacggcaatcgaagaaactattacatagcagccgaggaaatttcctgggactactccgagtttgtccagcgtgaaacagatatcgaggacagcgacgatattccggaggacacaacctacaagaaagtggtatttagaaaatatctggattccacctttacaaagcgggatccccggggggagtacgaggaacacctgggcattcttggccctatcatcagggcagaggtggatgacgtcattcaggttagattcaaaaacctggcctctcgcccctatagtctccacgcccatggcctcagctacgaaaagtcctccgaagggaaaacatacgaagacgactccccagagtggttcaaggaggataatgctgtgcagcctaactctagctacacatatgtttggcacgccactgagcgatctggtccggagagccccggttcagcttgccgggcttgggcttactacagcgctgtgaaccccgaaaaggatatacatagcggtctcatcggacctcttcttatctgtcaaaagggcattttacataaagactccaacatgccaatggatatgcgggagttcgtgctattgttcatgactttcgacgagaaaaagagttggtattatgaaaagaagtcaagatcttcatggcggctgaccagttctgaaatgaagaagagtcacgagtttcacgcgatcaacggaatgatctattccctccccggcctgaagatgtatgagcaggagtgggtgcggcttcaccttctaaacatcgggggctcccaggacattcacgtcgtgcattttcacggacagaccctgcttgagaatggcaataagcaacatcagttgggtgtctggcccttactccctggatctttcaaaaccctcgagatgaaggctagcaagcctggctggtggctcctgaatactgaagtgggcgagaaccaacgggctggaatgcagacacccttcctcatcatggaccgcgactgccgcatgccgatgggcctgagcactggcatcatatctgatagccagattaaggcgtcggagttcctggggtattgggagccccggctcgcccggttgaacaacggcggatcatacaacgcctggagtgtagagaagctcgccgcagaatttgcaagtaagccctggattcaggttgatatgcagaaggaggtcataatcactgggatccagacccagggggctaaacactacctgaagtcgtgttataccaccgagttctatgtggcttacagtagcaaccagatcaattggcagatctttaagggaaattcaacgagaaacgttatgtacttcaacggcaattccgatgcaagtaccattaaggaaaatcagtttgatcctccaatcgttgcccggtacatacgaatcagcccgacccgggcctataatagacccacattacgcctcgaactacagggctgcgaggttaatgggtgttccaccccactgggcatggaaaatgggaaaatcgaaaacaaacagatcaccgccagttcatttaagaagagctggtggggagactactgggaacccttccgagcaaggctgaacgcacagggtcgagtgaacgcctggcaagcaaaagctaacaataataaacagtggctggaaattgatcttctaaagataaagaaaattaccgcgataattacccaaggctgcaaaagcctgtcaagtgagatgtacgtcaagtcctacaccatccattacagcgagcagggggtggagtggaagccgtaccggctcaagtcctctatggtagataaaatcttcgagggcaacacgaacactaagggacatgtgaagaattttttcaacccacctatcatttctcgctttataagagtcatcccaaagacttggaaccagagtattgcactcaggttggaactcttcgggtgcgatatctac

SEQ ID NO: 9033 - DNA, 6672 bp, synthetic construct
  misc_feature 1..6672: note = source = /note="Description of Artificial Sequence: Synthetic coding sequence"
  source 1..6672: mol_type = other DNA
atgtttcctgggtgccccagactgtgggttctggtggtcctggggaccagctgggtcgggtggggctcgcagggaaccgaagcggcacaactgcgccaattctacgtggcggcccaaggcatctcctggtcctaccggcctgaaccgacgaacagctcgctgaaccttagcgtgacgagttttaagaagatcgtgtaccgcgaatacgagccttacttcaagaaggaaaagcctcagtccactatctccggcctgctgggaccgactctctacgcagaggtaggagacatcatcaaggttcactttaagaacaaggcagataagccgctgagcatccaccctcagggaatccgttactctaagctctccgaaggagcctcgtacctggatcatacttttcccgccgaaaagatggatgatgccgtggcccctggtagagaatacacctacgaatggagtatttcagaggattcgggaccaactcacgatgacccaccctgcctgacccacatctactactcgcacgaaaatctgattgaagatttcaactccggtctgatcgggccactgctgatctgcaagaagggcactctgactgaaggaggaactcagaaaactttcgataagcagatcgtgcttctgtttgccgtattcgacgaatcgaagtcgtggagccaaagcagctcgctgatgtacaccgtgaacggatacgttaatggcactatgccggacataaccgtgtgcgctcacgaccacatcagctggcacctcctggggatgtccagcggaccggaacttttttccatccactttaatggccaggtgctcgaacaaaatcaccacaaggtgtccgcaatcacccttgtgtcggctacctcaaccaccgcaaacatgactgtcggacctgaaggcaagtggatcatctcatctctgacgcccaagcatctccaagcagggatgcaggcgtacattgatatcaagaattgccccaagaaaactcgcaatctgaaaaagattactagagaacagagacgccatatgaaacggtgggagtacttcatcgccgctgaggaggtcatctgggactatgccccggtcattccggctaacatggacaagaagtaccgttcccagcatctggacaactttagtaaccaaatcggaaagcactacaagaaggtgatgtacacccagtacgaagatgagtcattcaccaagcacaccgtgaacccaaatatgaaagaggatggaatcttgggaccgattatccgcgcccaggtgagggacactttgaagatagtgttcaagaatatggctagccgcccttactcaatttacccacacggcgtgactttcagcccttacgaggatgaggtcaactcgagcttcaccagcgggcggaacaacaccatgatccgcgctgtgcaaccgggagagacttatacttacaaatggaacatcctcgagttcgacgagccgactgagaacgacgcacagtgcctgactagaccgtactactcggacgtggacatcatgcgggacatcgcctcaggcctgatcggactgcttctgatatgcaaatcgcgttcgctcgaccggcggggtatccagagagcagctgatatcgaacagcaagcagtgttcgccgtgtttgatgagaataagtcctggtacctggaggacaacatcaacaagttctgcgaaaatccggatgaagtcaagagagacgacccgaagttttacgaatcgaacatcatgtccaccatcaatggatacgtccctgagagcattactactctgggattctgcttcgacgacaccgtgcaatggcacttctgttcggtgggtactcaaaacgaaatcctcaccatccattttaccggacattcctttatctacggtaagcggcacgaggacaccctgaccctttttccaatgcgcggtgaaagcgtgaccgtgacgatggataacgtcggaacttggatgctcacctccatgaactcgtccccccgctcaaagaaactccgcctgaaattccgcgacgtgaaatgtatccccgacgacgatgaagatagctacgaaatcttcgaaccgccggaatccactgttatggccacgagaaaaatgcatgacagactggagccagaggacgaggaatccgatgcagactacgattaccaaaatcgcctcgctgctgccctgggaatcagatccttccgaaactccagcctcaaccaagaagaagaggaattcaatttgaccgcgctggccctggaaaacgggaccgaattcgtgagctcgaatactgatatcatcgtgggatcaaactactcctcaccttcaaatatcagcaagtttactgtgaacaatctggcggagccacagaaagcaccatcccaccagcaagctactaccgcaggatcacctctgcgccacctgatcggaaaaaactctgtcctgaacagctccacggcagagcactcctcgccgtatagcgaggacccgatcgaagatcctctgcagccggatgtcaccggcatccggttgctctcacttggcgccggggaattcaaatcgcaagagcatgcaaagcataagggaccgaaagtcgagcgcgaccaagcagccaagcaccggttttcgtggatgaagctgttggcccataaagtcggtcgccatctctcgcaagacaccggatccccgagcggcatgcggccatgggaggacctgccgtcgcaggataccggtagtccttctcggatgcgcccgtggaaggatccaccgtcagacctgttgcttttgaaacagagcaactcttccaaaattctggtcggaagatggcatctggcctccgagaaggggtcatacgagatcatccaggacaccgacgaagatactgccgtaaacaactggttgatatcacctcagaacgcctcaagagcctggggggagagcacgccgcttgcgaataagcctggaaagcaatcgggtcacccgaagttcccacgggtgaggcacaagtccctgcaggtgcgccaggacggaggcaaaagccgccttaagaagtcgcagttcctcataaagacgcggaagaaaaagaaagaaaaacacacccatcacgcgccgttgtcaccccgaacctttcatccgctccggtcggaagcctacaacaccttttctgaaagacgcttgaagcactcattggttctccataagtccaatgaaacctcactgccaaccgacctgaaccagactctgccatcgatggactttggatggatcgcttcgctgccagaccacaaccagaatagctcgaacgataccggccaggccagctgtcccccagggctctaccagacggtgcccccagaggaacactaccaaactttccccattcaagaccccgaccagatgcattcgactagcgatccgtcccatcgcagctcgtcaccggagctgtctgagatgctcgaatacgatcggtcccacaagtccttcccaactgatatctcccagatgtcaccgtcctccgagcacgaagtgtggcagaccgtcatctcccctgacctcagccaagtcaccctgtccccggaactctcgcaaactaatctgtcccctgacctgtcgcacaccactttgtcgccagagctgatccagagaaacctgtcaccggctctcggtcaaatgccgatatcacccgacctcagccacacgacgctgtcaccggatcttagccacacgactctgagcctggatctgtcccagacgaacctcagcccggaactgagccaaacgaacctttccccggcacttggacaaatgcctttgagcccagacctttcccacactacgttgtcgctggacttcagccaaactaatttgagtccagaactgtcgcatatgaccctgtcgccagaactgtctcaaacgaatctctcaccagccctgggacagatgcctatctcgccagatctgtcacacacgaccctgtcccttgacttttcacaaaccaacctgtcacctgaactgtcgcagaccaatctgtcgcctgcacttggtcaaatgccactgagcccggaccctagccataccaccctttccttggacctctcccagaccaacctttcacctgagctgtctcaaactaacttgagcccggatctgagcgaaatgcccctgttcgcggatctctcacaaattcccctgacgccagatctcgaccagatgaccctctccccggatctgggcgagacggacttgtcacctaatttcggccagatgtccctctcaccagacttgagtcaggtgaccctctcgccggacatttcagacactactcttctgcctgacttgtcccagatcagccctcccccagacctcgatcaaatcttttacccgtcagagtcatcccagtccctcctgctgcaggagttcaacgagtcattcccctaccccgacctcggccagatgccgtccccgagctcgccgaccttgaatgacactttcttgtcgaaagagtttaatccactggtgatcgtcggtctgtccaaggatgggaccgactacatcgagatcatcccaaaggaggaggtgcagtcgagcgaggacgactacgccgaaatcgactacgtcccgtacgatgacccgtataagactgatgtgcgcactaatatcaactcctctcgcgacccggacaatattgcagcctggtacctgcgctccaacaatggaaaccggcggaattactacatcgccgcagaggagatttcctgggattactcggaattcgtgcagcgggaaaccgacatcgaggactccgatgacatcccggaagataccacgtataagaaagtcgtgtttaggaaatacctcgacagcactttcactaagcgtgaccctagaggtgaatacgaagaacacctgggaattcttggaccgatcatccgcgcggaggtggacgacgtgattcaggtgcgcttcaagaacttggccagcagaccttacagcctccacgcacatggactctcgtatgagaagtcgagcgaaggaaagacgtacgaggacgactccccggaatggtttaaggaagataacgcagtgcagccgaactcatcgtatacttacgtgtggcatgcgactgaacggtcgggaccggagtcaccagggtcggcgtgtagggcttgggcctactactccgctgtcaacccagaaaaagacattcactccggactcatcggacctttgctgatctgccagaaggggatccttcataaggattctaatatgccaatggacatgcgcgaattcgtcttgctctttatgaccttcgacgaaaagaaatcgtggtactacgaaaagaagtccaggtcgtcatggcggctcacttcatcagaaatgaagaagtcgcacgagttccatgcgatcaatgggatgatctacagcctgccagggctcaagatgtatgagcaagaatgggtcagactccatctgctcaacatcggaggaagccaagatatccacgtcgtgcatttccacggtcagactctgttggagaacggcaataagcagcatcaactcggagtgtggccgctgctcccaggatccttcaaaactctcgagatgaaggcgtccaaacccggatggtggctcctgaacactgaagtcggagaaaatcagagagccggtatgcagactcccttcttgatcatggaccgcgactgccggatgccgatgggactgagcaccggaatcatcagcgattcccaaatcaaggcgtcagaatttctgggatactgggaacctaggctggcccggttgaataacgggggttcctacaacgcctggagcgtggaaaaactcgccgcggagttcgcctcaaagccgtggattcaggtggacatgcagaaagaagtgatcatcaccggaatccagacccagggcgctaagcactatctcaagagttgttacaccactgagttttacgtggcgtattcgtccaaccagatcaattggcagattttcaagggaaattcgactcgcaatgtgatgtacttcaacggcaactcggatgcgtcgaccataaaggagaaccagtttgatcctcctatcgtggctaggtacattcggatctcaccgactcgggcctacaaccgcccgactctgagactggagctgcagggctgcgaagtcaacggatgctcgactccgctgggaatggagaatgggaaaatcgaaaacaagcaaattactgcctcgtcattcaaaaagtcttggtggggagactactgggagcccttccgagcgcgtctgaacgcccagggacgggtgaatgcatggcaagcgaaagccaacaataacaagcagtggcttgagattgacctgttgaagatcaagaagatcacggcaattatcacccagggttgcaaatccctttcatccgaaatgtatgtgaaatcgtacactatccactactcggaacagggtgtcgaatggaaaccgtacaggcttaagagcagcatggttgataagatcttcgaaggaaacaccaacactaaagggcacgtcaaaaactttttcaatccaccgatcatctccaggttcatccgcgtgatccctaagacttggaatcaatcaattgcactgcgcctggaactcttcggatgtgatatctac

SEQ ID NO: 9034 - DNA, 6672 bp, synthetic construct
  misc_feature 1..6672: note = source = /note="Description of Artificial Sequence: Synthetic coding sequence"
  source 1..6672: mol_type = other DNA
atgttcccaggatgtcctaggttgtgggtccttgtggtgctgggcacctcgtgggtgggatggggcagccaagggactgaagccgcccagctccgacagttttatgtcgcagcacagggtataagctggagctaccgcccagaacctaccaactcctcgcttaacctttcggtcacctccttcaagaagattgtgtatagggaatacgaaccctactttaagaaagaaaagcctcaaagcaccatttccggtctgctgggaccaaccctgtacgcggaagtgggcgacataatcaaagtccatttcaagaataaggcagacaagccactttcgattcatcctcagggtattaggtactccaagctgtcagagggagcgtcctacctcgatcacaccttccccgcagaaaagatggatgatgcggtggcccctgggcgggaatacacctatgagtggagcattagcgaggactccggacctacccacgacgatcctccatgtctgactcacatctattactcccatgagaatcttatagaagatttcaacagcgggctgataggtcctcttctcatctgcaagaaaggaacccttacggagggtggaacccaaaagacctttgataaacaaatcgtgctcctctttgccgtctttgatgagtcgaaatcgtggtcacaatcgagctcgctcatgtacaccgttaatggatatgttaacggcaccatgcctgacatcaccgtgtgtgcacacgatcatatctcatggcatcttcttggaatgtcctccggccccgagcttttttcgatccatttcaatggacaggtgcttgaacaaaaccatcataaggtgtccgcaattaccctggtgagcgcaacctccactaccgcgaatatgacggtggggccagagggaaagtggataatcagctccctgacgccgaaacaccttcaagccggcatgcaagcctacatcgatatcaaaaactgcccaaagaaaacccgcaatctgaagaagatcactagggagcagcgtagacatatgaaaaggtgggagtacttcatcgccgcagaagaagtcatctgggattacgcacctgtgatcccagccaacatggataagaagtatagatcgcagcacctggacaactttagcaatcaaataggcaagcattacaaaaaagtcatgtacacccagtacgaagatgaatcgtttactaagcataccgtcaacccaaatatgaaggaagatgggatcctgggtccaattatcagagcacaagtgcgcgacactttgaagatagtgttcaaaaacatggcgtcgcgtccatactcgatttacccgcacggcgtgaccttcagcccatacgaagatgaggtaaattcctcttttacttcaggaaggaataacactatgatccgtgcggtgcaacctggtgaaacctacacttacaaatggaacatacttgagtttgacgaaccaactgagaacgatgcacaatgcctgacgcggccttactattccgacgtggacattatgagagacattgcatcgggactgataggactcctcctgatctgtaaatcgcggtcactggacagacgtggtattcaaagagctgcagacatagaacagcaggccgtgtttgcagtctttgatgaaaacaaatcttggtacttggaggacaatatcaacaagttttgtgagaaccctgatgaggtgaaaagggacgatccaaagttttacgaaagcaatatcatgtcgactattaacggttacgtccccgaatccatcaccactctgggattttgttttgacgatacggtgcaatggcatttttgttcagtcggaacgcagaacgaaattctgaccatacacttcactggacatagctttatctatgggaaacgccatgaagataccctgaccctgttcccaatgagaggagaatcggtgaccgtgactatggataatgtcggtacttggatgcttacctccatgaactcatcgccccgctccaaaaaactccgacttaagttcagggatgtcaagtgcattcccgacgatgatgaggattcatacgagatttttgagccaccggaatcgaccgtgatggctacgaggaagatgcatgaccgactggagcctgaagatgaagagtcggatgcggattacgattaccagaacagactggcagcagcattgggtatcaggtcatttagaaactcgagcttgaaccaggaggaagaagagtttaacctgacggcattggcactcgaaaatggtaccgagtttgtgtcatcgaacactgatatcatcgtgggaagcaattacagctcgccttcgaacatttcgaaattcactgtcaacaacctggccgagccccagaaggcgcctagccatcaacaggcaaccaccgcaggctcgcctttgcggcatctcatcggcaagaattccgtgctgaattcgtccaccgcagaacatagctcgccctactcggaagatcctattgaagatcctctccaacctgacgtgaccgggattagacttctctcacttggtgcaggagagtttaagtcgcaggaacatgccaagcacaaaggccccaaagtggagcgggatcaagcagccaaacatagattttcttggatgaagctcctcgcacacaaagtgggaaggcacctttcacaagatacgggctcacccagcggtatgcgaccttgggaggacctgccatcgcaggataccgggtcaccttctcgaatgcggccttggaaggatcctcccagcgaccttctccttcttaagcagtccaactcgagcaagattcttgtcggccgttggcatctcgcttcggagaagggaagctacgagatcattcaagataccgatgaggacaccgcggtgaacaactggctgatctcaccacaaaacgcatcaagagcttggggcgaatccacccctctggcaaacaagcctggcaagcagtcaggtcatccaaagttcccccgcgtgaggcataagtcccttcaagtgagacaagatggcggtaaatcgagactgaagaagtctcagtttctcattaagaccaggaagaaaaagaaggaaaagcatacccatcacgcgcctctttcaccacgcactttccaccctctgcggagcgaagcctacaatactttttccgaacgaagattgaagcattctctggtgctgcataagtcaaatgaaacctccttgcctactgatctgaaccaaactctgccatccatggattttggctggatagcctcccttcctgaccacaaccaaaattcgtccaacgataccggtcaggcctcgtgccctccaggactctaccagaccgtgcccccggaagagcattaccaaaccttccctattcaggatccggatcagatgcatagcacctccgacccatcgcatcgctcgtccagcccagaactttcggaaatgcttgagtatgatcggtcacacaagtcctttcccactgacatttcacaaatgtccccttcgtcggaacatgaggtgtggcaaactgtgatcagccccgatctgtcccaagtcacgctctcacctgagcttagtcagaccaacctttcaccagacctcagtcacacgaccctttccccagaacttattcagcggaatctgtcgcctgcactggggcaaatgcctatctcgccggatttgtctcacacgactctttccccagacctgtcacataccaccctgagcctggatctgagccagaccaacctgtccccagaactgagccagactaatttgtcgcccgccctcgggcagatgcccctctcgccagatctttcccacaccaccctgtcgctggattttagccaaactaatctgtcgccagaacttagccacatgactttgtcacccgaactctcgcagactaacctttcgccagcactgggccaaatgccaatttcgccggatcttagccacacgacgcttagcttggatttcagccagacgaacctctcacccgaactttctcaaaccaacctgtcacctgctcttggacaaatgcctttgtcgcctgaccctagccatactacgctttctcttgatctttcccagaccaatctctccccggagctctcacaaacgaaccttagcccggatctttccgagatgcctctttttgccgacttgtcgcaaatccccctcacgccagatcttgatcagatgaccctgtcgccagaccttggagagactgacctctccccaaatttcgggcagatgtcactttcacctgatctgtcacaggtgactctcagccctgatatttcggatactactctgcttccagatttgtctcagatcagcccacctccggacctggatcagatattctaccccagcgaaagctcccagtcactgctcctccaggaattcaacgaaagttttccataccctgatttgggccagatgccatctccttcgagcccaaccctgaatgatacttttctgtccaaggagtttaacccgctggttatcgtgggacttagcaaggatgggactgactacattgagatcatccctaaggaagaagtccagtcgtcagaggacgattacgccgagattgactatgtgccttacgatgatccttataagactgatgtgcgaacgaacatcaactcctccagggatccggataacattgcagcgtggtacctgcgatcgaacaatggtaatcgtagaaattactacattgcagcagaagaaatttcgtgggactactcggaattcgtccagcgggaaaccgatattgaggactcggatgacattccggaagatacgacgtacaagaaggttgtgtttagaaagtacttggacagcacgttcactaagagagatccaaggggagagtacgaggagcacctcggaatcctcggtccaatcattcgcgcagaagtcgatgacgtgatccaagttcgcttcaagaacctggcgagccgcccctactcccttcatgcacacggacttagctacgagaagtcgtctgaaggaaagacgtacgaggatgatagcccagagtggttcaaggaagataacgcagtccagccaaactcgtcgtacacctacgtctggcacgcaactgaacggtccggtcctgaatcccccggatcggcgtgcagagcctgggcatactacagcgcggtgaatccagagaaggacatacattccggactgattggtcccctcctcatatgtcagaagggaatactgcataaagatagcaatatgccaatggatatgagggaattcgtgctgctgtttatgacttttgatgagaaaaagtcatggtattacgaaaagaagtcccgttccagctggcggcttacttcatcggaaatgaaaaagtcccacgaatttcatgcgattaatggaatgatttactcgctgcctggactgaagatgtacgaacaggagtgggtgcgcctgcaccttctgaacataggaggaagtcaggatattcatgtggtgcactttcatggacagacgcttctggagaacggtaacaaacagcaccaacttggagtgtggccactcctccctggatcgtttaagactctggaaatgaaagcatcgaagcccggctggtggcttctcaataccgaagtcggggagaaccagcgcgcaggaatgcagactcccttccttatcatggaccgtgattgtcggatgcctatgggattgtcgacgggaataatcagcgactcccagataaaggcatcagagttcctggggtattgggaacctagacttgcccgacttaacaacggtggttcatacaatgcgtggtccgtggaaaagttggctgccgagtttgcatccaagccgtggattcaggttgatatgcagaaggaagtgatcattaccggcattcagactcaaggagccaagcattacctgaaatcatgctacactaccgagttttacgttgcatacagctcgaatcaaatcaattggcagatctttaaaggaaattcgactcgaaacgtgatgtacttcaacggcaactctgacgcatcgaccatcaaggagaaccaatttgacccgccaattgtggctcgctacataagaatttcaccaaccagagcgtacaacaggcctaccctgcgccttgaactccagggttgtgaagtcaacggatgttccaccccgctggggatggaaaacggtaagatcgaaaacaagcagataactgcctcatcgtttaagaagtcgtggtggggcgattactgggagccgtttagggcacgtctcaatgcacaaggaagagtcaacgcgtggcaagcaaaggcgaacaataacaagcaatggttggaaattgacctgctgaaaatcaagaagattactgcgatcattactcagggttgtaagtccctgtcctccgaaatgtacgtcaagtcgtacaccatccattacagcgagcagggagtcgagtggaaaccttacagactcaagagctccatggtggataagatttttgaaggcaataccaacactaagggacatgtcaaaaactttttcaacccacccatcattagtcgctttatccgtgtgatccctaagacttggaaccagtccatcgcactccgactcgaattgttcggatgcgacatctac

SEQ ID NO: 9035 - DNA, 6672 bp, synthetic construct
  misc_feature 1..6672: note = source = /note="Description of Artificial Sequence: Synthetic coding sequence"
  source 1..6672: mol_type = other DNA
atgtttccgggttgtccccgtttgtgggtgttggtggtgttggggacctcctgggtcggttggggttcgcaaggaaccgaagccgctcagcttcgccagttctacgttgcagctcagggtatttcgtggtcctaccgccccgaacctaccaactcgtccctgaatctgagcgtgacttcctttaagaagatagtctacagagagtacgaaccttacttcaagaaggaaaaacctcagtcaactattagcggccttcttggccctaccctttacgcagaagtgggcgatatcattaaagtgcatttcaagaacaaggcagacaaacccctttcgatccatccacaaggaataagatacagcaagctcagcgaaggagcctcctacctggatcacaccttcccagcggagaagatggatgatgctgtggctcctggtcgagaatacacctacgagtggtccatcagcgaggactcaggacccactcatgatgatcccccttgtctgacccacatttactactcacatgaaaacctgattgaggactttaacagcggcctgattgggccactgctgatttgtaagaaggggactctcacggaaggaggtacgcaaaagacttttgataaacaaatagtgcttctctttgccgtctttgacgaatccaagtcctggtcacaatcctcaagcctgatgtacactgttaatggatacgtgaatggaacgatgcctgatataactgtgtgtgcacatgatcatattagctggcacctccttgggatgtcgtcaggacccgaactgttttccatccatttcaatggacaggtcctggaacaaaatcaccataaggtgagcgcaattacccttgtgtcggccacttctactaccgctaatatgactgtcgggccggaagggaaatggataatcagcagccttaccccaaagcatctccaagcaggtatgcaagcatacattgatatcaaaaactgcccgaagaaaaccaggaatcttaagaagattactcgagaacagagacggcacatgaagagatgggaatacttcatcgcggcagaagaggtgatttgggattacgcccctgtgataccagccaatatggacaaaaagtaccggtcacaacatcttgataacttctcgaatcaaataggtaaacattacaaaaaggttatgtacactcaatacgaggacgagagcttcaccaagcataccgtgaatcctaatatgaaggaagatggaatcctcggccctatcattcgggctcaagtccgagatactctcaaaatcgtgtttaagaatatggcatcacggccttactcaatctacccacacggtgtgacctttagcccatacgaagatgaagtcaactcgtcattcactagcggaagaaacaataccatgatacgagccgtgcagccaggagaaacctatacctacaagtggaatatactggagtttgatgagccaactgaaaacgacgcacagtgtttgactagaccatactactccgacgtggatatcatgagggatattgcgtcaggccttatcgggctcctgctgatatgtaagtccaggtcactggatagacgcggcattcagcgggcagccgacattgagcagcaggccgtctttgcagtctttgatgagaacaagtcatggtacttggaggataacattaacaagttttgcgagaaccctgatgaagtgaagcgagatgacccaaagttctacgaaagcaacattatgagcactattaacggatatgttcccgaaagcattaccaccctcggcttttgtttcgatgacactgtgcagtggcatttttgtagcgtggggacccagaatgagattctgactattcacttcaccggtcactcgttcatctacggaaagcggcacgaagatacccttaccctgtttcccatgagaggtgaatcggtgactgtgacgatggataacgtcggtacttggatgctgacgtccatgaactcatcgcctagaagcaagaagctgcgactgaagtttcgcgacgtcaaatgtattcctgatgacgatgaggattcctacgagatttttgagccaccagaatcaacggttatggcaaccaggaagatgcatgaccggcttgagccggaggatgaagaatcagatgcagattacgattaccagaatagactggccgcggccctgggcattagatcgttccggaattcctccctgaatcaagaagaagaggaattcaacctgactgcacttgcacttgagaatgggactgagtttgtgtcgtccaacactgatatcattgtgggttcgaactattcttccccatctaacatttcgaagtttaccgtgaacaacctcgcagaaccccaaaaggcaccttcacaccagcaagcaactaccgcaggatcgccgcttagacaccttattgggaaaaactcagtgcttaactcatccaccgcagaacattcgagcccctacagcgaggaccctattgaagatccgctccagcccgatgtcactggcatcagacttctgagccttggtgcgggagaattcaaatcacaagagcatgcgaaacataaagggcctaaggtcgagagggaccaagcagccaagcacagattttcgtggatgaagttgctcgctcacaaagtgggacgccacctgtcccaggacactggctccccttccggtatgcgcccttgggaggatctgccatcccaggataccggatcaccatcaagaatgcgtccttggaaagatcccccttctgatctgttgctgctgaaacaatctaactcgtccaagattctcgtggggcgatggcacttggcttcagaaaaaggatcttatgaaatcatacaggatacggatgaggacaccgcagtgaacaattggctgatctcccctcaaaacgcatccagggcatggggggaaagcactccccttgccaacaagccgggaaagcagtccggtcatcctaagtttccgagagtgcgtcacaagtcgctgcaggtccggcaagatggaggaaagtcacggctcaaaaagtcgcagtttctcattaagactaggaaaaagaagaaagaaaagcatactcatcacgcgccccttagcccacggactttccaccctctgaggtcggaggcctacaacactttctccgagcggagactgaagcacagccttgtgctccataaatcgaacgaaacctcgctccctactgacctgaatcaaacccttccatctatggactttggctggattgcctccctgcctgatcataaccaaaattccagcaacgacaccggacaagcatcgtgcccgccaggtctgtaccaaactgtgccgccagaggagcactaccaaacctttccaatacaagatccagatcaaatgcattcgaccagcgacccttcccatcgctcatcgtcgccagagctgtcggagatgttggaatacgaccggagccataaatcttttcctactgatattagccagatgtccccttcaagcgagcatgaagtctggcagaccgtgatttcgccggacctttcacaagtgaccctgtcaccagagctgtcacaaaccaatttgtcaccagacctttcccataccaccctgagccccgaactgatccaaaggaacctctcgccagccctggggcagatgccaatatcgcctgacctctctcacactacgctgtccccagatctgtctcatactacgctctctctcgacctttcccagaccaacctgagcccagaactgtcacagaccaacttgtcacccgctctgggccagatgcctctgtcgccggatctctcccatactacgctgtcgttggacttctcccagactaatctttcacccgagctgtcgcacatgactctgtcccctgaacttagccaaaccaacctttcgccagcgcttggccaaatgcccatttcacccgacctgtctcacaccactctttccctcgatttttcgcaaactaacttgtcgcccgaactctcgcagacgaacctgtcgcctgcgctcggacaaatgcctctctcgcctgacccctcgcatactaccctgagcctcgacctgtcacagactaacctttctcctgaactgtctcaaaccaatctgtcaccggacctcagcgagatgcctctcttcgcggatcttagccaaatccctctcactcctgacctggaccaaatgacgctctcgccagatcttggtgaaaccgatctgagcccgaattttggccaaatgtcgctgtcacctgacctttcccaagtgaccctttcccctgacatttcggacaccactctgctgccggatctgtcccaaatctccccgccaccagatctcgatcagatcttttacccatcagaaagcagccaaagcctccttctccaagaattcaacgaatcgtttccttaccctgacttgggacagatgccgagcccctcttcgcctacccttaatgatactttcctctcgaaagagttcaaccctctcgtgattgtggggctcagcaaggacggaaccgactatattgagataatacctaaggaagaagttcagagctcggaagatgattacgcagaaatcgattacgtgccatacgacgacccttacaaaaccgatgtgcgaactaacatcaattcgtcgcgtgatccagacaatatcgctgcatggtacttgcggtcaaacaacggtaaccgcagaaactactacatagcggccgaagagatctcgtgggattactcggagtttgtgcagcgggaaacggatatagaggatagcgatgatattccagaggataccacctacaagaaggtcgtgtttcggaaataccttgattcgacctttactaagcgcgatccccgcggcgaatatgaagaacatttgggcatacttggtccgatcataagagcggaagtggatgatgtcattcaagtccgctttaagaaccttgcgtcccgcccgtactccctccatgcacatggacttagctacgagaaatcctcggagggaaagacttatgaagatgattcccccgagtggtttaaggaggacaacgccgtccaaccaaattcatcgtacacttatgtgtggcatgcaaccgaacgctcaggtcctgaatcccctggatccgcatgtagagcatgggcctattactcagctgtgaatccggaaaaggatatacattcgggtcttattggacctcttttgatctgccaaaagggtatcttgcataaggattccaatatgccaatggacatgcgagagtttgtccttctctttatgacctttgacgaaaagaagtcgtggtactacgagaagaaaagccgctcctcctggcgtcttacctcatccgagatgaagaagtctcacgagtttcatgccataaatggtatgatttacagccttcctggacttaagatgtacgaacaggaatgggtcagactgcatcttttgaatattggcggatcccaggacatacatgtcgttcactttcatggtcagacgctgctggaaaatggcaacaaacagcaccagcttggagtgtggccacttctgccaggatcattcaaaactctggagatgaaggcgtcaaagcctggatggtggttgcttaacaccgaagtgggagaaaaccaaagggcggggatgcaaaccccatttctgatcatggaccgggattgtaggatgccaatgggactttccactggaattatctcggactcccagattaaggcatctgaattccttggttactgggaaccacggcttgcacggctcaataatggcggatcatataacgcatggagcgtggaaaagctggcagcagaatttgcatcgaagccctggatccaagtcgacatgcagaaggaagtgatcataacgggcattcaaacgcaaggtgcaaaacattatctgaagagctgttacaccacggagttttacgtggcctactcgtctaatcagattaactggcaaatcttcaagggtaatagcactcgtaacgttatgtactttaacgggaattcggacgcctcgactatcaaggagaatcaattcgatccaccaatcgtcgctaggtacattagaatttcacctacgcgggcctacaaccgacctacccttcgtctggaactccaaggatgcgaagtgaacggttgctccactcctcttgggatggaaaacggcaagatcgagaataagcagatcaccgcatcgtcgtttaagaaatcgtggtggggggattattgggaacctttccgtgcaagactcaacgcacagggtcgtgtcaacgcctggcaagcaaaggcaaacaataacaaacaatggcttgaaattgacctgctcaaaatcaagaagattaccgcaattatcacccagggttgtaaatcgctgtcgtcagaaatgtacgtgaaatcttacaccatccattactcggaacaaggggttgagtggaaaccgtatcgcctcaagtcgagcatggtggataagatttttgagggaaatacgaacacgaagggacatgtgaagaacttctttaacccgcccattatcagccgtttcatcagagttatcccaaaaacctggaaccagtcgattgccctcagactggaactctttggatgcgacatctac

SEQ ID NO: 9036 - DNA, 6672 bp, synthetic construct
  misc_feature 1..6672: note = source = /note="Description of Artificial Sequence: Synthetic coding sequence"
  source 1..6672: mol_type = other DNA
atgttcccgggatgcccgcggctctgggttctggtggtcttggggacttcgtgggtggggtgggggtcccaaggaaccgaagcggcacaactgcggcagttctatgtcgccgcccagggcatctcctggtcctacaggccggaaccgactaattcgtcgctcaacctctccgtcacctcgtttaagaagattgtgtaccgcgagtacgaaccgtatttcaagaaggaaaaaccgcaaagcaccatttccggcctgctcggtccgaccctgtacgcagaggtgggggacataatcaaggtgcacttcaagaacaaggccgacaagccgctctcgatccacccccaggggatcagatactcaaagctctcggagggagccagctacctggaccacaccttccctgcggagaaaatggacgatgcggtggccccaggacgtgagtatacctacgagtggagcatttcggaagattccggtcctactcacgacgacccgccgtgcctgacccacatctactacagccacgaaaatctgatcgaagatttcaattccgggctgatcggacctttgctgatctgcaagaagggaacccttactgaaggcggtacccaaaaaactttcgacaagcagattgtgctgcttttcgcggtctttgatgaatccaaatcttggtcccaatcgtcctccctcatgtatactgtcaatggatacgtgaacggaactatgccagacatcactgtctgcgcccatgatcatatctcatggcatctgttggggatgtcctcgggcccggaactcttctcgatccactttaacggacaggtgctggaacagaatcatcacaaggtcagtgccatcacccttgtgagcgccacttcaaccaccgctaacatgaccgtcgggcctgaaggaaagtggataatcagttctctgaccccaaagcatctgcaggcaggaatgcaggcgtacatcgatatcaagaactgcccgaagaaaactcggaatctcaagaagatcacgagagaacagcgtagacatatgaagcgctgggaatacttcatcgctgcagaggaagtgatctgggactatgcgccagttatccctgccaacatggacaaaaagtatcgctcgcagcacctggacaatttcagcaaccaaataggcaagcactacaagaaggtgatgtacacccaatacgaggacgagtccttcacgaagcacactgtgaatccgaacatgaaagaggatggtatcctgggccctatcatcagagcccaagtgagagatactctgaagatcgtctttaagaatatggcctcaagaccctactccatctacccgcatggcgtgacgttttcgccctatgaggacgaagtgaacagctcgtttacctccggtcgcaacaacaccatgatcagagctgtccagccaggtgaaacttacacctacaagtggaacatcctcgaatttgatgagccaaccgagaacgacgcgcagtgtctgacccggccttactattcggacgtggacattatgagggacatcgcgtccggcttgatcggactgctgctgatctgtaagtcgagatcacttgacagacgcggcatccagagagcggctgacatcgaacagcaagctgtttttgcagtgttcgacgaaaacaagagctggtacctcgaggacaacatcaataagttttgcgagaacccggatgaggtgaaacgcgacgatcctaagttctacgaatccaatatcatgtccacgattaacgggtacgtcccggagagcatcaccaccctcggcttttgcttcgacgataccgtgcaatggcacttttgttccgtcgggacccaaaacgaaatcctgacgattcactttacgggccacagcttcatctacggtaagcgacatgaagatacgctcactcttttccctatgcgcggagaatctgtgactgtgacgatggacaacgtgggcacgtggatgcttacgtccatgaattcgtcgccgcggtcaaagaaacttcggctcaaatttcgggacgtgaagtgtatcccggacgatgacgaggattcctacgagatctttgagcctcccgagtccacggttatggctaccaggaaaatgcatgaccggctggaaccggaagatgaggaatccgacgcggactacgattaccagaatagactcgcagcagcattgggaatccggtcgttccggaactcaagcctcaaccaggaggaggaggagttcaatctgacggccctggccctggaaaacgggaccgagttcgtgtcatccaacaccgacatcattgtcggatccaattactcgtcgccgtcaaacattagcaagttcaccgtgaataacctggcagaaccacagaaggcgccgagccaccagcaggcaactaccgcaggaagcccgctgcgccatctcatcggaaaaaactcggttctgaactccagcactgctgagcactcgtctccttactcagaggacccgatcgaggatccgctgcaaccagacgtgaccgggatccggctgctgtccctcggcgctggggagttcaagtcacaggaacacgccaaacataaagggcccaaggtcgagagggaccaggcagcaaagcatagattttcctggatgaaactcctggcgcacaaagtcggacggcacctgagccaagataccggatcaccgtctggcatgcggccttgggaggatcttccaagccaggatactggttctccgagcagaatgcgcccgtggaaagacccaccatcggacttgctcctgctgaaacaatcgaacagctcgaagatccttgtggggcgctggcacctggcctcggaaaaaggttcgtacgaaatcatccaggatacggacgaggataccgccgtgaataactggttgatctccccgcagaacgcgagcagggcttggggtgaaagcactccactggccaacaagccaggcaagcagtcgggccatcctaagtttcctcgagtgcgccataagtcattgcaggtgcgccaagatggaggcaaatcacgactcaagaagagccagttcctgatcaagactaggaaaaagaaaaaggagaagcacactcaccacgctcccctctcaccgaggaccttccaccctctgcggagcgaggcctacaatactttttccgaacgacggctgaaacactcactcgtgctgcacaagtcgaacgaaacctctttgccaactgacctcaatcagactctcccatcgatggacttcggatggatcgcatcgctcccggatcacaatcaaaactcgagcaatgacactggccaagccagctgcccgccaggactgtaccagaccgtgccgcctgaagaacattaccagacctttccaatccaagatccagaccagatgcattccacttcggatccatcgcaccgctcttcgtcacctgaactctcagagatgctggaatacgatagatcccataagtctttcccaactgatattagccagatgtccccctcgtcggagcacgaagtgtggcagactgtgatctcgccagacctcagccaagtgaccctgtcccctgagctgtcgcaaaccaatctttcgcccgatctgagccatactaccctgagccccgaactgattcagcggaacctgtcgccggctctcggacagatgccgatctcccccgacctctcgcacaccactttgtcccccgacttgagtcacaccaccctgtcgctggatctgtcccagactaatctgagcccggagttgagccagacgaatttgtcacccgccctgggtcagatgcctctctcgccggatctttctcatactactctcagcctcgatttcagccagactaacttgtcgcctgaactgtcgcacatgactttgtcgccagaactgtcgcagactaatctttcccctgccctgggacagatgcccatctcccctgacctctcacacactaccttgtcgctcgacttcagccaaaccaacttgtcgccagagctgtcccagaccaacttgagcccagcgctcggacaaatgccactgagccctgatccttcccatacgaccctctccctggatctttcacaaaccaacctgagtccggagctcagtcaaacgaacctttcaccggatcttagcgaaatgccgctgttcgcggacctgtctcaaatcccgcttaccccggacctcgaccaaatgactctctcaccggatctgggagaaaccgacctctcccccaatttcggacagatgtcactctctccggacctgtcgcaggtcaccctctcgccggacatctctgatactactctgctcccggacctgagccaaatctctcctccaccggatttggaccagatcttctacccgtcggaaagctcgcaatctctgctgcttcaggaattcaatgagtcattcccataccctgacctgggtcaaatgccgagcccatcttccccaactctgaacgacacgttcctgtccaaagaattcaaccccctggtgattgtcggactgagtaaagacggcaccgattacatcgaaatcatccctaaggaggaagtgcagtcctccgaggatgactacgctgaaatcgattacgtgccctacgatgacccgtacaaaaccgacgtgcgcaccaacatcaactcgagtcgcgatccggacaacatcgccgcctggtaccttcgatcgaacaacggaaatcggcgcaactactacatcgcagcggaggagatctcgtgggattactccgaatttgtgcaacgcgaaactgacatcgaggattcagacgatattccagaagatactacctacaaaaaggtcgtgttcagaaagtacctggactcaaccttcaccaaaagagatccgcgaggcgaatacgaggagcacttgggcatcctgggaccgattattcgggcggaagtcgacgacgtgatccaagtacggttcaagaacctcgcgtcgaggccatacagcctccatgcgcacggccttagctacgagaagtcgtccgaaggaaagacttacgaagatgacagtccggaatggttcaaagaggacaacgccgtgcagccgaattcgtcatacacctacgtctggcacgctactgagaggtccggaccggaatccccaggctccgcgtgccgggcatgggcgtactactcagccgtgaacccagaaaaagacatccattcaggactgatcggacccctgctcatctgccagaagggaattctccacaaggactctaacatgccaatggatatgcgcgaatttgtgctgttgttcatgaccttcgacgagaagaaaagctggtactacgaaaagaagagccgctcgtcttggcggctgacttccagcgaaatgaaaaagtctcacgagttccatgcaatcaacggaatgatctactccttgccgggactgaaaatgtacgagcaagaatgggtgcgcctgcaccttctcaatattgggggaagtcaagacattcatgtcgtccatttccacggacaaaccctgcttgagaatggcaataagcaacatcagttgggtgtctggccgctgctcccggggagcttcaaaactctggagatgaaggcctcaaagccaggttggtggctccttaacacggaagtgggagaaaatcagagggccggtatgcaaaccccattcctgatcatggaccgcgattgtcgcatgcctatgggactttccactggcatcatatcggactctcagattaaagcatccgagtttctgggatactgggaaccacgcctggcccggctgaacaatgggggatcgtacaacgcttggtccgtcgagaagctcgccgccgagttcgcctcaaagccttggattcaggtggatatgcaaaaggaagtgatcatcaccggaatccagacgcagggcgcaaagcattacctgaagagctgttacactactgagttttacgtcgcctacagcagcaatcagatcaactggcagatcttcaaaggaaactccaccagaaacgtgatgtacttcaatggcaattcagacgccagcaccatcaaggaaaatcagttcgatccgccgatcgttgccagatacattcggatctctccgacgagagcgtataatcggccgactctccggctcgagctccagggatgcgaagtgaacggatgctcgactcctctgggtatggaaaatggaaagatagaaaacaagcaaatcactgccagctcattcaaaaagtcgtggtggggagactattgggaacctttccgggctcgcctgaacgcacagggacgcgtgaatgcgtggcaggccaaggccaacaataacaagcagtggctcgagatcgacctgctgaagatcaagaagattaccgctatcatcacgcagggttgcaagtcactcagctcggaaatgtacgtcaagtcgtacaccatccactattctgaacagggagttgagtggaagccttacaggctgaaatcatcgatggtggacaagatcttcgaaggaaacactaacaccaaaggccatgtgaaaaacttcttcaacccacccatcatctcacggttcataagagtcatcccgaaaacttggaatcagtccatagccctcaggctggaattgttcgggtgcgacatctac

SEQ ID NO: 9037 - DNA, 6672 bp, synthetic construct
  misc_feature 1..6672: note = source = /note="Description of Artificial Sequence: Synthetic coding sequence"
  source 1..6672: mol_type = other DNA
atgtttcctggctgcccacgtctttgggtcctggtggtgctcggtacctcctgggtgggctggggatcgcaaggaaccgaagcagcacagctgagacaattctacgtcgcagctcaaggtatatcgtggtcatacaggcctgaaccaaccaattcctcgctgaatctgtcggtcacgtcgtttaagaagatagtgtaccgggagtacgagccatactttaagaaagaaaaaccccagtcgaccatttcgggtctgctgggacctacgctttacgcagaggtgggggacatcattaaggtgcacttcaaaaacaaggcagataagccactgtcaattcatccacagggaatccggtacagcaagctctcagagggtgcatcctacctggatcatacctttccagcagaaaagatggatgatgcagtggcccctggacgagaatacacttacgaatggtcaatttccgaagattccggaccaacgcacgatgatcctccttgtctgacccatatctactactcgcacgaaaacctcattgaggatttcaattcgggtcttattggacctctccttatttgtaagaagggaaccctgactgaaggtggaacccaaaagaccttcgataagcagattgtcctgctgttcgctgtgtttgatgaatcgaagtcctggagccaatcttcgtctcttatgtacaccgtgaatgggtacgtcaacggaactatgccggatatcactgtgtgcgcacatgatcatatatcctggcatctcctcggcatgagcagcgggccagaactgttttctattcactttaacggtcaggtcttggaacaaaaccaccacaaagtgtcggccattactctcgtgagtgccacctcaactaccgcaaacatgactgtgggacctgaagggaagtggattatctccagccttactccaaaacatctccaagccggaatgcaggcgtacatcgacattaagaactgccctaaaaagacccgcaacctcaagaagattactagagaacagcggcggcatatgaaacgctgggagtacttcattgcagcagaagaagttatttgggattacgcaccagtgattccagccaacatggacaagaagtaccgctcgcagcatcttgacaacttctctaatcagatcggaaaacattacaagaaggtgatgtacactcaatacgaggacgagtcgttcaccaaacataccgtgaacccgaacatgaaggaggacggcattcttggccccattatcagagcgcaggtccgcgacactcttaagattgtctttaagaacatggcgtccagaccttattcaatttaccctcatggagtgactttctccccttatgaagatgaggtgaatagctcattcactagcggaagaaacaatactatgatacgtgctgtgcagcctggtgaaacttatacctacaaatggaacattctcgaattcgacgagccgactgaaaacgatgcccagtgtcttacccggccatattactcagacgtggatatcatgagggatatagcctccggattgattggattgttgctgatctgtaagtcccggtcactggatcggagagggattcaacgcgcggcagatattgaacaacaggcggtgttcgcagtgtttgacgaaaacaaatcgtggtatcttgaagataacatcaacaaattctgcgagaaccccgacgaagtgaagagagatgatccaaagttttacgagtcgaacattatgtcaactatcaatggttacgtccccgaatccattactactctggggttttgttttgacgatactgttcaatggcatttttgttccgtggggacgcaaaacgagatccttactatacattttactggacattcattcatatacggtaagcgtcatgaagatacccttaccttgtttcctatgagaggagaatccgtgaccgtgaccatggataacgtgggtacctggatgttgacctcaatgaattcgtcacctcggagcaagaaattgcgccttaagtttcgtgacgtgaaatgtatcccagacgacgacgaagattcgtacgagatttttgaaccacctgaatcgactgtcatggcaactcgcaagatgcatgatcgactcgagcctgaggacgaagaaagcgatgctgactacgattaccaaaatcggcttgcagcagccctcggaattagatcgtttaggaacagctcgcttaatcaagaggaggaagagtttaacctcaccgcgctggccctcgaaaatggtacggagttcgtgtcgtccaacactgatatcattgtgggaagcaactactcctcgccaagcaacatatccaagtttacggtgaacaaccttgcagagcctcaaaaggcccctagccatcaacaggccaccaccgcgggatcacctttgagacatcttatcggaaaaaactcggtgttgaacagcagcaccgctgaacattctagcccttactctgaagatccaatagaagatcccttgcagcccgacgtgactggtattagacttctttctttgggggcaggcgaattcaaatcccaggaacatgcaaaacataagggaccaaaggtggagagagatcaagcagccaagcatagattttcatggatgaaactgctggcgcacaaggtgggacgccatctgtcccaggacaccggatcgccctcgggtatgaggccttgggaggacctgccctcgcaagataccggttcgcctagccgcatgcgcccttggaaggatcctccctccgatctgctgctcctcaagcaaagcaactcgagcaagatcctggtcggaagatggcacctggcatcggaaaagggatcctacgagatcatacaagatactgacgaggacaccgcagtcaataactggctgatttccccacaaaatgcttcgagagcatggggagaatcaactccgcttgcaaacaaacctggaaaacaatcagggcacccaaagttccccagggttcgccacaagagccttcaagtgagacaagatggagggaagtcgagactgaagaagagccaatttctgattaagacccgcaaaaagaaaaaggaaaagcatacgcatcacgcaccactttcccctcgtaccttccatcctctccggtcggaagcatacaataccttttcggaaagacgtctgaagcattcgctggtgcttcataagtcaaatgagacttcgcttcccaccgacctgaaccaaacccttccatcaatggattttggttggattgcatccctgcctgatcataaccagaattcatccaacgataccggtcaggcgtcgtgtcctcccggactttaccaaaccgtgccaccggaagaacattaccaaacctttcctattcaagaccctgatcagatgcacagcacttctgacccttcacacagaagctcgtcccccgagctgtcggaaatgctggagtacgatcggtcgcacaagtcctttccaactgatatttcacagatgagcccttcctcagaacacgaagtttggcagacggtgatttcgccagacctttcacaagtgacgctttccccagaactgtctcagaccaaccttagtccagatctcagccatacgactctgtcaccagagcttatacagcgtaatctgtcaccagcactcgggcaaatgccgatctccccagatttgtcacacactactctgagccccgacctgtcgcatactaccctctcactggacttgagccagactaacttgtcaccagaacttagccaaaccaatttgtctccagctttgggccagatgccactgtcgcctgatctgtcccacacgacgctgtccttggactttagccaaactaacttgtccccggagctgagccatatgaccctgtcgcccgagctgagccaaactaatctctcgcctgccctggggcaaatgcctataagcccagacctgtcacacaccactctgtcactggatttttcacagactaatctgtcgccagaactctcacagactaacctttcaccagcccttggacaaatgcctctttcaccagatccttcacacaccacccttagcctcgatctgtcccagactaacctcagccctgagctttcccaaacgaacttgtcacccgatctttccgagatgcctctgtttgccgacctcagccaaatccctctgactcctgaccttgatcagatgaccctgtcacctgatcttggcgagacggacctgtcaccgaactttggacaaatgtcgcttagccctgatctgtcacaggtgaccctctccccagacatttcagacaccactcttctcccggatcttagccaaatcagcccccctcctgatcttgaccaaatcttttacccttccgaatcgagccagagcttgcttctccaagagttcaatgaatcttttccgtaccccgatctcggtcaaatgccgtcaccatcgtcccctactttgaatgatacttttctgagtaaggaattcaacccccttgtgattgtgggtctgtcgaaagatgggacggactatattgaaatcatcccaaaggaagaagtgcagagcagtgaggatgactacgctgaaattgactacgtgccgtacgacgatccatacaaaactgatgtgagaactaacatcaattcctcgagagatcccgataacattgcagcctggtatctgcgctcgaataacggcaacaggcggaactactacatagccgccgaagaaatctcgtgggattacagcgagtttgtccaacgggaaactgatatcgaagatagcgacgacatcccagaggataccacgtacaaaaaagtggtctttagaaagtacctcgattccacctttaccaaacgggatcccagaggagagtacgaagaacatctgggaatcctcgggccaattatcagagcagaagtggatgatgttatccaggtacgcttcaagaatcttgcatcccgcccatatagcctccatgcacatggactctcctacgagaagagctcagaaggaaagacctacgaagatgactcccctgagtggtttaaggaggacaacgccgtccaacctaactcttcatacacttacgtgtggcacgcaactgagagatccgggcccgaatcgcctggctccgcatgccgagcgtgggcatactactccgcagtcaatcctgaaaaagatatacattcggggcttattggtccgcttctgatatgtcagaagggaatccttcacaaagattccaatatgcccatggatatgcgtgagtttgtcctcttgtttatgactttcgacgagaagaaatcgtggtactacgaaaagaagagcagatcatcatggcgccttacttccagcgaaatgaaaaagtcccacgagtttcatgcgatcaatggtatgatatacagtctcccaggcctgaagatgtacgagcaggagtgggtcaggctccatctgttgaacattggagggtcccaagacattcacgtggtgcattttcacggccaaactcttctggaaaatggaaacaaacaacaccaactgggggtgtggccgcttctgccaggctccttcaaaactctggagatgaaggcatcaaaaccaggttggtggctgcttaacacggaagtgggagaaaaccaaagagcgggaatgcaaacgcctttccttatcatggatagagactgccgaatgcctatggggctcagcactggaattatctccgactcccagattaaagcaagtgagtttctgggatactgggaaccaaggctggctaggctgaataatgggggatcgtacaacgcctggtccgtggaaaaactcgcggcagaatttgcgtcgaaaccttggatccaggtcgacatgcagaaggaagtgatcatcactggtatccagacccagggggccaagcactacttgaaatcgtgttacaccaccgagttttacgtcgcttactcgagcaatcagattaactggcaaatctttaaggggaattccaccagaaatgtcatgtacttcaatggtaactcggatgcaagcaccattaaagagaaccaatttgatccccctatcgttgccagatacattcgcatttcaccaaccagagcttacaaccgtccaacccttcgactggagctccaaggatgtgaagtcaacgggtgtagcactcctctgggtatggaaaatggcaagattgaaaacaaacagataaccgcatcgagcttcaagaagtcgtggtggggagactactgggaaccgttcagggcacgccttaatgcgcagggtagagtcaacgcttggcaggcaaaagccaacaacaacaaacaatggcttgaaattgacctgttgaagatcaagaaaatcactgcgatcatcacccaaggatgtaagtccctgtcatcagaaatgtacgtcaagtcatacaccatacactacagcgaacaaggagtggagtggaagccctacagactgaaatcatccatggtcgataagatattcgaagggaacaccaatactaagggacacgtcaagaatttctttaaccctcctatcatctcccggttcattcgtgtgatcccaaagacttggaaccaatcgattgcactgcgcctggaactgtttggttgtgacatttac

SEQ ID NO: 9038 - DNA, 6672 bp, synthetic construct
  misc_feature 1..6672: note = source = /note="Description of Artificial Sequence: Synthetic coding sequence"
  source 1..6672: mol_type = other DNA
atgtttcctggctgccctaggctgtgggtgctcgtggtccttggtacctcatgggtcggatggggatcccagggcaccgaagcggcccaactgaggcagttctacgtcgccgcacagggaatcagttggtcttaccgccctgaaccgacgaacagctcattgaacctgtccgtgaccagctttaagaagatagtttaccgtgaatacgagccatactttaagaaggaaaagcctcaaagcactatttcgggtttgcttggtccaaccttgtacgcggaagtgggcgatatcattaaggtgcatttcaagaataaggcagataaaccgctgtcaatccatccccaaggtattcgttacagcaagctctctgaaggcgcgagctacctggaccacacttttccagcggaaaagatggatgacgctgttgctccgggccgggaatacacttacgaatggtccatatccgaggatagcgggcctacgcatgacgatcctccttgtcttactcacatatactactcgcacgagaatcttattgaagatttcaactcaggattgataggtcctctccttatttgtaagaagggaactcttactgaaggagggacgcaaaaaacctttgacaaacaaatcgtgctgctgtttgccgtctttgatgaatcgaaatcctggtcacaatcatcgagcctgatgtacacggtgaacgggtacgttaatggcaccatgccagacattaccgtctgtgcccatgatcatatttcctggcatctccttggaatgtcgtcgggacccgagctgttcagcatccatttcaacggtcaagtgctggagcaaaaccatcataaagtgtctgcaattaccttggtcagcgccacttccaccactgcaaatatgaccgtggggccggaaggtaaatggattatctcgtcactgactccaaagcacctgcaggcaggcatgcaggcatacattgacattaagaactgtccaaaaaagactcggaacctgaagaagattacccgcgaacagcgccgacacatgaaaagatgggagtacttcatcgcagcggaagaagtgatatgggactacgctcctgtcattcccgcaaacatggacaagaagtatagaagccagcaccttgataacttcagcaaccaaattggaaagcactacaagaaagtaatgtatacccagtacgaagatgagtcattcacgaaacacactgttaatccaaatatgaaggaagatggtatacttggaccaattatcagggcccaggtcagagacaccctgaaaattgtgtttaagaacatggcaagccgtccttactcgatctaccctcacggagtgactttttccccatacgaggacgaagtcaactcctcattcacctccggcagaaacaacaccatgataagggcagtgcagcctggagagacttacacctacaagtggaatatactcgaatttgatgaacccacggaaaacgatgctcaatgccttactagaccttactacagcgacgtcgacatcatgagagacatcgcttcaggactgattggactcctgcttatctgtaagtcccgcagtttggaccgccgggggattcaacgggccgccgatatcgaacaacaagctgtgttcgcagtgtttgacgaaaacaagagctggtacctggaagataacattaacaagttttgtgaaaaccctgatgaggtcaagagggatgatccgaagttttacgagtcgaacataatgtcgaccatcaatggttacgtccctgagtccatcactaccctgggattttgttttgatgataccgtccagtggcatttctgttcagtgggaactcagaacgagatcctcaccattcattttacgggtcactccttcatctacggcaaaagacatgaagataccctgactctttttcctatgaggggagagtcggtaactgtgaccatggataacgtgggtacctggatgcttacttcaatgaactcatcaccgagatccaaaaagctgagactgaaatttcgtgatgtaaaatgtattcctgatgatgatgaagattcatatgagatttttgaaccccctgaaagcaccgtgatggcaaccagaaaaatgcatgaccgccttgaaccagaggatgaagaaagcgatgcagactacgactaccaaaaccggcttgctgccgcgcttggaattagatccttccgcaattcctcactcaatcaagaagaagaggaattcaacctgaccgcgctcgcacttgagaatggaactgagtttgtctcttccaacaccgacattatcgtcggatcaaactactcaagcccttcaaacatttcgaagttcacggtgaacaacttggcagagccccagaaggcccccagccaccagcaagccactaccgcaggatcaccactccgacatctgattggtaaaaactcggtgcttaactcgagcactgcagaacatagcagcccatactcagaggaccccatcgaagatccacttcaacctgacgtgaccggtatacgcctgctgagcctcggggcaggcgagtttaagtcgcaggaacatgccaagcataaggggcctaaggttgaacgagatcaggcagcgaagcatagattttcctggatgaagctcttggcccacaaggtgggacggcatctgagccaagacaccgggtcgcccagcggaatgcggccgtgggaagatttgcccagccaggatacgggctccccctcaagaatgcgtccatggaaagacccgccctcagatctcctccttcttaagcagagcaactcgtccaaaattctcgttggacggtggcatctcgcctcggaaaagggttcgtatgagatcatccaggatactgatgaagatactgccgtgaataactggctgatctcgccacaaaatgcatcgagagcatggggcgaatcaaccccattggcaaataagccaggaaagcagagcggccacccgaaatttcctagagtgcgccataagtcgctgcaagtgcggcaggacgggggaaagtcgcggttgaagaagtcccagtttctcattaagacccggaagaagaaaaaggaaaagcatacccatcacgcaccactgtcgccacgaaccttccatcctctccgtagcgaggcgtacaatactttttcagaacggcgacttaagcattccctcgtcttgcataagagcaacgaaacgagccttccaacggatttgaaccaaaccctgccttccatggattttggctggatcgcctcccttcctgatcataaccaaaactcatctaacgacaccgggcaagccagctgtcctccgggcctttaccaaaccgtccctccggaagagcactaccaaaccttcccaattcaagatccggatcaaatgcactctactagcgatccctcacataggtcctcttcacccgaactttccgaaatgctggaatacgacagatcccataaatcgtttcccactgatatctcgcaaatgagcccatcctccgaacatgaggtgtggcagaccgtgatttcgccagatctttctcaagtcactctgagtcccgaactgtcacaaactaacctttcccctgacttgtctcacaccaccctcagtcccgaacttatccagcgcaacctttcgccagctctgggtcagatgccaatctcgcctgacctgagccacaccaccctttcgcctgaccttagccatactactctgtcacttgacttgtcgcagactaatctgtctcccgagctgtcccagacgaacctctcccccgcactcggacaaatgccactttcgccggacctgtctcataccaccctgtccctggatttttcgcaaactaacctgtcgccagagctttcccatatgacgctgtcgccagaactctcgcaaactaatcttagcccagcactgggacagatgcccattagtcctgacctgtcgcataccactctgtcattggacttcagccagaccaacttgtcccctgagctctcccagactaaccttagccccgcacttggccaaatgcctttgtcgccagacccttcccataccaccctctcgctcgacctgtcccaaactaatctctcccctgaacttagtcaaacgaatcttagtccagacctgtccgagatgcctctttttgccgatctgtcgcagatacccttgaccccagacctggatcaaatgacgcttagccctgacctgggtgaaaccgacctgtccccaaatttcggtcaaatgtcgctgtcaccagacctctcgcaggtgaccctttcgccagacatatcagatactactctgcttccggatctttcccaaatatcccctccgcctgatctggatcaaatcttttacccgtcggagtcctcgcagtccctcctgctgcaggaattcaacgaaagttttccatatcctgatctcggccaaatgccaagcccttcctcccctacgctcaatgatacctttctgtcgaaagagttcaacccgcttgttattgtcggactctcgaaagatgggactgattacattgagattattccgaaagaggaagtgcagagcagcgaggatgattacgcagaaattgattatgtgccctatgatgacccttacaaaaccgacgtgcgtactaacattaacagctcgcgggatcctgataacattgccgcatggtaccttagaagcaacaatggtaatcgaagaaattactacatcgcagctgaagagatctcgtgggattacagcgaattcgtccaacgtgaaaccgacatcgaggacagcgacgatattccagaggatactacttacaagaaggtcgtttttcgcaagtaccttgattccacctttacgaagcgggatcctagaggggaatatgaggaacaccttggtattctgggacccattatccgcgcagaagtggacgacgtcatccaagtgcggttcaagaatcttgcatcacggccttactcgcttcacgcgcacggtctttcctacgagaagtcctcggagggaaagacttacgaagatgattcacctgaatggtttaaggaagataatgcggtccagcctaactcctcgtatacctacgtgtggcatgcaactgaaagatcgggtccagaatcgccaggctccgcatgccgggcatgggcctactactccgcagtgaaccccgaaaaggatattcactcaggcttgatcggtccgcttctcatctgtcaaaagggaattctgcacaaagattcgaatatgccaatggatatgcgtgagtttgtcctgctgtttatgactttcgacgagaagaaatcatggtactacgagaaaaagagtagatcttcgtggcgactgacttcatctgaaatgaaaaagtcgcacgaatttcatgccattaatggtatgatttactccctgccgggtctgaagatgtatgaacaagaatgggtgaggcttcacctcttgaatatcggcggatcccaagacattcatgtggtgcattttcatgggcaaactctgcttgagaatggcaataagcaacatcaacttggagtgtggcctctgttgccaggatcattcaaaactctggagatgaaggcatcaaaacccggttggtggctcctgaacacggaagtgggagagaatcaacgcgctggtatgcagacgccttttctcattatggatagagattgtcgcatgcctatggggctttctaccggaatcatctccgattcgcagataaaagcaagtgaatttctcgggtactgggaaccacgacttgccagactcaataatggaggttcctacaatgcgtggagcgtcgagaagctggcggcagaattcgcatcgaagccttggattcaagttgatatgcaaaaggaggtgattatcactgggatccaaactcagggtgcaaagcattacctgaagagttgctacaccaccgagttttacgtggcgtactcctcgaatcagattaactggcagattttcaaaggaaacagcacccggaatgtgatgtacttcaacggaaactccgatgcttccactattaaggagaaccagttcgaccctcccattgtggcaaggtacatcaggattagcccaacccgagcatacaacaggcctactctgcgactcgaactgcagggctgcgaggtgaacggctgcagcaccccactgggaatggagaacgggaagattgaaaacaagcagattaccgcatcgtcatttaagaagtcctggtggggtgactactgggagccttttcgagcaagactcaatgcacagggaagagtcaacgcctggcaagcgaaggccaacaacaataagcaatggctggaaatagatctcctgaaaatcaagaaaatcaccgccatcattacccagggatgtaagtcgttgtcgagcgaaatgtacgtgaaatcctacaccattcactactcggaacaaggagtagaatggaaaccctacagactgaaatcctcaatggtcgataagatatttgaagggaatactaatacgaagggtcacgtgaagaatttctttaacccacccattatctccagatttatccgtgtgattcccaagacctggaaccagtcgatcgcattgaggttggaactctttggttgcgacatatat

SEQ ID NO: 9039 - DNA, 6672 bp, synthetic construct
  misc_feature 1..6672: note = source = /note="Description of Artificial Sequence: Synthetic coding sequence"
  source 1..6672: mol_type = other DNA
atgttccctggctgtccccgcctttgggtgctcgtggtgttgggtacatcttgggtgggctggggctcacaagggaccgaagctgcccagttgcgtcagttctacgtagcggcccagggcatttcctggtcctacagaccagaaccgaccaactcgtcattgaatctatctgtcacctcgtttaagaaaattgtttatcgagagtacgaaccctatttcaaaaaggaaaaaccccagagtaccatttccggcctgctcggcccaacattgtatgccgaagtcggcgatattataaaggtacacttcaaaaataaggctgataagccccttagcatccatccccaaggaatcaggtactcgaaactgtcagagggcgcttcctacctggaccatactttccctgccgaaaaaatggacgacgccgtcgctcctggtagagaatatacttacgagtggtcaatctcggaggatagcgggcccacccatgacgatccaccttgtttgacccacatttattactcacacgaaaacctgatagaggactttaattctggtctgatcgggccacttctcatctgtaagaaggggactctgacagaaggaggcacccagaagacgttcgacaagcaaatcgtgttgctttttgcggtgttcgatgagagtaagagttggtctcagtcctcatcgctcatgtatactgtcaatggctacgtgaacgggacaatgccggatattacagtctgcgcccacgatcatatttcttggcatctactcgggatgtcttcaggcccggaattgtttagcattcattttaatggccaggtcctcgaacaaaatcaccacaaagtttccgccatcaccctggtgtccgcaacatctaccactgcaaacatgacggtgggcccagagggtaaatggattattagcagtctcacaccgaaacatctgcaagctggcatgcaagcctacatcgacatcaagaattgtccaaagaaaaccagaaatctcaagaagattacaagagagcaacgtcgacacatgaaacgatgggagtactttattgcagcagaagaagtgatctgggactatgccccagtgataccagcgaatatggataagaaatacaggtcccagcacttggacaattttagtaatcaaataggtaaacactataaaaaagtgatgtacacacagtacgaggacgaaagcttcacaaagcacaccgttaacccaaacatgaaggaggacggcattctcggacctatcattcgagcacaggtgcgagatacactgaagatagttttcaaaaatatggctagtagaccctattctatttatcctcatggggtgactttctcgccctacgaggatgaggtaaatagctctttcacctccggaaggaataacaccatgatccgagccgtgcagcctggagagacctatacttacaagtggaacatcttggagtttgatgaacccacagaaaatgatgcacagtgtttaactcgaccgtattatagcgatgtcgacataatgcgagatatagcctccggactgattggtcttttactgatctgtaagagtcgatccctcgatcgaagaggcatccagcgcgccgccgacatcgagcaacaggccgtcttcgcagtgttcgatgaaaacaagagctggtacctcgaagacaatattaacaaattttgtgaaaatcctgacgaagttaagcgggacgaccctaaattctatgaatctaatataatgagcactataaatgggtatgtgcctgagagcatcactacactggggttttgcttcgacgatactgtgcaatggcacttctgttccgttggaacccagaatgagatccttaccatccacttcactgggcactccttcatctacgggaagcgacacgaagacacattaaccctcttcccaatgagaggtgaatctgtgactgtaaccatggataacgtaggcacgtggatgctgacttctatgaactcttccccacgatcgaagaaactccgactaaaattccgagatgtcaaatgtattcctgacgacgacgaagactcctatgaaatcttcgagccccctgaaagcacagtgatggccactcgcaaaatgcacgacagactcgagcccgaggacgaggaaagtgacgccgactatgactatcagaatagactagccgccgctctgggcatcaggtcttttcgaaattcatcactgaatcaggaagaggaagagttcaacctcaccgccctcgcgttagagaatggtacggagttcgtctcttctaatactgatatcattgtggggagtaactacagttctcctagcaatatctccaaatttaccgtcaataacctggcagaacctcagaaggcgccatctcatcaacaagccactactgcaggcagccctctaaggcacctcatcggaaagaactccgtgcttaactcgagtacagcagaacactcaagcccttatagtgaagacccaattgaggacccattgcagcccgatgtaacaggtattcgactgctgtctctgggcgcaggcgaatttaaatctcaagagcacgcgaagcacaagggtcccaaggtggagcgggatcaggcagctaagcatagatttagctggatgaaactcctggcccacaaggtcggtaggcacctcagtcaagacacgggtagtccttctgggatgaggccttgggaagacctcccttcccaggacactgggtcacccagccgaatgagaccttggaaagatccacccagcgacctgttgctgctcaaacagagtaacagctctaagatcttggttgggcgatggcacctcgccagcgagaaaggcagctacgaaatcattcaggatactgatgaggatacagccgtgaataattggctcatttctccacagaatgcgtccagagcatggggggagagtacccctttggccaacaaacccgggaaacagtctggccaccccaaattcccgagagtgcgacataaaagcttacaggtgaggcaggatggcggcaagtcacgactgaaaaagtctcagttcctcatcaaaaccaggaaaaaaaaaaaggagaaacatactcaccatgccccactctcccccagaaccttccatcccctgaggagcgaggcttacaacaccttctcagagagacgattgaaacatagcttggtgctccataaatctaacgaaaccagccttcctacagacctgaaccaaacacttccaagtatggacttcggctggatcgctagcttgcctgatcacaaccagaattctagtaacgacaccgggcaggcatcatgccctcctggtctctaccagaccgtcccgccggaggaacattaccagacattcccaattcaagatcccgaccagatgcattccacttcagatccaagccaccgatcatcgtctcccgagttgtcagaaatgctggaatacgatcgttcccacaaatctttccccacggatatatctcagatgtcaccatcatctgagcacgaagtatggcagacagtgatttctcctgatctaagccaggtgacgctttcccctgaactctctcagacaaatctcagtccagatctgtctcatacaaccttgagccctgaactcatccaacgaaatttgtcaccagctcttgggcagatgccaatatccccagacctgtcccacacaacactgagccccgatctatctcatacaacattgtctctggacttgagccagacaaacttgtctcctgagctgtcccaaacaaatttgagcccagccctgggccagatgccactgtcccccgatttaagtcacacaacactctcgctggacttctcccagactaatctttcaccagagctcagccatatgaccctctccccagagctgtctcaaactaacctgtccccggccctaggacagatgcccatcagcccggatctctcacacactactctgtctctcgattttagccagaccaacctgagtcctgagctgtctcagactaacctgagtcctgccctgggccagatgcccttatcacccgatccctcccacaccactctgtcactggacctctctcagacaaacctttcccctgaactgagtcagactaacttaagtccagatctttctgaaatgcccctgtttgcggacctgtcccagataccgctcactcccgatctggaccagatgaccctgtctccagacctgggggaaaccgatctgagccccaacttcgggcagatgagtttatccccagatttgagtcaggtgacgctgagcccagacatctctgacaccaccttgctcccagacctctctcagatcagcccaccccccgacctagatcaaatcttttacccaagtgagtcttcccagtcactgttgctccaggagttcaatgagagcttcccatatccagacctcggccagatgccatcaccgtcctctcccacactaaacgacactttcttaagtaaagaattcaaccctctggtgattgtgggtttgagtaaagatggcacagactacatcgagattatcccgaaagaagaagtgcaaagctccgaggatgattacgcagagatcgactatgtcccctatgatgacccgtataaaactgatgtgaggaccaacattaactccagcagggatcccgataacattgcagcttggtacctgaggagcaacaatgggaaccgaagaaactattatatcgcagccgaagagatcagctgggactattcagaatttgttcagagggagactgacatcgaagatagtgatgatatccccgaggacactacctataagaaggtggtgtttagaaagtacttggattctacgtttactaagagagatccacgaggtgaatatgaggaacacctgggcatcctgggccccataatacgtgcggaggtagacgacgtgatccaagtgcgatttaagaacttggccagcagaccctattccctacatgcacatggcctctcttatgagaaatcttccgaagggaaaacctatgaggatgatagccctgagtggttcaaggaggataatgctgtacagcctaatagtagttacacctatgtctggcacgccactgaaaggtccggccccgagagccccggcagtgcatgcagagcctgggcctactattcagcagtgaatcccgaaaaggatattcattcgggtctgattgggcctctactgatatgtcagaaggggatactccacaaagattccaatatgcccatggacatgagagagtttgtgctgctctttatgaccttcgatgaaaagaagagctggtattacgagaaaaaaagtcgatcttcctggaggttgacgtcgtccgagatgaaaaagtctcacgagtttcacgccataaatggcatgatctactccttgccgggtctgaaaatgtatgaacaggaatgggtaaggctacacctgctgaatatcggaggcagtcaggatatccacgttgtgcacttccacggacagactctgctggaaaacggaaacaagcagcaccagcttggcgtgtggccccttttgccagggtcttttaaaaccttagaaatgaaggcatcaaagcctggatggtggctcctcaacacagaggttggcgagaaccagcgagcaggcatgcaaaccccttttctcataatggaccgagactgccgaatgccaatgggattgtcaaccggcatcatcagcgactcccaaatcaaagcctcagagttccttgggtattgggaaccaagacttgccaggttgaataacggcggttcttacaacgcatggtcagtggagaagctcgctgcagagttcgcaagcaaaccctggatccaggtggatatgcagaaggaagttattatcaccggaattcagacccagggtgcgaagcactacttaaagtcttgctataccactgaattttatgtggcctacagctctaaccagatcaactggcaaatcttcaagggaaatagcaccaggaatgtgatgtactttaatggtaactctgacgcctctaccattaaggaaaaccagtttgacccaccaatcgtcgcccgctacatcaggatctcccccacaagggcctataaccgaccgaccctcagactcgagttacaaggttgtgaagtgaatggatgctcaacccccctcggtatggaaaacggtaaaattgaaaataagcagatcactgcctcctcatttaagaagtcgtggtggggggactattgggagcctttcagggctaggttgaatgcgcaaggccgagtgaacgcctggcaagctaaggctaataacaacaagcaatggttagagatcgatctcctgaagattaaaaagattaccgcaataattactcagggttgtaaaagcctcagttccgagatgtacgtcaagtcctacactatccattactcagaacagggagtcgagtggaagccatacaggctgaagagctcaatggtggacaaaatcttcgaggggaacaccaacaccaagggccacgtaaaaaacttcttcaaccctccaatcatctctagatttattcgagtgatccctaagacttggaaccagtctatcgctttgagactggagctgtttggatgtgatatctac

SEQ ID NO: 9040 - DNA, 6672 bp, synthetic construct
  misc_feature 1..6672: note = source = /note="Description of Artificial Sequence: Synthetic coding sequence"
  source 1..6672: mol_type = other DNA
atgttcccaggctgtcctcggctttgggtgttagtggtgctgggaacatcctgggtaggctggggatcccagggaaccgaggcagctcagctgaggcagttctacgtggccgcccagggcatatcttggtcttatcgtccagaaccaaccaacagttcactgaatctgtctgtcacctcctttaagaaaatagtatacagggagtacgaaccttactttaagaaagaaaagcctcagtctaccataagtgggttattagggcctacactgtacgctgaggtaggcgatatcatcaaagtgcacttcaagaacaaggctgataagcccctgagcatccatccacagggcattagatacagcaagttgtccgaaggagcatcctacctggatcataccttcccagccgagaagatggacgacgccgtcgctcctggccgggagtatacttatgagtggtccatcagcgaggatagcggccctactcacgacgaccccccttgcctcacccacatatactatagtcatgagaacctaatcgaggatttcaacagtgggctaataggcccccttctgatctgcaagaaggggacattaacagagggcggaacacagaaaacctttgacaagcaaattgtgctgctgttcgcagtttttgatgagtccaagtcttggtctcagagctcctcacttatgtacacagttaacggctacgtcaatggcacaatgcctgacattaccgtgtgtgctcacgatcatatcagttggcacctgctcggtatgtcatccgggcccgaactgtttagtatccattttaatggccaggtgctagaacaaaatcaccacaaggtgtcagctatcactcttgtgtcagctacatctacaactgctaatatgaccgtgggccccgagggcaagtggataatctcttccctaacccctaagcacctccaggccgggatgcaggcttacatagacattaagaactgtcctaaaaagactcggaatctgaaaaagatcaccagggaacagaggcgccacatgaagcggtgggagtattttatcgccgctgaggaggtgatatgggattatgctcccgttattccagcaaacatggacaagaaatacagatcacaacacctggataactttagtaaccagatcggcaaacattacaagaaggtgatgtacacccagtatgaagacgaatccttcacaaagcatactgttaaccccaacatgaaagaagacggtatcctcgggccaattattcgcgcccaagtcagggataccttaaagatagttttcaagaatatggcctctagaccttacagtatctacccacatggcgtgaccttcagcccatatgaggatgaagtgaattcttctttcactagcggccggaataatactatgattcgggccgtgcagcccggggagacctatacatataagtggaacatactcgagttcgacgagcccactgagaacgacgcacagtgtctgactcgcccttactattccgacgtcgatataatgagggatatagcctccggcctgattgggttgctgctcatctgtaaaagccgcagcttagaccgtagaggcatacaacgtgccgcagacatagaacagcaggccgtgttcgccgtgtttgacgaaaataaaagctggtatctggaagacaacatcaacaaattttgtgaaaatcctgacgaggtcaagcgcgacgatcctaaattttatgagtccaatatcatgagtaccattaatgggtacgttcctgagtccataaccactctgggcttctgtttcgacgatactgtgcaatggcacttctgcagcgtgggaacccagaatgagatcctgactatacactttactggacactcttttatttatggaaagcggcacgaagacacattgacactctttcctatgcggggtgaaagtgtgaccgtcaccatggataacgttggcacctggatgctcacatctatgaatagctccccacgtagcaaaaagctgcgcttaaaattccgggacgtgaagtgtattcccgacgatgatgaggacagttacgaaatcttcgaaccacctgaatctaccgtgatggccacccgcaaaatgcacgacaggttagagcctgaggatgaggaatccgatgccgattatgattaccaaaataggctggccgctgccttaggaattagatccttcagaaacagttctctcaatcaggaggaagaagagttcaacctaaccgctctagcactggagaacggaacagagtttgtcagcagcaacaccgatattatagttggttccaactactctagtcccagcaacatctctaagtttacagtgaataacttagcagagcctcagaaggctccctcacaccaacaggccactaccgcaggcagcccactgaggcacttaatcgggaaaaactccgttcttaactccagtaccgctgaacattctagtccttattcagaagaccctattgaagaccccctccaacctgacgtgacaggcataaggctcctgtcactgggtgccggcgaattcaagtcccaggaacacgcaaagcacaagggtcccaaggtcgaaagggaccaggccgccaaacaccggttctcctggatgaaactcctcgcccacaaagtcggccgccacctaagccaagataccggttctccaagtggaatgaggccatgggaagacctgccatctcaggatacaggctctccctcccggatgcgaccttggaaagaccctcctagcgacctcctgctactgaaacaatctaattcttccaagatccttgtggggcgctggcatctggctagcgaaaaaggctcatacgagatcatccaggataccgacgaagacactgccgtgaacaactggttaataagccctcaaaatgcctcccgcgcatggggtgaatctacccctttagccaacaaaccaggcaagcaaagtggccatcccaagttccccagggttaggcacaagtccctgcaggtcagacaggacggaggcaagagtcgactcaagaagagtcagttcctgattaagactcggaagaagaaaaaagagaaacatacccatcacgccccactatcaccacggaccttccatcctctgcgatccgaggcctacaataccttttccgagagaagattaaagcacagtctggtactacataagagcaatgaaacttccttaccaaccgatctcaatcagaccttaccctccatggacttcggctggatagcttccctgccagaccacaaccagaacagtagcaatgatacaggccaagcttcctgtccaccaggcctgtatcagactgtccccccagaagagcactatcagaccttccccattcaggatcctgatcaaatgcatagtacatctgatccttcccaccgctctagctcccccgaactgtcagagatgctagagtacgatagatcccacaagtcctttccaacagatataagccagatgtcaccaagttctgagcacgaggtgtggcaaaccgtgatcagtcctgatctaagtcaggtcaccctctctcctgaactgtcacaaactaatttgagtcctgacctgagccataccacattatctcctgagctgattcaacgcaacctctctcccgcccttggacagatgcccatcagcccagacttgtcccatactacactgagtccagatctgagccacaccactctgtcactagacctgtcccaaactaatctgtccccagaattgagccagaccaacctcagtccagccttgggtcaaatgccactctcccccgatctgagtcacaccacactttcccttgattttagccaaacaaacttatcccctgagctgtcccacatgaccctgagcccagaactctcccagaccaatctgtctcctgccctggggcaaatgcctatctctcctgacttgtctcacactacactgagcctcgacttttcccagaccaatctgagccctgaactcagccaaaccaatctgagtccagccctgggccagatgcctctgagtcccgatccctctcataccaccctgagtttagacttgtcccaaacaaacctgagtcctgagctgtctcagaccaacttaagccccgatcttagcgaaatgcccctgttcgctgacctgtctcagatcccactaacccccgatctggaccagatgactttaagtcctgatcttggcgagacagatcttagccccaattttggccagatgtcactgtcccctgatctaagtcaggtgaccctgtctcccgacattagcgatacaaccctcctgcccgacctgtctcagatatccccaccacccgatttggaccagattttctatcctagtgaaagctcccagagcttactcctgcaggagtttaatgagtctttcccatatccagacctgggacaaatgcccagcccaagtagccctactctgaatgatacattcctgtctaaagaatttaaccccttagttattgttggcctgtcaaaggatggcacagactatatcgagattatcccaaaggaggaagttcagtcaagtgaggacgactatgctgagatcgattacgtgccctacgacgacccatataagactgacgtccggaccaacatcaattcttccagggaccctgacaatatcgctgcctggtacctgcgatccaataacggcaacaggcgcaattactacatcgccgccgaagaaatttcctgggactactccgaatttgttcaacgcgagaccgatatcgaggatagcgatgacattcccgaagatacaacctataaaaaggtcgtgtttcggaagtatctggactccaccttcacaaagcgtgacccacggggggagtatgaagagcacctaggcatactggggccaatcattcgggcagaggtggacgacgttatccaggtcaggttcaagaatcttgcttctcggccctacagcctgcacgcccatggcctgagctacgagaaaagttctgagggcaaaacatacgaagacgattccccagaatggtttaaagaagataacgccgtgcagcccaactcaagttacacctatgtgtggcatgctaccgaacgaagtggccctgaaagtccaggcagtgcatgccgggcttgggcctactacagtgccgttaacccagaaaaagatattcattccggactgattggtcctctgctgatttgtcagaagggcatcctgcataaagatagcaatatgccaatggatatgagagagttcgtgctactgttcatgacctttgacgagaaaaagtcctggtactacgagaaaaagagccggtcctcatggcgactgacatcctctgagatgaaaaagtcccacgagttccatgcaataaacggcatgatatactcattgcctggcctgaaaatgtacgagcaagagtgggtgcgtctgcatctcctgaatatagggggctctcaggatattcatgtggttcacttccacggtcagactttgctcgagaatggaaataagcagcaccaactaggggtttggccactcctccctggaagctttaagaccctcgagatgaaagcctctaagcctgggtggtggctactgaatacagaggtgggtgaaaaccaacgcgccggcatgcaaaccccttttttaataatggaccgggattgcagaatgcctatggggctatctaccggaatcatcagtgacagtcaaattaaagctagtgagttcctaggatactgggaacctcgtctggccaggctaaacaatggcgggagttacaatgcttggtccgtggagaaactcgccgccgaatttgcatctaagccttggatacaagtggatatgcagaaggaagttatcataaccggcatacagacccagggcgctaaacactatctaaagagttgctacaccacagagttttatgtggcttactcttctaaccagattaattggcaaatctttaaagggaattctaccagaaatgtgatgtattttaacggcaactcagatgcatccaccataaaagagaaccagttcgacccacctatcgttgccaggtatatacgcattagtcccaccagagcctataacagaccaactctgcgcttggagctgcaaggctgtgaggtgaacggctgctctactccactgggcatggagaatggcaagatagaaaacaaacagatcactgcttcttctttcaagaaatcatggtggggggactattgggaacctttccgggctcgcttaaatgctcaaggccgcgtgaatgcttggcaggctaaggccaataataataaacagtggctagaaattgatctgctgaaaataaagaagattaccgccattattacccagggctgcaaatccctatcaagtgagatgtatgtcaagagttacaccatacactatagcgagcaaggtgtagagtggaaaccctaccggctgaagagcagtatggtggacaagatattcgagggaaataccaatactaaaggacacgtcaagaacttcttcaatccaccaattatatctcgctttatacgggttatccccaaaacttggaatcaaagtatcgcactgagactggagctgtttggatgcgacatttat

SEQ ID NO: 9041 - DNA, 6672 bp, synthetic construct
  misc_feature 1..6672: note = source = /note="Description of Artificial Sequence: Synthetic coding sequence"
  source 1..6672: mol_type = other DNA
atgttcccaggctgtccgcgactttgggtgcttgtcgtgttgggtacctcttgggtaggctgggggagtcaaggcaccgaggcggctcaactccgccagttttacgttgctgcgcaaggaatatcgtggtcctacagacccgaaccgactaactcttcactgaatttaagcgtgactagcttcaagaagatcgtgtacagggaatacgagccttacttcaaaaaagaaaagcctcagtcaacgatttccggcctgttgggcccaactctttatgccgaggtcggagacatcatcaaggtgcatttcaagaacaaagctgacaaaccgttgtcaatccacccccaagggatccgctatagcaaattgagcgaaggggcaagctatctggatcacaccttcccagccgagaaaatggacgatgctgttgctcctgggagagagtacacctacgagtggtccatctcagaggacagcggccctacccacgatgatccaccatgccttacccacatatactatagtcatgaaaacttgatcgaagactttaactccggactgattggtcctctgctgatttgcaagaagggcacccttaccgagggcggaacccagaagaccttcgataaacaaattgtcttgctgtttgcagtttttgatgagtccaagagttggagtcaaagcagttctcttatgtacactgtcaatggctacgtcaacggcactatgcccgacatcactgtctgcgcccatgatcacatcagttggcatctgctcggaatgagttcaggacccgaactgttcagtatccacttcaatgggcaggtgctggagcagaaccatcataaagtttctgctattacactcgtgagcgccaccagcacgaccgcgaacatgacagtgggccctgagggaaaatggatcataagcagcctgacacctaaacaccttcaagccggaatgcaggcatacatcgatatcaagaactgccctaagaaaacacgcaatctcaagaaaatcaccagggagcaacgccgtcacatgaagcgctgggagtactttatcgctgctgaagaggtgatatgggattacgcgcctgtcatcccagccaacatggacaaaaagtatcgtagccagcacctggacaacttctctaaccagatcgggaaacactataagaaagttatgtacacgcagtatgaggacgaatctttcactaaacacaccgtgaatcctaacatgaaagaagatggcattctgggaccgattatcagagctcaggtcagggatactttgaagatagtcttcaaaaacatggcatccaggccctatagcatctacccccacggagtgacattcagcccctatgaagacgaggtaaactcatcctttaccagcggcaggaataacaccatgattcgggctgtacaacctggcgaaacctacacatataagtggaatattctggaattcgacgaacctacagagaacgatgcacagtgtctgaccagaccctattactctgacgtcgatatcatgagggatatcgctagcggtctgattgggctgcttctgatctgcaagagccgttcgctggataggagaggcatccagagggcagccgatatcgagcaacaggccgtatttgctgtctttgacgagaacaaatcctggtatcttgaagataatatcaacaaattctgcgagaaccccgatgaggtcaaaagggacgatcccaaattttacgagtctaacatcatgtccacaattaatggatatgtgcctgagagcatcactacgttaggcttctgctttgacgacacagtgcaatggcacttctgttcggtcggaacacagaacgagatcttgaccattcattttaccggacacagctttatatatggcaagcgtcatgaagacacgctcacactgtttccaatgcgaggagagtcagtgactgtcacaatggataacgtcggcacctggatgttgacctccatgaacagctcaccacgcagcaagaagctgaggctgaagtttagagacgttaagtgtatcccggatgatgatgaagactcatatgaaatctttgagccacctgagtccaccgtcatggcaacgaggaaaatgcatgacaggctcgagcccgaagatgaagagtctgacgcagattatgattaccaaaaccgccttgccgccgccctgggaatcagaagctttagaaactcatctcttaaccaggaggaggaagagttcaacttgacagccctggctttggaaaacggcaccgagtttgtgtctagtaacaccgatataatcgtgggaagcaactacagctctccctccaacatttctaagttcacagtgaacaatctggccgaaccgcagaaagcaccatcgcaccaacaagcaactacagccggcagcccgctcaggcaccttatcggaaagaacagtgtactgaatagtagcacagctgagcactctagcccctattccgaggatccaatcgaggacccattacagcccgatgttactggcatccgacttctgagcctgggcgctggggagttcaagagccaggagcacgcaaagcataagggtcccaaagtcgaacgggatcaggccgcaaagcatagattcagctggatgaagctccttgcacataaagtgggcaggcacctttcacaggacacagggagccctagtggtatgaggccatgggaagaccttcccagccaagacactggaagccctagcaggatgcgtccttggaaggacccaccctcggatttgttgcttctcaagcagagcaatagttcaaaaattctggtgggccgctggcacctggccagcgagaagggatcatatgagatcatacaggataccgatgaagatacagctgtgaacaactggctcatctctccacagaacgcgtccagggcctggggagaatcaaccccccttgcaaacaaacctggcaaacagtcaggacatcccaagttccctagagtgagacacaagagcctgcaagttagacaagacggcgggaaaagccgcttgaaaaagtctcaatttcttattaaaacgaggaaaaaaaaaaaagaaaaacatacgcaccacgcaccactgagcccgagaactttccacccgctccgtagtgaggcttataacacattctctgagcgccgactgaaacatagtttggtgcttcataagagcaacgagaccagtctgccgaccgacttgaaccagactctgccaagcatggattttggatggattgccagcctcccagatcacaaccaaaattctagcaacgatactggacaggcaagttgtcccccaggactgtaccagaccgtgcccccggaggaacattaccaaacattccccatacaagatcctgatcagatgcattccacatctgatcccagccataggagttcatcccctgaactgtcggagatgttagagtatgataggagccacaaaagctttccaacagacatctcccagatgtctcctagttctgagcacgaggtctggcagactgtcatcagtcctgatctctctcaagtgacactaagccccgaattgagtcagaccaacttgtcaccagatttgtctcacacaacgttgagtcctgagctgattcagcgcaatttgagcccggctctcggacagatgcccatctctcccgacctgtctcatacaaccttgtctccggatctgtctcacaccactctcagtttggacttaagccaaactaatctgagtcctgagctcagccaaactaacctgagccctgcccttggtcaaatgcccctttccccagacctgtcacacacgactctgagcctcgacttctcacagactaaccttagcccagaactgtcccacatgactctcagtccggaactgtctcagaccaacctgtctcctgcattagggcaaatgccaatttctcccgatctgagccacacgacactgagcctcgatttcagccaaaccaatctgtctcccgaactgagccaaaccaacttgagtcccgccctgggacagatgcctctgtcacccgacccctcacataccaccttgagcctcgatctgtctcaaactaacctcagtccagagttaagtcaaactaatctctctccagatctgtctgaaatgccgctgtttgctgatcttagccagatcccactgacgcccgatcttgatcagatgaccttatcgcctgacctgggagaaaccgacctttctcctaattttgggcaaatgagcctctcgcccgatctgagccaagtgaccctgagcccagatattagtgacaccaccctgttgccagacctgagtcaaatcagcccccctcctgacctggaccaaatcttctacccatcggagagctcccagtctctgctgctgcaggagttcaatgaatcatttccatacccggatttgggccaaatgccttcaccttccagtccaaccctgaacgacacatttcttagcaaggaatttaaccctctcgtgatcgtcggcttgtcgaaggatgggacagactacatcgagatcatcccgaaagaggaagtgcagtcttctgaggatgattatgcagagatcgactacgttccctacgatgatccctacaaaaccgatgtgcggaccaacattaactcgtccagggaccctgataacatcgcggcctggtacctcagaagcaataatggcaatcgccgcaactattacattgcggctgaggaaatttcttgggactacagcgagtttgtccagagagagaccgatatcgaagattccgatgatatccccgaggatactacatacaaaaaggttgtgtttaggaaatatctggattcaacctttacaaagcgggaccccagaggcgaatacgaggagcacctgggaatccttgggccgattatacgggctgaggtagatgacgttatccaagtcaggttcaaaaacttggcaagcaggccctattctctccacgcacacggactttcttacgagaaatccagcgaggggaagacttacgaagatgatagccctgagtggttcaaagaagacaacgccgtccaaccaaactcgagctacacatacgtgtggcatgctacagaaaggtcaggccctgagagcccgggaagtgcttgtagggcatgggcttactatagcgctgtcaatccagaaaaggatatacacagtgggcttattgggccgttgttaatttgccagaagggcatccttcacaaagatagcaatatgcccatggatatgagagaatttgtgctgctgttcatgacatttgatgagaaaaagagctggtattacgagaagaagagccgcagttcatggaggttgacctcaagcgaaatgaagaagagtcatgaattccacgcgatcaacggcatgatctattccttgcccggcctgaaaatgtatgagcaagagtgggtgcgcctgcacctgctgaacattggtggcagccaagatatccatgttgtccatttccatggtcagacgctacttgagaatggtaacaaacaacatcaactcggggtatggcccctgctgcccggcagctttaaaacgctggaaatgaaagcaagtaagcctgggtggtggctgttaaacactgaagttggcgagaaccagcgggccggcatgcagacgcccttcctgatcatggatcgcgactgtaggatgccaatgggactctccacagggatcattagtgattcccagattaaggcctcagagtttctgggctactgggagcctcgactggcccgtcttaacaacgggggaagttacaacgcctggagcgtggagaagttagccgcagaattcgcaagtaagccctggatacaggttgacatgcaaaaagaagtgatcatcacaggcatccaaacacagggtgccaagcattatctcaagtcatgttacaccactgagttctatgtggcttatagtagcaatcagattaattggcagattttcaaaggcaactccaccaggaacgtgatgtactttaatgggaattccgatgcctcaaccattaaagaaaatcagtttgaccctccaatcgtcgcgcggtacatcagaatcagtccaaccagggcctacaaccggcccaccctccgccttgaactgcagggatgtgaagtgaacggttgttccactccactgggaatggagaacggcaagattgaaaataaacagataacagcaagttctttcaaaaagagctggtggggcgattactgggaaccttttagagctcggctgaacgcccagggaagggtgaacgcgtggcaggccaaggctaataataacaagcagtggcttgagattgatctgctgaagatcaagaaaattaccgcaatcattacccagggctgtaagagtctctcatcagagatgtacgttaagagctacactatacactacagcgagcagggcgtagaatggaaaccatacagactcaaatctagtatggtggacaaaatctttgaaggcaacaccaatactaagggccatgtgaaaaatttctttaaccctcctatcatctctcgctttatccgggtgatacctaagacatggaaccaatctatagctttgagactggagctgttcggatgcgacatctat

SEQ ID NO: 9042 - DNA, 6672 bp, synthetic construct
  misc_feature 1..6672: note = source = /note="Description of Artificial Sequence: Synthetic coding sequence"
  source 1..6672: mol_type = other DNA
atgtttcccgggtgccctagactgtgggtgctggtggtgcttggcacgtcttgggtgggctggggatctcaaggcactgaagccgctcaactccgccagttctatgtggccgcccagggaatcagctggagttataggccagaacctactaactcctctctcaacttgagcgtaacctccttcaaaaaaattgtgtaccgcgagtacgagccctatttcaagaaagaaaagcctcagtccaccatcagtggacttctcggccctaccctgtatgctgaagtcggcgacattatcaaggtgcacttcaagaataaagcagataagcctctcagcattcatccacaaggcataaggtactccaaactcagcgagggggcaagttatcttgaccatacgttccctgctgaaaagatggatgacgcagtcgcgccagggcgcgagtacacctacgagtggtccatttcagaggacagcggaccaacccatgacgaccctccatgtctcacacatatatactattcccacgagaacctgattgaggacttcaactccggcctgattggacccctgctcatttgtaagaaaggcactctgacggaggggggcacccagaagacctttgacaaacagatcgtcttgctgttcgccgtgtttgatgagtcaaagtcatggagccagtccagttccttgatgtatacggtgaacggatatgtgaacggaacgatgcctgacatcacagtgtgtgcacacgaccatatatcatggcaccttctggggatgagcagcggtcccgaactcttttctattcacttcaacggccaggtgttggagcaaaaccaccacaaggtgtctgcgattaccctcgtgtccgccacatccactacagctaatatgactgtcgggccagaaggtaaatggatcattagttcacttactcccaagcatctgcaggcaggcatgcaggcatacatcgacatcaaaaattgtccaaaaaaaacgaggaacctcaagaagatcactcgagaacagagaagacacatgaaacgatgggagtatttcatcgcagcagaagaggtgatttgggactacgcaccagtaatacccgccaatatggacaaaaagtaccgaagtcaacacctcgataatttctcaaatcagatcggcaaacactataagaaggtgatgtatacacagtatgaagatgagagttttacaaaacataccgtgaaccccaatatgaaggaagacggtatcttgggtcccattattagggctcaagtgagagacactctgaaaattgtgttcaagaacatggcttccaggccttactctatctatcctcatggggttactttctcaccatacgaggacgaggtgaattcatcttttacgtccggtagaaacaatactatgatccgagccgtgcagcccggtgaaacatacacatataaatggaatatcctggaattcgatgagcccactgaaaacgacgcccagtgcctgacaaggccatattatagcgacgttgatattatgcgcgatattgcgtccgggctgatcgggctcctgctgatttgcaagagcaggagtctcgacagaagaggaatccagagagcggcagacattgagcagcaggcagtcttcgcagtatttgacgagaacaagagctggtatttggaggacaacatcaacaaattttgcgagaaccctgacgaggtaaaacgcgacgatcccaagttctacgagtctaatatcatgagcaccatcaacggctacgtaccagagagcattactaccctgggattctgtttcgatgacactgtgcagtggcacttttgcagtgtgggaactcagaacgaaatcctgaccatacattttaccggccattcttttatctacggcaaacgacatgaggataccctgaccttgttccccatgcgcggagagtctgtcactgtcacaatggacaatgtaggtacctggatgctgaccagcatgaatagtagtcctaggagtaagaaattgcgcctgaagttcagggacgtaaagtgtattcccgacgatgacgaagatagttatgagatctttgaacccccagaaagtacagtgatggcaacacgcaagatgcatgacagactggagcctgaggatgaggaaagcgatgctgattacgattatcaaaaccgcctcgccgctgcactgggtatcagaagtttccggaacagcagcctgaaccaggaggaggaagaatttaacctgaccgcgcttgccctggaaaacggtaccgagttcgtgtcaagcaacacagacatcatagtgggctccaactacagctccccttctaacattagtaagtttacggtgaacaacctggctgagccgcagaaggccccttcccatcagcaggcgacgaccgccgggagtcctctccggcaccttattggaaagaactccgttcttaattctagtactgcggagcattcaagcccttattcagaagacccaatcgaagacccactccaaccggacgtgactggcatcaggctgctcagtttgggcgctggtgaattcaaatcccaggagcatgccaagcacaaggggcccaaggttgagcgggaccaagccgctaaacataggttctcttggatgaaattgctggcacataaagtgggaaggcatctgtcacaggacacaggatcccctagtggcatgaggccctgggaagatcttccgagtcaagacactggctcccccagcaggatgcgaccctggaaggaccctccaagtgatctgctcctgctgaagcagagtaactcttcaaagatcctggtcggccgatggcatctggcgagcgaaaagggttcttacgagatcatacaagacacagatgaagatacggctgtgaataactggctgatttccccacaaaatgcttccagggcatggggagagtccacaccactcgcaaacaaacctggaaagcagtccgggcaccctaaatttccacgggtgcggcacaagagcctgcaggtgaggcaggacggcggaaagtctcggctgaaaaagtcacagtttctgatcaagacaaggaagaagaagaaagaaaagcatacccaccacgctccgctgagccctaggacgttccatccactgcgatcagaggcatataataccttttcagaaagacgactgaagcactccttggtgctccataagtcaaatgagaccagcctgccgaccgacctcaaccagaccctccctagcatggacttcggctggatagcctctcttcctgatcacaatcagaattccagcaacgacacggggcaggccagttgccctcccggactgtatcaaaccgtgcccccagaggagcactatcagacattccccatccaggaccctgaccagatgcattctacaagtgatccctcccacaggtcctcttctcctgagctttccgagatgctcgagtacgaccgcagtcacaaaagctttccgacggacatatcacaaatgtcccccagcagcgagcacgaggtgtggcagacggtgatcagccccgacctctctcaagtgactctgagccccgaattgagtcaaaccaacctctcccccgacctcagccacactacgctgtcacccgaactgattcagcgaaacctctctccggcgctcggccagatgcccatctctccagatctgagccacaccacgctgtcacctgatctgtctcacacaacactcagtctggatttgagccagacgaatctgtcacccgagctgtctcaaacaaatctttctcccgccctggggcagatgcctctgtcacctgacctgtcccacaccaccctgtctctggactttagccagaccaacctgagccctgaactttctcatatgaccctgagccccgagctgagtcagactaatctcagcccggctctggggcagatgcctattagccccgacctgagtcacactactctgtcacttgatttctctcagaccaatctgagccccgaactgagccagaccaacctgagcccggctctgggtcaaatgcccctgtcacctgatccaagccacacaactctgtccctggatctgtctcagacaaatctgtccccggagctgtcccaaacaaacctctcaccagatctgtctgaaatgcccctcttcgcagacctgtcacagatccccttgactccagatctggatcagatgacactctcccctgaccttggtgagaccgacctctcaccgaactttggtcagatgtccctctctcctgatctctcccaggttaccctgtccccggatatttccgacactactcttctccccgacttgagtcaaatatcccctccaccagatttggaccagatcttctatccgtctgagtccagtcagtccttgctccttcaggagttcaacgagtcctttccgtaccctgatctgggacagatgccttccccctctagcccgacactcaacgacacttttctctcaaaggaatttaatcccttggttattgtggggctgtccaaggacgggacagactacattgaaatcatccccaaagaggaggtgcaatcttccgaagacgactacgccgaaattgactatgtcccctacgacgatccatacaagactgacgtgaggaccaacatcaattcttccagggaccctgataacatcgccgcctggtatctgcgcagtaacaacggcaatcggcgaaactactatatagccgccgaggagatatcctgggactacagtgagttcgtacagagagaaacagatatagaggatagtgacgatattccagaagacacgacgtacaaaaaggtggtctttaggaagtacctcgattccacattcactaagagagaccccagaggggagtacgaagagcacctgggtatactgggtccaattattagggccgaggtcgacgacgttatccaggttcgctttaaaaacttggcaagtagaccttacagtcttcatgcgcacggactcagttacgagaagagctctgaggggaagacgtatgaggacgactcacccgaatggtttaaggaagataatgcggtccagccaaattcttcttatacatatgtttggcacgccacagaacgctctggccctgaatcccccggcagtgcgtgtagagcatgggcttactattcagccgtcaaccctgagaaagatattcacagcgggctgatcgggccgttgctgatttgccagaaagggatattgcataaagacagtaacatgcctatggatatgagagaattcgtacttctgttcatgaccttcgacgagaaaaagagctggtactacgagaagaagagccgcagctcctggcggctgacctccagcgaaatgaaaaaaagtcatgaatttcacgccataaatggcatgatctatagtcttcccggcctgaagatgtacgagcaggagtgggtgcgcctgcacctgctgaacatcggaggatcccaggatatccacgtcgtgcacttccatggccaaacactcctggagaatggaaacaaacaacaccagctgggggtttggccactgctgcccggttcctttaaaacattggagatgaaggccagcaagcccgggtggtggctcctgaacaccgaagtcggtgaaaatcagcgagccggaatgcaaacccccttcttgatcatggacagggactgtcgcatgcctatgggtctgagtaccggtatcatatcagatagtcaaatcaaagccagcgagttcttgggatactgggagcctagactggctaggctgaacaatggcggctcctacaatgcctggtccgtggagaagctggctgcagagtttgcgagcaaaccatggattcaagttgatatgcagaaggaagtgatcattaccggaatccagacccagggcgccaaacattaccttaaaagctgctataccacagagttctacgttgcgtatagctcaaaccagattaattggcagatcttcaaaggtaatagtactcgcaacgtaatgtactttaacggcaactccgatgccagcaccatcaaagagaatcagtttgatcccccaatcgtggctcggtatatcaggattagtcccacaagggcctataacagacctactctgcgccttgagctgcaagggtgcgaagtgaatggttgctctacccccctggggatggaaaacggaaagatcgagaataagcaaataaccgctagctcatttaagaagagctggtggggcgactactgggagccgttcagagcccggttgaatgcgcagggccgggttaatgcttggcaagcgaaggcgaacaataataaacaatggcttgaaatcgatcttctcaaaatcaagaagataacagcgatcattacccaaggatgtaaatctctgtccagcgaaatgtacgttaaaagctacacaatccactattccgaacagggtgtcgaatggaaaccttatcgactcaaaagttctatggtcgacaaaatctttgaaggcaacaccaacacaaagggtcatgtgaagaattttttcaacccgcctattatcagccgcttcattcgcgtcatccctaaaacttggaaccagtctatcgcgctgaggctcgagctgttcggttgcgacatctac

SEQ ID NO: 9043 - DNA, 6672 bp, synthetic construct
  misc_feature 1..6672: note = source = /note="Description of Artificial Sequence: Synthetic coding sequence"
  source 1..6672: mol_type = other DNA
atgttccccggatgcccacgcctgtgggtattggtagttctgggcacctcctgggtgggatggggttcccaaggaaccgaagccgcacagctccggcaattttacgtggctgcccagggaatttcctggtcataccgacccgagccgaccaactcatccttgaatttgtctgtgacttctttcaaaaaaattgtgtatagggagtatgaaccttactttaaaaaggagaagccccagagtacaatttccgggctcctgggaccaactctgtatgccgaggtgggagatatcattaaagtacatttcaaaaacaaggccgataaacctttgtccatccatccccaaggcatacgatacagtaagctttccgaaggggcctcatacctagatcatacctttcctgcggagaaaatggacgacgccgttgccccaggtcgagagtatacctacgagtggtccatttccgaggattcaggccctacacatgatgatcctccttgcctcacccatatctactactcccacgaaaatctcattgaggacttcaatagcggcctcatcggacctcttttgatttgtaagaaaggcactttgacggaggggggaactcagaagacttttgataagcagatcgtgctcctgttcgcagtcttcgacgaatctaaatcttggtcccagtcttcatcactcatgtataccgtgaatggatatgtcaacggtactatgcccgacattactgtgtgcgcgcatgaccacatctcatggcacttactaggcatgagctccggccctgagctattcagtatccactttaacggacaggtgctggaacagaaccaccataaggtctctgcaatcaccctggtgtccgcaactagcaccacagctaatatgacagtgggtcccgaaggaaaatggattattagcagtctgaccccgaaacatttgcaagcgggcatgcaggcctatatcgacatcaaaaactgtccaaaaaagactcggaatctcaagaagatcacgcgtgaacaaagaagacatatgaagaggtgggaatacttcatcgccgcggaggaagtgatatgggattatgcacctgtgatcccggccaacatggataagaagtacagaagtcagcatctggataatttttctaaccagataggtaaacattataagaaagtaatgtatacacaatacgaagacgaatcattcacaaagcacaccgtaaacccgaacatgaaagaggacggtatcctcggtcctatcatacgggcccaagtgagagatacattgaagatagtgttcaaaaacatggcctcaagaccatattcaatctacccacatggggtgactttttccccatatgaggacgaagtgaacagctcctttacgagtggaagaaataatactatgattcgcgctgtccaacctggtgaaacgtatacttacaagtggaacatcctggagttcgatgagccaacagagaacgacgctcaatgtctgaccaggccctattactctgacgtggacatcatgagagatattgccagtggcttaattggactgctcctgatttgcaagtctcggtccctggaccgaagggggattcagcgagctgcagatatcgaacaacaagccgtgtttgcggtgtttgatgagaacaaatcctggtacctagaggataacattaataagttctgtgagaacccagatgaggtgaaacgtgacgaccccaagttctatgagtctaatatcatgagcaccatcaatgggtacgtacctgagtccatcacaactctcggattctgtttcgacgacaccgtccaatggcatttctgctccgtggggactcagaacgagatcctcaccatacacttcaccgggcacagctttatttacgggaagcgccacgaggatacattgacactgtttccgatgagaggggaatccgttacggttactatggacaatgttggtacttggatgctgacctctatgaactccagtccacggagcaaaaaactacgactcaaattccgggatgttaagtgtatcccagacgatgacgaggatagctacgaaatcttcgaaccaccggaaagcacggtgatggctacaaggaaaatgcatgaccgcttggaacctgaagacgaggaatctgatgcagactatgattaccagaaccggctggcagccgccctgggtattagatctttccgtaattcttccctgaaccaagaggaagaagagttcaatctaaccgccttggccctggagaatggcactgagtttgtgtcctcgaacaccgatattattgtgggatcaaactattcttccccttccaatatttcaaaattcacagtgaataacctggctgaacctcagaaggccccttcacatcaacaggcaaccaccgcgggctccccgttaaggcacctcattggcaagaatagtgtgctgaacagttccaccgctgagcactcgtcaccctactctgaggatccgatcgaagatccactgcaaccagatgtcaccgggattaggctgctgagtctcggagcgggggaattcaagagtcaggagcacgccaagcataaaggaccaaaagtggagcgtgatcaagcagcgaaacacagattttcctggatgaagctgctggcacacaaggtgggccggcacctgagccaggatacgggctcaccgtccggaatgcgtccatgggaagacttaccttcccaggacaccggctcgccgagcagaatgcggccctggaaagacccacctagcgatttgctactgcttaaacagtcaaactcctccaaaattctcgtcggcaggtggcacttggcttccgaaaaggggagttacgagattatacaggatactgatgaggacacagctgtaaacaactggctcatcagccctcagaacgcctctcgcgcctggggggagagtacacccttggccaacaaaccaggcaagcagtccggtcacccgaagtttccccgggtcagacacaagagccttcaggtgaggcaggatgggggcaaaagcagactgaaaaagagccagtttctcattaagacccggaagaaaaagaaagagaagcacacgcaccatgcccccttgagtccacggaccttccaccctctgcggtcggaagcctacaacacgttttccgaaaggaggcttaaacactccctcgtgctgcataagtctaatgagacttctctgcccacagaccttaatcaaacgctcccatctatggattttgggtggattgcctcactacccgaccacaaccaaaatagcagtaacgacacgggacaggcttcctgcccgcctgggctctaccagacggtgcctcccgaggaacactatcagacttttccaatccaagatcctgaccaaatgcactctacatcggatccatcgcacaggtcaagcagccctgagctctcagaaatgttagagtatgataggagtcacaagagctttccaaccgacatctcacagatgagtccatcttcagaacatgaagtgtggcaaacggtcatctccccagatctaagccaggtcacattgagccccgagctgagtcaaactaacctgtcccctgatctttcccataccaccctcagcccagagctcattcagcgaaacttgtcccccgcgttgggccagatgcctatctctcccgatctgtctcacaccaccctatcccctgacctctcacatacaacactgagtctggatctaagccagaccaacctgtcccccgagctgtcccagaccaaccttagcccagcccttggccagatgccgttgagtccagacctcagccacacaacgttgtccctcgatttctcacagaccaacctgagccctgaactgtcacatatgacactgagccctgaactgtcccagacaaatctttctcccgccctggggcagatgcctatctccccagacctgagtcacacaacgctcagcttagacttcagccagacaaacctttctcctgagctttcccaaaccaatctctctccggcgctgggccagatgcccctttcaccggacccaagccacactaccctgtcgttggacctgtctcagaccaacctctcccctgagctctcccagacaaatctgtcacctgatctttctgagatgccgctgtttgccgacctgagccagattccactgaccccggatctggaccaaatgactttatcacctgacctaggcgaaactgacctgtctcctaactttgggcagatgtcactatcgcctgacctctcccaggtgacactctcgcctgacatctcagatactacactcttaccagacctatctcagataagtcctcccccagacctcgatcagatcttttaccctagcgagagtagtcagagtctgctccttcaagaatttaatgagagcttcccttatccggatcttgggcagatgccctctccctcctctcctaccctcaacgataccttccttagcaaggagttcaatccccttgtcattgtggggttgtccaaggatggcacagattatatagaaatcatcccgaaggaagaggtgcagagcagcgaggatgattacgccgaaatcgactacgtgccctatgatgacccctacaaaacagatgttcgtactaacattaactcaagcagggatccagacaatatagccgcctggtatcttcggtcaaacaatggtaacaggaggaactattacatagccgcagaagaaatctcctgggactatagtgagtttgttcagcgagaaacagacatcgaagattcagacgatattccggaggataccacctataaaaaggtagtgtttcgaaaatacctcgattccaccttcacaaagcgtgatccccgcggcgagtacgaagagcatctgggtatcttgggacccattattcgggccgaagtcgacgatgttatccaggttaggttcaagaatctggccagccggccatacagcttgcatgcccacggcttgagttacgaaaaatcaagtgaaggcaagacctacgaggacgacagccccgagtggttcaaagaagacaacgcggtacaacccaacagctcttacacttacgtgtggcacgccaccgaacggagtggccccgaaagccccggctcagcctgccgggcttgggcctattacagtgctgtgaatcccgagaaagatatccattcaggcctcattggtccccttctgatctgccaaaagggcatcctgcacaaggattccaacatgcccatggatatgagggaattcgtgttgctctttatgacatttgatgaaaaaaagagctggtactacgaaaaaaagagcagatccagctggagactaacatcatccgaaatgaagaagagccacgaatttcacgccattaacggtatgatttacagcctgccaggcctgaaaatgtacgagcaggaatgggtgaggctgcatctgttgaacattgggggctcccaggacatccacgtggtccactttcatggacagactttactcgaaaatggaaacaagcagcaccagctgggagtctggccccttttacccggttcattcaagacccttgagatgaaggcatcaaagccgggctggtggctgttgaataccgaggtgggtgagaatcagcgggctgggatgcagacgccgttcctgataatggatagggattgccgcatgcccatgggacttagcacaggcatcatatcagacagccaaataaaggctagcgagttcctgggctactgggaaccgcgcctcgctcggctcaataacggcgggtcctacaatgcatggagtgtggaaaagttggccgctgagtttgccagcaaaccatggattcaggtggatatgcagaaggaagtgattataaccggtatccagacacagggagctaagcattacttaaaaagctgttacaccacagaattttatgttgcctatagctccaaccagattaattggcagatcttcaagggtaactcaacccgaaacgtaatgtactttaatggcaacagcgatgcgagcactattaaggaaaaccagtttgacccaccaatcgtcgctcgttatatccgcatcagtccgaccagggcatacaacaggcctacacttcgcctagagctccaggggtgtgaagtcaacggttgtagtaccccactgggtatggagaacggaaaaatagagaataaacaaataactgccagcagtttcaagaagtcatggtggggcgactactgggagccatttagagcgaggctcaatgcccagggaagagtaaatgcctggcaggctaaggcgaataataacaaacaatggctggagattgacctcctcaagatcaaaaaaattaccgccattattactcagggctgtaagtccctgtcatctgagatgtacgtgaaaagctacacaattcactactctgaacagggagtggagtggaaaccgtaccggcttaagtcctctatggttgacaaaatttttgagggaaatacgaataccaaagggcatgtcaagaactttttcaaccccccaatcattagcagatttatcagagtgatacctaagacttggaatcaatctatcgccttgaggctcgaactattcggctgcgatatttat

SEQ ID NO: 9044 - DNA, 6672 bp, synthetic construct
  misc_feature 1..6672: note = source = /note="Description of Artificial Sequence: Synthetic coding sequence"
  source 1..6672: mol_type = other DNA
atgtttcctggatgccccaggttgtgggtgctcgtcgtccttgggacctcttgggtgggttgggggagccagggtaccgaagccgcacagcttcgacagttctacgtggcggcgcagggtatctcgtggagctacagaccggagccgactaactcatcgctgaacctctcagtcactagcttcaagaaaatcgtctatagagaatacgaaccctactttaagaaagaaaaaccgcagtcgaccatctctggcctgcttggaccgaccctgtacgccgaggtgggagatatcattaaggtgcactttaagaacaaagcagacaaaccgttgtcgatccacccgcagggaattcgctactcaaagctgtcggagggagcctcgtacctggaccataccttccctgccgagaagatggacgatgcggtagcgccaggacgcgaatacacgtacgaatggtcgatttccgaggattctgggccaacccatgatgatcctccctgcctcactcacatctactactcacacgagaatcttattgaggacttcaactcgggacttatcgggcctctcctgatatgtaagaagggtactctcaccgagggaggcacccagaaaaccttcgacaaacaaattgtcctgctgttcgcagtatttgacgaaagcaagagctggagccagagctcgtcactgatgtataccgtgaatggatacgtcaatggcactatgccggatattaccgtctgcgcgcacgaccatatctcctggcatcttctcggaatgtcctcgggacctgaactcttctcaatccacttcaatggccaagtcctggaacaaaatcaccacaaagtcagcgcaatcactctggtatccgccacttccaccaccgccaacatgactgtgggaccggaaggcaagtggatcatctcctcgctcactcctaagcacctccaggcgggcatgcaggcgtacattgacatcaaaaactgccctaagaaaactcgaaacctgaagaaaatcacccgcgagcaacggagacatatgaaaagatgggaatacttcattgccgctgaagaagtcatttgggattacgccccggttattcccgcaaatatggataagaaataccggtcccagcacctggacaacttttcgaaccaaatcggaaaacattacaagaaggtcatgtacacccagtacgaggacgagagcttcaccaagcatactgtcaatccaaatatgaaggaggacgggattctgggaccaatcatcagagctcaagtgagggacaccctgaaaatcgttttcaagaacatggcttcgcgcccttactcaatctaccctcacggagtgaccttctcgccgtacgaggatgaagtcaactcatcattcacttccggcagaaacaatactatgatcagggccgtgcagccaggggagacttacacttacaagtggaatattctggagttcgacgaacccaccgaaaacgacgcccagtgcctgaccaggccgtactactctgacgtggacatcatgcgggatatcgcctccgggctgatcggcttgctgttgatctgcaaatcgcggagcctggaccgccgcgggatccaacgcgccgctgacatagaacaacaagccgtgttcgctgtgtttgatgagaacaagagctggtacctggaggataacatcaataagttctgcgagaatccagacgaggtgaagcgggacgatccgaagttttacgaatcaaacatcatgagtaccatcaacggctacgtgccagagtccattaccactctcggtttttgttttgacgataccgtgcaatggcacttctgcagcgtgggaacgcagaacgagatccttacgatccactttacgggacactcatttatctatggtaagagacacgaggacactctgaccctgttcccgatgcggggagagagcgtgaccgtcacgatggacaatgtcggaacctggatgctcaccagcatgaatagctcgcctcggtccaagaaactgaggctgaaattccgggatgtgaaatgcatcccggacgatgacgaggactcctatgagatattcgagccgccggagtccactgtcatggcgacccgcaagatgcatgataggttggaaccggaggacgaagagagcgatgccgactacgactaccagaaccgcctggcagcggcactgggcattcgtagcttccggaattcatctctgaatcaagaggaagaagaattcaacctcactgcattggcccttgagaacgggactgaattcgtcagcagcaatactgacatcatcgtgggttcaaactactcatctccgtctaatatcagcaagttcaccgtgaacaacctcgcggagccacaaaaggcaccgtcccaccagcaggccaccactgcggggtcacccctccgacatctcatcggcaagaactcggtgctgaacagctcgaccgcagagcattcgtccccatactcggaggatcctattgaggatccgctccagccagacgtgaccggcatccgcctgctttccctgggcgctggagaattcaaaagccaggagcacgcaaagcataaaggacctaaggtggaacgggatcaggccgcaaaacaccggttctcgtggatgaagctgctggctcacaaagtgggcagacatctcagccaggataccggaagcccctcgggaatgcggccgtgggaagatctgccatcgcaggacactggctccccgagcagaatgcgtccgtggaaggatccaccatccgatctgctcctgttgaaacaatcgaatagttcaaaaatcctggtcggtcgctggcacctggcatcagagaagggctcatatgagatcatccaagataccgatgaagatacggctgtgaacaactggctgatctcaccgcaaaatgcttcgcgcgcatggggtgaatcgactccgctcgctaacaagccgggaaaacagtctggacacccgaagttcccacgcgtgagacataagtctctgcaggtgaggcaagacggtggaaagtcgaggctgaagaaatctcaatttctgatcaagaccagaaagaaaaagaaggagaaacatactcatcatgccccgctgtcgccacggacctttcacccactgaggtcagaagcatacaacaccttctcggaacggaggctcaagcattccttggtgctgcacaagtcgaacgaaacgtcacttccgaccgacctcaaccagaccctgccctcaatggattttggatggatcgcgtccttgccggaccacaaccagaattcgtccaacgataccggacaagcctcgtgcccgccaggactgtatcagacggtgcctcctgaagaacactaccagaccttccccatccaggaccccgaccagatgcactcgacctccgaccccagccatcgctcgtcctcgccggaactgtcggaaatgctcgaatacgatcggagtcacaagtccttcccgactgacatctcccagatgagcccttcctcagaacatgaggtgtggcagacggtgatctcgcctgatctgtcccaggtcaccctgtccccggagctctcccagaccaatcttagccccgacctttcccacactactctttctccggaactcatccagcgaaacctgagtccggctcttggtcaaatgccgatctcaccagatctgagccatactactctgtcgccagatttgtcccataccactctgtccctggacctgtcgcaaacgaacctttcgccagagttgagccagactaatctgtcgccagctctgggacagatgcctctgtccccggacctgagccacacgacgctctcgctcgatttcagccagactaacctttcccctgaattgtcgcacatgactctctcaccagaactcagtcagactaacttgagtcccgcgttgggccaaatgcctatcagccctgacctgagtcatacgaccctgagcctggactttagtcagacgaacctgtcccctgaactctcgcagacgaacttgtcgccggcactgggacaaatgccactgtctccggacccatcgcacaccaccctgagcctcgacctgtcgcagacgaatctttccccagaattgtcacagactaacctgtcgcctgacctgagcgaaatgccgctgtttgcggacctcagccagatcccgctcactcccgacctggatcaaatgaccctgtcccccgacctcggggaaactgatctgtcgccaaacttcgggcagatgtccctgtcaccggatctcagccaagtgacgctgtccccagatatcagcgacactactctgctccccgacctgtcacagatctccccgccgccggatttggaccaaatcttttacccgtcggagtcgagccagtctttgctgctgcaggaattcaatgaatccttcccataccctgacctcgggcagatgccgtccccttcctcccccactctgaacgacacttttctctccaaggagttcaacccattggtcatcgtgggactctcaaaggatggaaccgactacatcgaaatcatcccgaaagaagaagtgcaatcgtccgaagatgactacgctgaaatcgactatgttccgtacgacgacccatacaaaaccgacgttcgcactaatatcaactccagccgggatccggacaacatcgccgcgtggtacctgcggtccaacaacggcaacagacgaaactactacatcgccgcggaggaaatctcttgggactactccgagttcgtgcagcgcgagacggacatcgaggactcagatgacatccctgaagatactacctacaagaaggtggtgttcagaaagtacctggattcaactttcaccaagagggaccctcgcggagagtatgaggaacaccttggaatcctgggtcccatcatccgcgcagaggtggacgatgtgatccaagttcggttcaagaacctcgcctcccgcccatactccctgcatgcacacggattgagttacgaaaaatcctcagaaggaaagacctacgaagatgattccccggagtggtttaaggaggacaatgctgtccaacctaactcatcatacacctacgtgtggcatgcaaccgaaagatcaggtccggaatcgccgggctccgcgtgtcgcgcctgggcctactactccgccgtcaaccctgaaaaggacatccactcagggctgatcgggccgctcctcatatgccagaagggaatcctgcataaagattcgaacatgccaatggacatgcgcgagtttgtgctcctcttcatgactttcgatgaaaagaagtcctggtactacgagaagaagagccgctcgtcttggcgcctgacctcgtcggagatgaagaaatcgcacgaattccacgccatcaatggaatgatttacagcctgccaggactcaagatgtacgaacaggaatgggtccgcttgcacttgctgaatatcggaggaagccaggacatccacgtcgttcatttccacggacagactctgcttgaaaacggcaataagcaacatcaactcggagtgtggcccctgttgccgggttcattcaaaactctggagatgaaggcttcaaagccgggctggtggctgctgaacaccgaagtcggagagaaccagagggctggcatgcaaaccccgtttctgattatggatcgggattgtcggatgcctatgggactctccactgggatcattagcgactcccagatcaaggcttcagagttccttggatactgggaacctcgccttgcccggctgaacaacggtggatcatacaacgcatggtctgtcgagaagttggccgcagaattcgcttcgaagccgtggattcaagtggacatgcagaaagaagtgatcatcaccggaatccagactcagggcgcgaaacactacttgaagagctgctacaccactgaattctatgtggcgtattcatccaaccaaatcaattggcaaatcttcaaaggaaacagcactcgcaacgtgatgtacttcaatggcaattccgacgccagcaccatcaaggaaaatcaatttgacccgccaatcgtggccaggtacatccgcataagtccaacccgggcgtacaatagaccaactctgcgcctggaactccagggatgtgaggttaatggttgctcaacccctctcggaatggagaacggcaaaatcgagaacaagcagattactgctagctccttcaagaagtcgtggtggggcgactactgggagccattccgcgcgcggctcaacgcccaaggaagagtgaatgcttggcaagcaaaggccaataacaacaagcagtggctggaaatcgaccttcttaagatcaaaaagatcactgcgatcattacccagggctgcaagtcgctgtcctctgaaatgtacgtgaagagctacactatccactacagtgaacaaggggtggaatggaagccataccggctcaagtcaagcatggtggataagatcttcgagggtaataccaataccaagggacatgtgaagaacttcttcaacccaccgatcatatcgcggtttattcgcgtgattccaaaaacgtggaatcagagcatcgccctccggctcgaactcttcggttgtgacatttac

SEQ ID NO: 9045 - DNA, 6672 bp, synthetic construct
  misc_feature 1..6672: note = source = /note="Description of Artificial Sequence: Synthetic coding sequence"
  source 1..6672: mol_type = other DNA
atgtttccgggatgtcctcggctttgggtgctggttgtgcttggaacctcatgggtcggctgggggtcccagggtactgaagcagcccagctcagacaattctacgtggcggcacaaggtatatcgtggtcgtaccgccctgaaccgaccaattcctcgcttaatctctcagtgacgagctttaagaaaattgtgtaccgagagtacgagccatactttaagaaagagaagccgcaatccactatttccgggctgcttggtccaactctttacgccgaagtgggagatatcattaaagtccactttaagaataaggctgacaagccactttccatacatcctcaaggtattcgttactcaaagctgtccgaaggggcgtcgtacctcgatcatacttttcctgccgaaaagatggacgatgcagtggctccaggtcgagagtacacctacgaatggtccattagcgaggactcgggacctacccatgatgacccaccttgcctcacccatatctattactcgcacgagaacctcatcgaggacttcaattccggactgatcggaccgcttctcatttgtaagaaaggcaccctgacggagggtggaacccaaaaaactttcgataagcagatcgtccttctttttgccgtctttgatgaatccaagtcatggtcccaatcgagctcccttatgtacactgtgaacggctacgtgaacggaactatgccggatatcactgtgtgtgctcacgatcacattagctggcacctcctgggcatgtcatcgggccctgaactgttttccattcactttaatggtcaggtgctcgaacaaaatcaccataaggtgtcggcaattacgctggtcagcgcaacctcaacgacggccaatatgactgtgggtccagaaggaaaatggattatctcgtcactgacccccaagcatctgcaagcgggcatgcaagcctatattgacattaagaattgtcctaagaaaactaggaatctgaagaaaatcaccagagaacaacggcgacacatgaagagatgggaatacttcattgccgccgaggaagtgatttgggattacgcacccgtgattccagcaaacatggataagaagtaccgcagccaacatctggacaacttctcaaaccagatcggtaagcattacaaaaaggtgatgtacactcagtacgaggacgagtcatttaccaagcacaccgtgaacccgaacatgaaggaggacgggatcctcggacctatcatccgcgcacaagtgagggacaccctgaagattgtgtttaagaacatggccagcagaccatatagcatatatccacatggagttaccttttccccttacgaagatgaggtcaattcatcatttacttccgggaggaacaataccatgataagagcggtgcaacctggtgaaacttacacttacaagtggaacattctggaatttgacgaaccaactgaaaatgatgcccaatgtctcactaggccatattactccgacgtcgacataatgcgcgacatcgcatcaggcctcattggacttttgctcatctgtaaatcgcgttccctggaccgaagagggattcagagagcagcagatatcgagcaacaagccgtctttgcagtctttgatgagaataagtcatggtacctggaagataacattaacaagttttgtgaaaaccctgacgaggtcaaacgtgatgatccaaagttttacgagagcaacattatgtccaccatcaacggatacgtgccagaatcgatcaccaccctggggttttgtttcgacgacacggtgcagtggcatttttgctcagtgggaacccaaaatgaaattcttactattcattttaccggacactcgtttatctatggaaagcgccatgaggacactcttacgcttttcccaatgcggggagaatccgtgaccgtcacgatggataacgtcggaacttggatgctgacttctatgaactcatcgcctcggtcgaagaaactgagactgaagtttcgggatgtgaagtgtattcccgatgacgatgaagatagctacgaaatcttcgaacctcctgaatcgactgtcatggcaactcgaaaaatgcacgaccgtctggagccagaggacgaagaatccgacgccgattacgattaccagaatcgactcgcagctgcacttggcatcagatcctttcggaactcatcgcttaatcaagaagaagaggagttcaatctgacggcactggcgcttgagaatggaaccgaattcgtgtcctcaaataccgacattattgtgggaagcaattactcttccccgagcaacataagcaagtttaccgtgaacaatcttgccgaacctcaaaaagctccatcgcatcagcaagcgactacggcaggttctcctttgcggcatcttatcggcaagaattcggtgctgaacagcagcaccgcagaacacagcagcccgtactcggaggatcctatcgaggaccccttgcagcctgatgtgactggaattagactgctgtcactcggagcaggcgaattcaagtcccaggaacatgctaaacataaaggccctaaggtcgaaagagatcaggcggcgaaacatcggttctcttggatgaagctgcttgcccataaggtgggccgccatttgtcccaagacactggatcgccctcgggaatgcgtccatgggaggacctgccttcgcaagataccggatccccctcgagaatgcgtccttggaaagatcccccttcggatcttcttctgcttaaacagtccaactcctcgaagatcctcgtcggacggtggcatctggcgtccgagaagggatcttatgaaatcatacaagataccgatgaggatactgcagtgaacaactggctcatttcgccacagaacgcatcgcgagcatggggtgaatcgacgcctttggccaacaaacctggaaaacaatccggtcatcctaagtttccgagagtccggcataagtcgttgcaggtgagacaggacggtggcaagtcgaggcttaagaagtcccagtttctgataaagactcgaaaaaagaaaaaggaaaaacatactcatcacgcaccacttagcccacgaaccttccatccactgaggtccgaagcgtacaacactttttccgagagacggcttaagcactcgcttgtgcttcataagagcaatgaaacttcacttcctaccgatctgaaccaaactctcccatctatggattttggttggatcgcctcgttgcccgatcataaccaaaactccagcaacgatacgggtcaggcatcgtgtccaccaggactttaccaaactgtgccccctgaagaacattaccagactttccctatacaagatcctgaccagatgcacagcacctcggacccaagccataggtcatctagccctgagctgtccgaaatgctcgaatacgacagatcccataagtcattcccaaccgacatatctcaaatgtcgccttcgtcggaacatgaagtttggcaaactgtgatctcccctgacctgtcgcaagtgactctttcgccagaactctcacagactaacctttcccctgatctgtctcatactacgctgtcacctgagcttatccaaagaaacttgagtccagctcttggccagatgcccatttccccggacctttcccacaccacgctttcaccggatctctcgcacaccactctttcgctcgatctttcccagactaatctctcacccgaattgtcacagacgaatctgtcgcccgcacttggtcagatgcctctgtcgccggatctttcgcatactactctctcactcgattttagccaaaccaacttgtcgcccgagctgtcgcatatgaccctttcaccggagctttcgcagaccaacctgtctcctgcgctgggtcaaatgcccatctcaccggatttgtcccacactactctgtccctggatttctcacaaacgaacctttccccagagctttcgcaaaccaatctttcgccagcacttggtcaaatgcctctgtccccggatccctcgcataccactctgagccttgatctgtcgcagacgaacttgagccctgagttgtcccagacgaatcttagtcccgatctttcagagatgcctctcttcgcagatttgtcccagattcccctgactccagatctcgatcagatgaccctcagccccgatttgggtgaaactgatctctcccctaactttggccagatgtcactctcacctgatctgtcacaggtgactctgtcccccgatatttcggacactactcttctgccagaccttagtcaaatttcgccgcctccagaccttgaccagatcttctaccccagcgagtcatcccaatcgctcctgctccaggaattcaacgagtcgtttccttacccagacctggggcagatgccaagcccatcgtctcccacgctcaacgacactttcctgtccaaagaattcaaccctctggtgatagtgggtctttcgaaggatggtactgattacatcgagattatccccaaggaagaagttcagagttccgaggatgattacgcggagattgattacgtgccttacgatgatccctataagaccgacgtgaggaccaatatcaattcgtcacgtgatccagacaacatagcggcctggtaccttcgcagcaataacggtaaccgtagaaactactacatagccgcggaagaaatctcatgggactactcggagtttgtccagcgggaaactgacatcgaggactcggacgatattccagaagataccacttacaagaaggtggtgtttcgcaaatacctcgattctacctttactaagagagatccccgcggagaatacgaggaacaccttggcattctgggtcccattatcagagcggaagtggatgatgtgattcaggtcagatttaagaacctggcaagcagaccttactctctgcacgcgcatggcctgtcctacgaaaaatcttccgaagggaaaacctacgaagatgacagcccggaatggttcaaggaagataatgcagtccagccgaacagctcatatacctatgtctggcacgccaccgagcggtccggacccgaatcccctgggtccgcctgtagggcatgggcctactactcggcggtcaatcccgaaaaggacatccacagcggtcttattggacctctgctgatttgtcagaagggaattcttcataaggacagcaacatgccaatggatatgcgcgaattcgtcctgctgtttatgaccttcgacgagaaaaagtcgtggtactacgagaagaagtccagaagctcatggaggctcacttcgtccgaaatgaagaaaagccacgaatttcatgccattaacgggatgatctactcgcttccagggctgaaaatgtatgaacaggaatgggtgcggctccatcttctgaacatcggcggatcgcaggatattcatgtcgtccactttcatgggcagaccctcttggaaaacggtaacaagcagcatcagcttggggtgtggcctctgcttcctggtagcttcaaaaccctggagatgaaggcatcgaagccaggctggtggctcctgaacaccgaggtgggcgagaaccaacgcgcaggtatgcaaaccccattccttatcatggatagagactgtaggatgccgatgggactctccaccgggattatcagtgattcccagatcaaagcatcggaattcctcggatactgggaaccccggctggcaagattgaacaatggaggatcatacaacgcctggagcgtggaaaagctcgctgcagaattcgcttcaaagccatggatccaagtggatatgcaaaaggaggtgatcataaccggtattcaaactcagggagctaagcattacctcaagtcgtgttacaccacggaattctatgtggcgtactcgtcgaaccagattaactggcagatctttaaagggaattccactcgaaacgtgatgtactttaacggtaattccgatgcctccactatcaaggaaaatcaatttgatcctccaatcgtggcaaggtacattcgcatctcgccaacgagggcatataacagacctactctgcgcctggaactgcaaggatgtgaagtcaacggttgttcgacgccactcgggatggaaaatgggaagatagaaaacaagcaaattacggcgtccagcttcaagaagtcatggtggggagattattgggaaccctttcgcgcccggcttaatgcgcagggtagagtcaatgcatggcaggcgaaggcgaacaacaataagcaatggctcgaaatcgatcttctgaaaatcaaaaagataaccgcaattatcactcagggttgcaagtcgctgtcctcagagatgtacgtgaagtcatacactatccactactcagaacagggcgtggaatggaaaccataccgcctgaagagctccatggtcgacaagatttttgaaggaaacaccaacaccaaggggcacgtgaagaactttttcaatccccccattatctcgcgctttattcgggtgatccctaaaacctggaatcaatctatcgcgttgcgtcttgaactcttcggatgtgatatctac

SEQ ID NO: 9046 - DNA, 6672 bp, synthetic construct
  misc_feature 1..6672: note = source = /note="Description of Artificial Sequence: Synthetic coding sequence"
  source 1..6672: mol_type = other DNA
atgtttccaggatgcccacggctgtgggtgctggtggtgctcggaactagctgggtgggttggggctctcaaggcaccgaggccgcccaactgcgccagttttacgttgccgcgcagggcatctcctggagctatcgcccagaaccaaccaattcttcacttaacttgtcagtgacatcttttaagaaaatcgtctatagggagtacgaaccttacttcaaaaaagagaaacctcagtccacaattagtggcctgctcggacccactttgtatgctgaagtgggcgatatcatcaaggtgcattttaaaaataaggccgacaagcctctctcaattcacccccaggggatccggtacagtaagctgtctgagggcgccagctatctggatcacactttcccagccgaaaagatggacgacgctgtggcgcccgggcgggagtatacctatgaatggtctatcagcgaggatagcggccccactcatgatgatcctccctgcctaacacacatttactactcccatgagaatctcatagaagacttcaactccggactgatcgggccccttttgatttgtaagaagggtacactaacagaaggggggactcagaagacttttgataaacaaatagtgttgctgtttgcagtcttcgacgagagtaaatcatggtcccagtcttctagcttgatgtacacggttaacggctacgtgaacggcaccatgcccgatataacagtctgtgctcatgatcatattagctggcatctgttaggaatgtcaagtggaccagagttgttctctattcacttcaacggccaagtgttggagcagaaccaccacaaggtatctgccatcacccttgtctccgctactagcactaccgccaatatgactgttgggcccgaaggcaagtggatcatatcttcgttgacaccaaagcatctacaggcgggcatgcaggcgtatatagacataaagaattgccccaaaaagaccaggaatttgaagaagattactcgggaacagcggcgtcacatgaagcgttgggagtatttcattgccgccgaggaggtcatctgggattatgctcccgtcatcccagccaatatggacaaaaagtaccggtcccaacatctggacaatttcagcaaccagattggtaagcattataagaaggtgatgtacacacagtatgaggacgagagtttcacgaagcacaccgttaacccaaacatgaaggaagacgggatactggggccaatcatcagggcccaggtcagagacacgctgaaaatagtttttaaaaacatggccagcagaccctactcaatttacccccatggcgtgacttttagtccatatgaggacgaggtaaactcctctttcacatccgggcgtaataacacaatgattcgcgcagtgcagccaggagaaacctacacatataaatggaatatcctggaatttgacgaaccaacagagaacgatgctcagtgtctcacgcgcccttattacagcgatgtggatataatgcgagacatcgcaagcggtctgatcggacttttgcttatatgtaagtcgcgttcacttgatcgacgcggaattcagcgagccgctgacatcgagcagcaggcggtcttcgcagtgttcgatgagaacaagagctggtatctggaggacaatatcaataaattttgcgaaaaccccgatgaagtcaaacgggacgaccctaaattttatgaatcaaacattatgtcaaccatcaacggttatgtgccagaaagcatcacaacactgggattttgtttcgatgatacagtccaatggcacttttgttccgtgggtacacaaaacgaaatcctgactattcacttcaccgggcactctttcatctacggtaagagacatgaagatacccttactttgtttcctatgcggggagaatcggtcacggtgacgatggataatgtcggcacttggatgcttaccagtatgaatagttctccacggagtaagaagttaaggctaaaattcagggatgtaaagtgtatccctgatgacgacgaggactcatacgagatttttgaacctccagagtcgaccgtgatggctactagaaaaatgcacgatcgcttagagccagaggacgaggagtcagacgccgattatgactatcaaaatagacttgccgccgctcttggcattcgatcattccgcaattcaagtctcaatcaggaggaagaagagtttaatttaaccgcgttagcactagagaatggcacagagtttgtttcctccaacacagacataatcgtagggagcaattattcatcaccctctaatattagtaagtttacggtgaataatcttgctgagcctcagaaagcacccagtcaccaacaggctaccactgctggctccccccttcggcatctgatcggtaagaacagcgtgttgaatagcagcaccgctgaacactcttcgccctattctgaggaccccatcgaggacccattgcagcccgatgtaacaggcattcgtctgctgagtctgggtgcgggcgaatttaaaagccaggagcacgctaaacacaaaggtcctaaagtggagcgggaccaagcggccaaacaccgcttcagttggatgaaattgctggctcacaaagtgggacgccacctgtcacaggacacagggtcaccaagtgggatgcggccatgggaagatctccctagccaggataccggttcaccaagccgcatgagaccgtggaaggatcccccatctgaccttctcttgctgaagcagtctaactcctccaaaatcttagtgggaaggtggcacctggctagtgaaaagggaagttacgaaatcatccaggatacagatgaggacaccgccgtgaacaattggctgatttctcctcagaatgccagccgtgcctggggtgagtctacaccactggcaaacaagcccggaaagcagtccgggcaccctaaattcccccgagtacggcacaagtcactgcaagtgcgccaggacgggggtaaatctcgtctgaaaaagtcccagttcctaatcaaaacgaggaagaagaaaaaggaaaaacacacccaccacgcaccgttgtccccgagaacattccatcccttgagatccgaagcctataataccttctctgagcggcggctgaagcactcgctggtccttcataagtctaacgagacatcgctgcccacggatctgaaccagacattgccttctatggattttggttggattgcgtccctccctgatcataaccagaattcatctaacgatactgggcaggcttcttgtccccccggcctgtaccagactgttcctcccgaggagcactatcaaacattccctatacaggaccctgatcagatgcactccacctccgacccttcacatagaagttcgagcccggaactgtctgagatgttagaatacgatcggtctcataaatcattcccgacagacatttcccagatgagcccctcttctgaacacgaggtctggcaaacagtaatttcgccggacctttcacaggtgacactctcccccgagcttagccaaactaatctttctcctgacctgtctcataccaccctctcacccgagcttatccagagaaacctgagccccgccctcggtcagatgcccatctcccccgacctgtctcacacaacactttcacctgacctgtcccatacaaccttatccctggatttatcacaaacgaacctgagcccggaactatctcaaactaaccttagccccgccctcggccagatgccactgtcccctgatctcagtcatacgacgctttcccttgactttagtcagaccaatttgagccctgaattgtcacatatgaccctttctccggagttgagtcagaccaacctgtcccccgctctggggcagatgcctatatctcctgacctgagccacacaacactttctctcgatttttcccagaccaacctcagcccggaactgtcgcaaacgaatctctctcctgccctcgggcagatgcccctgtccccggatccaagccacaccaccctctcgttagatctcagccagactaatttatccccagagctgtctcaaacaaatctttcccctgacctgtctgaaatgccactgttcgctgatctgtctcagataccactgacccccgacctcgatcagatgacactcagccccgatctgggtgaaacggacttgtcccctaactttggccagatgtccctctccccagatctgtctcaggtcacattgtctcccgacatcagcgacaccaccttgctgcctgacctttcacagatctctcctcctccagacctggaccaaatattttacccatcggaaagctcgcagagcctgctcttgcaggagttcaatgaaagtttcccctatccagacttagggcagatgccctccccatcttcacccacattgaacgacacctttctgtcaaaagagttcaatccccttgtgatagtcggactgagtaaggacggaacagactatattgaaatcattccaaaagaggaagtgcagagtagcgaggacgattacgcagaaatcgactatgtcccctatgacgacccttataaaacggacgtgcgcacaaatattaattcaagccgagacccggacaatatcgcagcatggtatctgaggagtaataatggcaacagaaggaactattacattgcggcagaggaaatctcatgggattactcggaattcgtgcagagggagactgacattgaggactccgatgatattcctgaagataccacttataagaaggtagtgttcagaaaatacctggattcaacctttactaagcgggaccctcggggagagtatgaggaacacctagggatcctggggccaattatccgggcagaggtggatgacgttattcaggtcaggttcaagaatctggcctcacgaccctattctttacacgcacacggcctgtcatacgaaaagtcctccgaggggaagacctacgaagacgacagcccagagtggttcaaggaggacaatgctgtccagcctaactccagctacacatacgtgtggcatgccaccgagcgcagtgggcctgagagccctgggtcagcgtgtcgtgcctgggcctactactccgcggttaacccagagaaagacatacactctggcttaattgggccgctactgatttgtcagaaagggattctccacaaagacagcaacatgcctatggatatgagggaattcgttctcctctttatgacatttgatgaaaagaaatcatggtattatgaaaagaagagtcgatcatcttggcgactaacctcttccgagatgaaaaagtcacatgagtttcatgcgattaacggaatgatctatagtctgcctgggctgaagatgtacgagcaggaatgggtaagactgcacctcctgaatataggcgggtcgcaagacatccacgtggtccactttcatgggcagactctcctagaaaacggcaacaagcagcatcagctaggcgtatggccgctcctccccggctcttttaaaactttagaaatgaaggcgtccaagcccgggtggtggctgctgaacactgaagtaggggaaaatcagagggcggggatgcagactccgtttctcattatggatcgcgactgccgaatgccaatgggtttgagcactgggattataagtgattcacagatcaaggctagcgagttcctgggctactgggagccgcgtctggccagattaaataacggaggctcttacaacgcctggagtgtcgagaagctggccgcggagtttgctagcaagccatggatccaggttgatatgcagaaggaagttatcatcaccgggatccagacccaaggggcaaaacattatctcaaatcatgctatacgactgagttctatgtggcttatagcagcaaccagataaactggcagatctttaagggaaactctaccagaaacgtcatgtacttcaacggcaattctgatgcaagcacaattaaggagaaccagtttgacccaccgatcgtcgctaggtacattagaataagccctaccagagcctataatcgccctaccctccggttggaactccaggggtgtgaggtcaacggttgctccaccccattgggcatggagaatggaaagatcgaaaataaacaaatcacagcgtcaagttttaagaaatcctggtggggggattactgggagccatttagggctcgtttgaatgcccaagggagggtgaacgcgtggcaggctaaagctaacaacaacaagcaatggttagagatcgacctcttaaaaattaagaagatcaccgcaatcatcacgcagggttgtaaatccctctctagtgaaatgtatgtcaagagttacacaatccattattcagagcagggcgtggagtggaagccttaccggctcaaatcttcaatggtggataagatcttcgagggcaacacaaacacgaaagggcatgtgaaaaatttctttaatcccccaatcatatctaggtttatccgcgtgattcctaagacatggaatcagtccattgcattgcgccttgagctctttggatgtgatatctac

SEQ ID NO: 9047 - DNA, 6672 bp, synthetic construct
  misc_feature 1..6672: note = source = /note="Description of Artificial Sequence: Synthetic coding sequence"
  source 1..6672: mol_type = other DNA
atgtttcccggctgtccccgattgtgggtgttagtagtcctgggcacatcctgggttgggtggggatcccagggaaccgaagctgcccagctgcgtcagttctatgtcgccgcccagggcatctcatggtcctatcgcccggaaccaactaattcgtctctgaacctttccgtgaccagctttaaaaaaatcgtttacagggagtacgaaccctactttaaaaaggagaaacctcagtctacgatcagtgggttactcgggccaactctctacgctgaagtcggcgacattataaaggtgcactttaagaataaggctgataaaccgctgtctatacatccacagggaatacggtatagcaaactgagcgaaggtgcgagttatctcgaccacacgtttcctgctgagaaaatggacgatgccgttgcccccggtcgagaatatacatacgaatggtcaatttctgaggattctggcccaactcatgacgaccccccatgcctgacgcacatatattactctcacgagaacctcattgaggactttaattctggcctgattgggcctctgcttatctgtaaaaagggaaccctcactgaggggggtacacagaagacatttgacaaacaaattgtgctgcttttcgcggtgtttgacgagtccaagtcttggagtcagagcagcagtctcatgtatacagtcaacggatatgtgaacggaacaatgcctgacatcacagtatgcgcccatgaccacatcagttggcacctattgggaatgtctagcggcccggaattgttttcgatccactttaacggccaggtcctggagcagaaccaccataaggtgagcgccatcacactagtgagtgccacatctacaaccgcaaacatgactgttgggcccgaaggcaagtggatcatctcctccctcactcccaaacacctgcaggcaggcatgcaagcgtatatagatataaagaattgtccaaaaaagacgcgtaatctgaaaaagattacccgcgaacagagacggcatatgaaacgctgggaatattttatcgctgcagaagaggtcatctgggattacgcccccgtgattccggcaaacatggacaagaagtaccggtctcaacacctggacaacttctcaaaccagatcggtaaacattacaagaaggtgatgtatacacagtacgaggacgaaagttttacaaagcacaccgtgaatcctaatatgaaggaagacgggatacttggacccatcatcagggcacaggttcgtgatacattgaagatcgtgtttaagaacatggcctcccggccatactccatctacccacacggggttacttttagcccgtacgaggatgaggtgaactcctcttttacttctggtcggaataataccatgattcgggccgtccagccgggggagacttacacctacaagtggaacattctggaattcgacgagcccacggaaaacgatgcgcagtgccttacgaggccatactactcggatgtcgacatcatgcgggatatcgcttccggtctgattggcctgttgcttatctgcaaatcccggtcactggaccgccggggcattcagagggccgctgatattgagcaacaggccgtctttgctgtgttcgatgaaaacaagagctggtacttggaggataatatcaataagttctgtgaaaatcccgatgaggttaaacgtgacgatcctaaattttatgaatctaacatcatgtcgacgataaatggttacgtccccgaatctataactactcttggcttctgcttcgatgacaccgtgcaatggcacttttgctctgttggcacccagaatgagattctgactattcatttcacagggcactccttcatttacggcaaaaggcacgaagacactcttactctattccccatgaggggcgaatccgtgaccgtgactatggataatgtggggacatggatgttgacatcgatgaacagctcacctcgtagcaaaaaactccgccttaagtttcgcgatgtcaaatgcatccccgacgacgatgaggatagttatgagatctttgagccacccgaatcaacagtcatggccacgcgaaaaatgcacgaccgactcgagcctgaggacgaggaaagtgatgccgactatgactaccagaataggctcgccgcagccctaggcattaggagcttcaggaactcctctcttaaccaggaggaggaggagttcaatctgaccgcattagctttggagaacgggacagaatttgtgagcagtaacaccgacattatcgtgggcagtaactacagtagcccctccaatatctcaaagttcacagtgaataacctcgccgagccccagaaagctccttcccaccaacaagccacaaccgcaggatccccacttcgccacctgatcggcaagaacagcgtactgaacagctccacggctgaacacagctccccttacagtgaggaccccattgaagaccccctccagcccgacgtcaccggcatcagactgctgtccttaggcgccggggaattcaaaagccaagagcacgcgaaacataaaggccccaaagtagagagagaccaggccgcgaaacatcgcttctcctggatgaagctgcttgctcataaggtcggacggcacctctcacaggatactgggtccccctcaggtatgaggccctgggaggacctcccttctcaggacaccggttccccttcgaggatgaggccttggaaagatcccccctcagatcttcttttattaaaacaatctaacagcagcaagatcctggtaggacgctggcatctagccagtgagaagggaagttatgagatcatacaggacacagacgaggacactgccgttaacaattggctaatcagcccccaaaatgcttcacgggcgtggggtgaaagtacccccttagctaacaagcccggcaagcagagtgggcatccgaagtttccaagagtgaggcataagagtctgcaggtccgacaggatggggggaagagcagattaaagaagtcccagtttctgattaagacgcgcaagaaaaagaaagagaagcacactcaccatgcccccctctcaccccgtaccttccaccccctacggtcagaggcttacaatactttctccgaacgcaggctgaaacacagcctcgttctccacaaatcaaatgaaacgtcactcccaacagatctgaatcagacactgcctagcatggacttcggatggatcgcaagtttacccgaccacaaccaaaatagtagtaacgataccggtcaggcatcatgtccaccagggctgtaccagaccgtgccaccagaagagcactaccaaaccttccccatccaggatcctgaccaaatgcattccacctccgatccttcccatcgatcaagttccccagaactctcagagatgctggagtacgatcggtcacacaagtcattcccaacggatatcagccaaatgtccccttcctccgagcacgaggtttggcagactgtgatctcccccgatctgtcacaagtcaccctttccccagagttgtcacaaaccaatttgtccccggaccttagccacaccacactatcacccgagctaatacagcgaaacctgagccccgccctgggccagatgccaattagccctgatctctctcacaccacactaagccccgatctctcgcatactactctcagtctggacctgtcacagaccaatctgtctccagagctctctcagaccaacctgagccccgcactggggcaaatgccactgagtcctgacctcagtcacacgacgctttcgctagacttctctcagactaacttgtccccggagctctctcatatgacgctctcgcccgagttatcccagactaatttatcccctgcgcttgggcagatgccaatctcacccgatctgtcccacacaaccctctccttggatttcagccagaccaatttgtcgcctgagctgagccagactaacctgtcccctgcccttggacagatgccactttcccctgacccttcccacaccaccctgagcctggatctctctcagacaaatttatccccggagctgtctcagacaaacctaagccctgatcttagtgagatgccattgtttgctgatctgtctcaaatccctctgacccccgacttggaccagatgacactgtccccagacctgggcgaaaccgacctttcaccgaactttggccagatgtctctctctccagatctttctcaggtaaccctcagcccagacattagtgacacaacactccttcccgacttatctcaaatttctccgcctcccgatttggaccagatcttctacccctctgagtccagccagagcctgctgctccaagaatttaatgaatcatttccctatcccgatttggggcagatgccatccccttcttctcctactttaaacgacaccttcctcagcaaagagtttaacccattggtgattgtcggcctctccaaggatgggaccgactatattgagataattcctaaagaggaggtgcagtcctctgaggatgattacgcagagattgattatgtgccctatgatgatccttacaagacagatgtcaggacgaacatcaatagcagcagggatcccgataatattgctgcctggtacctgcgatcaaacaatggtaacaggcgcaactactacattgctgccgaagaaatcagctgggactactccgaatttgtgcagcgggagacggacattgaggactctgacgacatccctgaagacacgacctacaaaaaagtcgtgttccgtaagtatctggacagcaccttcacgaaaagggacccccggggcgagtacgaggagcatctgggaattttgggccctatcattcgtgcggaggtggatgatgtcatccaggtgagattcaaaaacttggcatcccgtccatatagtctgcatgcccacggcctgtcctatgagaagagctctgagggaaaaacctacgaggatgactctcctgagtggtttaaagaggacaacgcagtgcagcccaattcctcttatacatacgtgtggcatgcaacagagcggagtggcccagagagtcccggatcggcctgccgcgcgtgggcctactacagcgctgtcaatcccgagaaggacattcacagcggcctcatagggcccttgctgatttgccagaaaggtattcttcacaaagactctaatatgcccatggacatgagagagtttgtgctgctgttcatgacctttgatgagaaaaagtcttggtattacgagaaaaaatcacggtccagttggcggctgacgagctctgagatgaaaaagtctcacgaattccatgccattaatgggatgatctactcactgccaggccttaagatgtacgagcaggagtgggtaagactccatctactgaacatcgggggctcacaagatattcacgtggtgcacttccatggccagacactccttgaaaacggaaacaagcagcaccagctgggcgtctggccactgctccccggatccttcaaaacattggagatgaaggcatctaagccaggctggtggctcctaaacacagaggtaggcgagaaccagcgtgccgggatgcagacacctttcctgataatggaccgcgactgcaggatgcccatgggactgagtacaggcattatttcggacagccagatcaaagcttcagagttcctgggatactgggaacccagacttgcccgcctgaacaatggaggcagttataacgcttggtccgtggagaaactggcagccgaattcgcgtcaaagccttggattcaggtggatatgcaaaaggaggtgatcatcaccggcatccagacacagggagctaagcattatctgaagtcttgctatactacggagttctacgtggcctactcctccaaccagattaactggcagatcttcaaaggtaatagtaccagaaatgtcatgtacttcaacggcaatagcgacgcttcaaccattaaggaaaaccaattcgatccacctatcgtagcacggtatatccgcataagtcctacaagagcctacaatcgtcctaccttaagacttgagttacagggctgcgaagtgaacggatgcagcactcctctgggcatggagaacgggaagattgaaaacaaacagattactgccagtagcttcaagaagtcctggtggggtgactactgggagcctttccgcgccagactaaacgcacaaggtcgagtcaacgcctggcaggcgaaggctaacaataataagcagtggcttgaaatcgacttgctgaaaataaagaaaatcactgcaattatcacccagggttgtaaaagcctgtcttcggagatgtacgtgaagagttacaccatacattattctgaacagggcgtggagtggaagccgtaccgccttaaatccagcatggtagataagatctttgaaggtaacactaacacgaaagggcacgtgaaaaatttcttcaacccacctatcatcagtaggtttattcgggtgattcctaaaacctggaatcagtccatcgcccttaggctcgagctgttcggttgcgacatctat

SEQ ID NO: 9048 - DNA, 6672 bp, synthetic construct
  misc_feature 1..6672: note = source = /note="Description of Artificial Sequence: Synthetic coding sequence"
  source 1..6672: mol_type = other DNA
atgttccccggatgcccccgcttatgggtgctcgtggtcctgggaacaagttgggttgggtgggggtcccaaggcaccgaggccgcgcaactgcgtcagttttacgtggccgctcagggcattagttggagctatcgaccagagcctacaaatagctcattaaacctgtccgtgactagttttaaaaagatcgtgtaccgagagtacgagccatactttaagaaggaaaagccacagtctaccatcagtgggttgcttggtcccacactgtacgcggaagttggcgacatcattaaagttcacttcaagaataaggctgacaagccactaagtatccacccacaaggaataaggtactcgaaactgagtgagggcgcgtcttacctggatcatacattccccgctgagaagatggacgatgctgtggcacccggccgggagtatacctacgagtggagtatcagcgaagacagtggccccacccatgacgatcctccttgtttgacacatatttactactcccacgagaatctgatcgaggactttaactcgggactcattggtcctctcttaatctgtaaaaaaggcactctgaccgaaggtggtacgcagaaaaccttcgataaacagattgtgttgctgtttgccgtgttcgacgaatccaaatcctggagtcagtccagctctctgatgtacactgtgaatggctacgtgaacggtaccatgccggacattacagtgtgtgcccatgatcatatcagctggcatctcctcggaatgagcagcggcccagagctgttctctatacacttcaacggacaggtgctagaacaaaaccatcacaaggtgtcagcaatcacattagtgagcgcaactagcacaaccgcgaacatgacagtcggccctgagggaaaatggatcattagctctctgaccccaaaacacctgcaggcgggtatgcaggcatatatcgacattaagaactgtccgaaaaaaacacggaatctcaagaaaatcacccgagagcagagaaggcacatgaagcgctgggagtactttatcgcagctgaggaggtgatttgggactacgcccccgttatccctgctaatatggacaagaagtacaggtcgcagcatttggataacttcagcaatcaaattggcaagcattacaagaaggtcatgtatactcagtatgaagacgagtcttttacaaaacataccgtcaaccccaatatgaaagaagatggtatcctgggccctatcatccgtgctcaggtccgtgacaccctgaagatcgtctttaagaatatggcctcgagaccttatagcatatatccccatggagtaacgttttcaccgtacgaggacgaggtcaatagcagcttcacttcaggcagaaataatacgatgatacgcgctgtacagcctggcgaaacatatacctataagtggaacattctggagtttgacgagccgacagagaatgacgcccagtgtctgaccagaccatattactcggacgtggatattatgagagatattgcatccggcctcataggcctgcttttaatctgtaaatcaagatctctcgacagacggggcatccagagggccgccgacattgaacagcaggcagtgtttgccgtcttcgacgagaacaagtcgtggtatctggaagataatatcaataagttctgtgagaaccctgatgaagtgaaacgggatgaccctaaattttatgaaagtaacatcatgtccactataaacggatatgtgcccgaaagcattaccactttaggcttttgcttcgatgacacagttcagtggcacttctgtagcgtaggcacccaaaatgaaattctcactatccatttcaccgggcatagcttcatttacggcaagagacacgaagatactttgactctattccccatgcgcggagagagtgtgacagtgacaatggataatgtgggcacgtggatgctaacctctatgaattcttcgccacggagcaagaagcttaggctcaaatttagggatgtgaagtgcatccccgacgacgatgaagacagctacgaaatattcgagcctcccgagtccaccgtgatggccacccgtaaaatgcacgatagacttgaaccggaggatgaagaatctgatgccgactacgattatcagaatagactcgccgccgccttgggaatcaggtcattcaggaattcatccttaaatcaagaagaagaggagtttaatctcacagccctggcactggagaacggtaccgaattcgtctccagtaacaccgatattatcgtcgggtcaaactacagttctcctagcaacataagcaagtttaccgtgaacaatctggcggagccacagaaagcccccagtcatcaacaggcaacaactgccggaagtccactgcgacatctcatcggaaagaattccgtcctaaattcatcaacagcagaacactcatccccctattcggaagatcctatcgaggaccctttgcagcctgatgttaccggcatccggttattgagtttgggggctggcgaatttaaatcacaggagcacgcgaagcacaaggggccaaaagtggagcgagaccaggctgcaaaacacagattctcgtggatgaagcttttggcccacaaggtgggccgccacctttcgcaggacacaggtagtcccagtgggatgaggccttgggaagacctgccctctcaggacacggggagcccttcacgtatgcgtccatggaaggatccacccagtgacctgttgctactcaagcagagcaactcaagcaaaatcctggtgggaaggtggcatcttgccagcgagaaagggagctatgaaattattcaggatactgacgaggacactgcagtcaataattggctgatcagcccgcagaatgcgtctagagcgtggggtgaatcaactcctctggctaacaaacctgggaagcaaagcggacatcccaagtttccaagagtgcgccacaaaagcctgcaagtgcgccaggatggcggcaaaagccgacttaagaagtcccaattcctgatcaagacccggaaaaaaaagaaggagaagcacactcaccatgccccgctgtctccacggacctttcaccctcttcggagtgaagcgtataataccttcagtgagagacgcttgaaacacagtctcgtactgcacaagagcaacgaaacgagtctcccaaccgatctcaaccagacattgccgtcgatggatttcggttggattgcgtcgttaccagatcataaccagaacagctccaacgacacaggacaagcatcgtgccctcctggcctgtaccagactgttcctcccgaggagcattatcagacatttccaatacaagatccggatcaaatgcacagtacttcagatccgagccataggtcatcctccccagaattgtctgagatgctagaatacgatcgttcacacaaaagtttcccaaccgacatcagccaaatgtccccttcatctgaacatgaggtgtggcaaacagtcatctccccagacctcagccaagtgaccctgtccccagaactgtcacagacaaacctgagccccgacctcagccacaccaccctcagtccagagctcattcagaggaacttgtcgcccgccctcggtcagatgcccatcagtcccgacctgtctcacaccacactgagccccgatttgagtcacaccaccctctcactcgacctgagccagaccaatttgtcaccagagctgagccaaaccaatttgagtcctgccctgggccaaatgcctttgtctccagacctgtcccacactaccctatcgcttgacttctctcaaaccaatctgtcacctgagctcagccacatgacattaagccccgagctgtcccagacaaatctgtcgccagcactcggccaaatgcccatatcccccgatctctcccatacaacattgtcccttgacttttctcagacgaacctgtccccagagcttagtcagaccaacctctcacccgctctcgggcagatgcccctgagtccagatccgagccacacaacactttccttggatctctcccagacaaatctgtcccctgaactgtcacaaacgaatctgtcaccggatctgagcgagatgcccctgttcgccgacctgtcccagattcccctgacacccgacctggaccagatgacgctctctcctgacttgggtgaaacagatttgtccccaaattttgggcagatgtcgctgagcccagatctgtctcaggtcaccttatctcctgacatttcggataccacgttgttgccagatctctcccagatctcgcctccaccagatctggatcaaattttttacccatccgagtcctcccagtccctgctcctgcaggagttcaatgaatccttcccatacccagatctcggccaaatgccctcaccatcgtcacctaccctgaatgacacgtttttgtccaaagaatttaaccctctagtgatagtaggcctctctaaagatggaaccgattacatcgaaatcatcccaaaggaggaagtccaatctagcgaggacgattatgccgagatcgactatgtaccttacgacgatccatataagaccgacgtgagaacaaacataaatagctctcgggatccagataatatagctgcctggtatctgcgtagtaataatggaaatcggagaaattactacatagccgctgaggagatctcctgggactactccgaattcgttcaaagggagacggacattgaggatagcgatgatattcccgaggatactacatacaaaaaggtggtgtttaggaagtacctagactctactttcactaagcgcgatcccaggggggagtacgaggaacatcttggcatcctgggcccaatcatccgcgccgaggtcgacgacgtcatacaggtccgcttcaaaaacttagcgtcccggccctattcccttcacgcccacggtctgtcgtatgaaaaaagctccgaaggaaagacttatgaggacgactcccccgaatggttcaaagaagacaacgctgtgcagcccaactcctcctatacttacgtgtggcacgcaaccgagcggtcaggtcccgagtccccgggaagcgcctgtagagcctgggcttactattccgcagtgaacccagaaaaagacattcattccggactaatcggacctctgctgatctgtcagaaaggcattctgcataaagactccaatatgccgatggacatgagagagttcgttctgttgtttatgacatttgacgagaagaagtcctggtactacgaaaaaaagtctaggtcctcgtggagactgaccagctcggagatgaagaagtcccacgagtttcatgcgataaatggtatgatttacagtctccccggcctcaaaatgtatgagcaggaatgggtacggttgcacctgctgaatatcggaggaagtcaggatatacacgtggtgcactttcacggtcagactctgttggagaacgggaacaaacagcaccagctcggcgtttggccccttttaccagggagctttaagaccctggagatgaaggccagcaaaccaggctggtggctgttgaacacagaagttggggaaaaccagagggccggtatgcagaccccattcctgatcatggacagggactgccgcatgccaatgggcctgtctacgggcataatctccgatagtcagattaaggcctctgagtttctgggctattgggaaccccggctcgcgaggctgaacaacggaggatcttataacgcatggtccgttgagaaactcgcagcagaattcgccagcaaaccatggatccaggttgacatgcagaaagaagtgatcatcactggcatacaaactcagggcgcaaagcactatctcaagagctgttacaccacagagttttacgtggcttatagcagtaatcagatcaactggcaaatttttaaagggaattccacccgaaatgtgatgtactttaacgggaactcagatgcctctaccattaaggaaaaccaattcgatccacctatagtcgcccgttatattcgcatctctccaacccgggcttacaaccggcctacactcaggttagaactccagggctgtgaagtgaatggatgctccacgcccctcggcatggagaatggaaagatcgaaaacaagcagataaccgcttcctcatttaagaagtcatggtggggcgactattgggagccgttccgagctaggttgaatgcccaaggcagagttaatgcctggcaggcaaaggcgaataacaacaaacagtggttggagatagatctgctcaaaatcaagaagataacagcgattatcacccaaggctgcaagtcgctctcatcggagatgtacgtgaagagctataccatccattactctgagcaaggggtggagtggaagccatatcggttgaaatccagcatggtagacaagatcttcgaggggaacacaaacacgaaaggccacgtgaaaaacttttttaatccccccataatttcaagatttatcagggtgatccccaagacctggaatcaaagtatagcacttcggcttgagctctttgggtgcgatatttac

SEQ ID NO: 9049 - DNA, 6672 bp, synthetic construct
  misc_feature 1..6672: note = source = /note="Description of Artificial Sequence: Synthetic coding sequence"
  source 1..6672: mol_type = other DNA
atgttccccgggtgccctcgactgtgggtcctagtggtgcttggcacctcatgggtaggctggggctcacaaggcacggaggcagctcagctccggcagttctatgtggccgcccaggggatttcatggagctacaggcccgaacctactaattcttctctaaacctcagtgtcaccagctttaaaaagatagtgtaccgggaatacgagccatattttaagaaagagaaaccacagtctaccatctctgggcttctcggaccaactctctatgccgaggtgggcgatattatcaaggtccatttcaaaaacaaagctgacaaacctctctcaattcacccacaagggatccgttactcaaaactctcagagggtgcctcttacctcgaccatacctttcccgctgaaaagatggatgacgccgtggcccccggccgcgaatatacatacgaatggtctatttctgaggattccggcccgactcacgacgaccctccctgcttgacgcacatctactattcccacgaaaacctgatcgaggactttaactccggccttatagggcctctgctaatttgtaagaaaggcacacttacggaggggggcacgcagaagacctttgacaaacagattgtgctgctgtttgccgttttcgacgaatcgaagagttggtcgcaatcaagctccttaatgtacacggtgaatggctatgtcaacggtacaatgccagacattacggtgtgcgcacacgaccatattagctggcaccttttaggaatgtcgagtgggcccgagctgttctctatccattttaacggacaggtgctggagcagaaccaccataaagtctccgcaattactttggtttctgcaaccagtacgactgcgaatatgacggtggggccggagggcaaatggataatatccagcctcacccctaagcatctccaggccggaatgcaagcgtatatcgatatcaagaactgtccaaagaagactcggaacctgaagaaaattactcgggaacagcgccgccacatgaagcggtgggagtacttcattgcagctgaggaagtaatttgggactacgcccccgttatccccgctaacatggataagaagtaccgatcccaacacctagacaacttctcaaaccagatcggaaaacattacaaaaaagtgatgtacacacagtatgaggacgagtcatttaccaaacacaccgtcaatccaaacatgaaggaagatggcatcctgggcccaattattagagctcaggtgcgggacactctcaaaatcgttttcaaaaatatggcatcacggccatacagcatatacccccatggagtgaccttctccccatacgaggatgaagtgaactcttcttttacatctggccggaacaatacaatgattcgagccgtacagccaggcgagacctacacctacaagtggaacatattggagtttgatgagccaactgaaaacgatgctcagtgtttgaccagaccatactattctgacgtggacattatgcgcgacatagctagcggactaattggactgctgctgatttgcaaatccagaagccttgaccggaggggcatacagcgggcggccgatatcgagcaacaagcagtgtttgccgtgttcgacgagaacaagagctggtacctagaagacaacatcaataagttttgcgagaatcctgacgaggtgaagagagacgacccgaaattttacgagagtaacatcatgtcaacaattaatggctatgtacccgagtcaatcacaaccctggggttctgtttcgacgacacagtgcagtggcatttctgttcagtcggcacacagaatgagattctcaccatccatttcacagggcatagcttcatttacggcaaacggcatgaagatacattgactctcttccccatgagaggtgagagcgttacagttaccatggataacgtgggaacctggatgctcacttctatgaattcttcccctcggtccaaaaaactacgactgaagtttagagatgtgaaatgcatccctgatgatgatgaggacagttatgagattttcgagcctccagagagcactgtcatggcaactagaaaaatgcacgatcgactggaacctgaggatgaagaatcggacgctgactacgactatcaaaatagactcgctgcagccttaggcattaggtcgtttcgaaatagttccctgaatcaggaagaggaggagttcaacctgaccgcccttgctttagaaaatggtaccgagtttgtgtcctccaatacagacattatagtcgggtctaactacagttcgccttcaaacatttctaagtttactgtgaacaatctggcagagcctcaaaaggctcctagtcaccagcaggctaccaccgccgggtctccactgcggcacctgatcggcaagaattctgtcctcaattctagcacagctgagcattccagcccatatagcgaggaccccatcgaagatccattgcagccagacgtaacaggtatccggctcttgagccttggcgctggggagtttaaatcccaggagcacgcaaaacacaaaggccctaaagtggaaagggaccaggccgctaagcacagattttcttggatgaagttgctggctcacaaggtggggagacatctgtctcaggacacaggcagcccgagcggtatgagaccctgggaggacctaccaagccaggacaccggcagcccctccagaatgcggccctggaaggatccaccttccgatctccttctcttgaaacagagcaacagtagtaaaatcctcgtggggagatggcatctggcatccgaaaagggctcttatgagattatacaggatacagacgaggataccgccgttaataactggttgatttctccccagaatgcgagtagggcctggggcgaatcgaccccactggctaacaagccggggaagcagtccggacaccccaaatttccaagggtgaggcacaaatctctccaggtgcggcaggacggtggcaaatccaggctgaaaaaatctcagttcctgataaaaacccggaaaaagaaaaaggagaaacacactcatcatgctccactgtcacctcgaactttccacccactgcggtcggaggcatataatactttctctgagaggcgccttaagcacagcctggttctgcataagagcaatgaaactagcctccccaccgatttgaatcagactctgccctcaatggattttggctggatagctagtcttcctgatcataatcagaattcaagtaacgacaccggccaggcctcatgccctcctggcctgtaccaaaccgtgccacccgaggaacactatcaaacattccccatacaagacccagatcagatgcacagcacaagtgacccgtcccaccgatcgtcatcccctgaactgtccgagatgctcgagtatgaccggtcccacaaatcctttccgacagacatcagtcagatgtccccttcaagcgagcacgaagtatggcagacagtaatttccccggatctgtcacaagtgaccctctccccagagttatctcagaccaatttgtctcctgacctttcccatacaaccctctctcccgaactgatccaacgcaacctgagcccagcgctcggccagatgcctatctctccggatctaagccatacgacactgtccccagacttgagccacactactctgtctctagacctctctcagaccaacctctctcctgaactcagccagaccaatctatcaccagctcttggccaaatgcctctgagcccggacttgtctcacacgaccttgtcactggattttagccagaccaacctctctccagaattatcacacatgactctgtctcccgagctgtcgcaaacgaacctgtcacctgccctcggccagatgccaatcagccctgatctgagtcatacgaccttgagtttggattttagccagaccaatctgtctcccgaactcagccagaccaatttgtctcctgctcttgggcagatgcctctgagccccgacccctcccacaccacactgtcacttgacctgtcccagactaacctgtctcccgaactgtcccaaactaatttgagcccagatttgtccgaaatgcctctgtttgccgatctaagtcagattccacttactccagatctggaccagatgaccttgagtcccgaccttggagagacagacctctctcctaatttcggccagatgagcctgtccccagatctgtcccaggtgactttgtctccagacatatccgacaccacccttctgccagatttatctcaaatcagtccacctcccgatctggaccaaattttctatccctcagagagctctcagagtcttctcctgcaagagttcaacgagtcttttccctaccccgaccttggtcaaatgcctagccccagcagccctacacttaacgataccttcctatccaaggaattcaatcccctggtcattgtgggactgtcaaaagatgggactgattatatcgagatcattcctaaagaagaggtccagtccagcgaggatgactacgcagaaattgactatgtgccatatgacgacccatacaagacagacgttcgcacaaacataaattccagcagagatccagacaacatcgccgcctggtacttgaggtcaaacaatggaaatcggagaaattattatatcgccgctgaggaaatctcttgggattacagcgagttcgtccaacgtgaaaccgacatagaggactccgatgatattcccgaggatactacatacaaaaaggtggtattccggaaatatctagattccaccttcaccaaaagggaccccagaggcgaatatgaggagcacctcggtatccttggacccattatcagggcggaagttgacgacgtcattcaggtccgttttaagaacttggcttctaggccctattccctgcacgcacacgggctgtcatatgaaaagagctccgaaggcaagacctatgaagatgattctcccgaatggtttaaagaagacaatgcagtgcagccaaattcctcctacacttatgtctggcatgccacagaaaggtctgggcccgaatccccagggtcagcctgcagggcttgggcttattattccgccgtgaatccagagaaagacatacacagcggactgattggaccgctgctcatctgtcaaaagggcatacttcataaggatagcaatatgccgatggatatgcgagagtttgttttgctgtttatgaccttcgacgagaaaaagtcttggtattatgagaagaagagcagatcatcttggcggctcacctcgagcgaaatgaagaaatctcatgagttccatgccattaacggtatgatatactcactaccagggctgaagatgtatgagcaggaatgggtaaggctgcatctcttgaatatcgggggttcgcaagacattcatgtcgtgcactttcatggtcagacactgctcgaaaacggcaataaacaacaccagctgggggtatggccgctcttacctggatccttcaagaccttggaaatgaaagcatctaaacccggctggtggttgttgaacaccgaggttggggagaaccagcgcgccggaatgcagaccccctttctcatcatggatagggactgtagaatgcccatgggtcttagtacgggaatcatttctgatagccaaatcaaagcctcggagtttttgggctactgggaacctagactggctaggttaaataatgggggttcatataatgcttggtcagtggaaaagttggctgccgagttcgcatccaagccatggatccaggtggatatgcaaaaggaagttattatcactggcatccagacccaaggtgctaagcattatctaaagtcctgttacacaacagaattctacgtagcttactccagcaaccagatcaattggcagatctttaagggaaactctacgcgcaatgtgatgtactttaacggtaacagtgatgcatccacaatcaaggagaaccagttcgatcctcccatcgtcgcacgctatattcgcatttcccccactcgtgcatataatcgccctaccttgcggctggagctccaggggtgcgaagtgaacggttgttctacccccctggggatggagaacggcaaaatagagaataagcagatcacagctagctcgttcaagaaatcctggtggggggactactgggaaccattcagagcccgtcttaatgcccaaggccgggtgaacgcctggcaggcaaaggccaacaacaacaagcagtggctcgagattgatctcttgaaaatcaaaaaaatcacagcaatcataacacagggatgcaaatccctcagcagtgagatgtatgtaaagagttataccattcattactccgaacagggggtggagtggaagccctatcggctgaaatcctccatggtggacaagatattcgaagggaataccaacacgaagggtcacgttaagaacttttttaaccctcccataattagccgattcattagggtcattccaaagacttggaaccaaagcatcgccctgagactcgagctgttcggatgtgacatttat

SEQ ID NO: 9050 - DNA, 6672 bp, synthetic construct
  misc_feature 1..6672: note = source = /note="Description of Artificial Sequence: Synthetic coding sequence"
  source 1..6672: mol_type = other DNA
atgttcccaggttgtccaaggctgtgggttctggtagtgctgggaacctcttgggtgggttggggttcacagggcacggaggctgcccagctccgacagttttacgtcgccgcacagggcatcagctggtcctaccgaccagaaccaacgaatagcagcctgaatctttcggtgaccagtttcaagaagattgtgtaccgcgaatatgagccttacttcaagaaagagaagccgcaatccacaatttccggactactcggaccgacactatacgccgaggtaggagatatcataaaggtccactttaagaacaaggccgacaagcccctctcgattcacccacagggcatccgctattcgaagttgagtgagggtgccagttaccttgaccatacattcccagcagagaagatggatgatgcggttgctcccggacgagagtacacctacgaatggtcgatctcagaggattccggtccaacccatgatgatcccccctgtttgacccatatctattactcccatgagaacctgatagaagatttcaacagcggcctaatcggaccccttcttatatgtaagaagggcacgctgacggagggcggtactcagaagacgttcgataagcagatcgtacttttgttcgcagttttcgatgaatctaaatcctggtcccagtcgagctccctgatgtataccgtgaatggctacgtcaacggcaccatgcccgatatcacggtgtgtgctcatgatcacatttcgtggcacttgctgggtatgtcgagtggccccgagttgttctcgatccacttcaacggacaggtccttgagcagaatcaccacaaagtgtctgctataaccctcgtgagcgctacaagcaccacggcgaatatgacggttggccctgagggaaagtggatcatatcctccctgacgccgaagcatcttcaggccggaatgcaggcgtacatagacatcaagaactgtcccaagaagacccgcaatctgaagaagattacgcgcgagcaacgccgtcacatgaaacgctgggaatatttcatagccgcggaagaagtgatctgggattacgccccagtgattccggccaatatggataagaagtaccgctcccagcacttagataacttcagcaatcagatcgggaagcattataagaaggttatgtatacccagtacgaagatgagtcgttcacgaagcacaccgtgaatccgaacatgaaggaggatggtatcctaggaccaattatcagggcccaggtgcgcgatacgcttaagatcgtattcaagaacatggcttctcgcccatattccatctacccccacggcgttactttctcaccatacgaggacgaggtgaattcaagtttcacgtcgggccggaataacaccatgatcagggccgttcaaccaggagagacctacacctataagtggaacatattggaattcgatgaaccaacggagaacgacgcccagtgtctgacccgaccctattacagcgacgtggatatcatgagagacattgcgagtggccttattggccttctgttaatctgtaagtcacggtctctcgaccgccgaggaatccagcgagctgctgatatcgagcaacaggccgtgttcgcggtattcgacgaaaataagagctggtatctggaggataacatcaacaaattttgcgagaacccggacgaagttaagcgcgatgatcccaagttctacgagtcaaatatcatgtccacaatcaatggctacgtgccagagagtattaccaccttgggtttctgcttcgacgacacagtgcagtggcacttctgcagcgtgggcacccagaacgagattttgaccattcactttactggccatagctttatttatggcaagcgccacgaggatacgttgacgctgttcccaatgaggggcgagtcagttacagtcacaatggacaacgtcggtacatggatgctaacttccatgaactcttccccacgctcaaaaaagctgcgcttgaagtttagggacgttaagtgcatcccagacgacgacgaggactcgtacgaaatatttgagccaccagagtccactgtcatggccacgaggaagatgcacgatcgtctggagcccgaggacgaagaatcggatgctgattacgattaccagaacaggctggcagccgcacttggcatcagatccttccgtaactcctcgttgaaccaggaagaggaagaattcaacctgacagccctggcactggaaaacggtacagaatttgtttcctcgaacaccgacataattgtgggctccaactactcttcaccatcaaatatttcgaagtttaccgtgaataacctggccgagccacagaaggcaccatcccaccagcaggccactaccgcaggatcccccctgcgtcatttgataggcaaaaatagtgtattgaactccagcaccgctgagcacagctccccgtatagcgaagacccaatcgaggaccccttacaacccgatgttactggcatccggcttctctccctgggcgccggcgaattcaaaagtcaggagcacgccaaacataagggaccgaaggtggagagggatcaagcggccaaacatcgcttcagttggatgaagttgctggcccataaggtcggccggcacctgtcccaggacacaggctcgccctcgggcatgcgtccttgggaagatctgccctctcaggatacagggtcaccgtcacgcatgcgtccgtggaaggacccaccgagcgatcttctactcctaaagcagagtaactccagcaagatcctagtgggtcgctggcaccttgcctccgagaaaggatcgtacgagataatccaggacactgacgaggacacagccgttaataattggctaatttcaccgcagaacgcctccagggcttggggtgagtccactccactcgctaataagccaggcaagcagagcggacatccaaagtttccgcgtgttaggcacaagtctttgcaggtgcgacaggacggtggtaagtctcgcttgaagaagtctcagttcctgataaagacacgaaagaagaaaaaggaaaagcatacgcatcacgcaccgctatcaccaaggacgttccatcccctgagaagtgaggcatacaacacattctcagagcgtcggctcaaacattcgctggtgctccataagtccaatgaaacgtcgttgcctacagatctgaatcaaacccttccgagcatggacttcggctggatcgcatccctcccggatcacaaccagaactcatcgaacgacaccggacaggcaagctgcccacctggcctgtaccagaccgtgccgcccgaggaacactatcaaacctttccgatccaggatccggatcagatgcatagcaccagtgacccctctcaccgaagctcttcccctgagctgtccgagatgttggagtacgatagaagccacaagagtttcccgacagacataagccaaatgagcccttccagcgagcatgaggtttggcagacggtgatatcccccgacctctcgcaggtgacgctgtctcccgagctttcacagactaatttgagtcccgatctgagtcacaccaccctatcgccagaattgattcaacgaaacctgtcgccggcacttgggcaaatgcctatatcacctgatctatcccataccaccctgagcccagatctcagccacaccacattgagcctggacctcagtcagaccaacctgtcccccgagctgagtcagactaatctgagcccagcacttggtcaaatgcccttgtcgccggatctcagccacaccacgctgagcctagatttctctcagaccaacctatcacctgagttgtcccatatgactctgagtcctgagctgtcgcagacgaatctatcgcctgccttaggccagatgcccatctctcccgacttatcccataccaccctgtcgctcgacttctcccaaacgaacctgtcgccagagctgtcgcagacgaacttgagcccggctctgggacagatgccattgagtcccgatccgtcgcataccacccttagcctcgatctaagtcagaccaatctttccccagaactgagtcagactaacttgagtcccgatctgagtgagatgcccctgttcgccgatctgtcacagatccctctcacgccggacctggaccagatgaccttgtcacccgacctaggcgagaccgatctatccccgaactttggccagatgtccctgtcgcccgatctgtcccaggttacgctgtcgcccgatatatcggacacaacactgcttcccgatctgagccaaatatctccccccccagacctggatcagatattctacccatccgaaagctcgcaaagtctgctgttgcaagagttcaacgagtccttcccctaccccgacctgggccagatgccctcgcccagctcgcccaccctaaacgacacgtttctgagcaaagagtttaaccccctagtgatcgttgggctgtcaaaggacggcacggactatatcgagatcatccccaaggaggaggtccagagctcagaggacgactatgccgagatcgattacgtgccttatgacgacccctataagacggacgtccgcacaaatataaactcgtctcgtgaccctgacaacatcgccgcatggtacttgcgatccaataatggtaatcgccgcaattattacattgctgccgaggaaatttcctgggattactcggagtttgttcagcgtgaaaccgacatcgaggacagcgacgatataccagaggatacgacatacaaaaaggttgtgttccgaaagtatctggacagcactttcaccaagagagatccgcgtggcgagtacgaggaacacctcgggattcttggccccatcatacgtgccgaggtggacgacgtcatccaggtgcgctttaagaacctggccagcagaccgtacagccttcacgctcatggcttgtcctacgaaaagagttcggagggtaaaacgtacgaggatgatagcccagagtggttcaaggaagacaatgcagtccaacccaactcatcgtatacgtatgtgtggcatgcgacagagcggagcgggccagagtcgccgggaagtgcgtgtcgggcatgggcgtactactcagctgtcaaccccgagaaagatatccactcgggactcataggcccactacttatctgccagaagggcattctccataaggattcgaacatgccaatggacatgcgggagtttgtgttgctgtttatgacattcgatgaaaagaagagctggtactacgaaaaaaagtcacgttcctcatggcgtctgacgtccagcgagatgaaaaagagccatgagtttcatgctataaatggaatgatttactcgctccccggtctaaagatgtacgagcaagagtgggtcaggctacatctcttgaatattggtggctcgcaggatatccacgtggtacacttccatggacaaacgctgttggagaacggtaataaacaacaccagctcggcgtatggccgcttctgccgggcagtttcaagacgctagagatgaaagcaagcaagccgggctggtggctgctgaatacagaggtgggagagaaccagcgcgcgggcatgcagacaccatttctcattatggatcgcgattgtagaatgccaatggggctgtcgaccggcataatttccgactcccagataaaggcctccgagttcctggggtactgggagccacgccttgcgcgcctgaataacggcggtagctacaacgcttggtccgtcgaaaaactggctgcggaattcgccagtaagccgtggatccaagtggatatgcaaaaggaagtcataattacaggcatccagacccaaggtgccaagcactacctcaagtcttgctataccacagaattctacgttgcttactcctcgaaccaaattaattggcagattttcaaaggtaactcgacgaggaatgtcatgtactttaatggcaacagcgatgcctccacgatcaaagagaaccagtttgacccgccaattgttgcgcgttatatccgcataagcccgactcgagcctacaatcggccgacgcttcgcttagaactccagggatgcgaagttaacgggtgctccactccattgggcatggagaatggcaagattgagaataagcagatcacggcatcatcttttaagaaaagctggtggggcgattactgggaaccatttcgagcgcgtttgaacgcccaaggccgtgtgaacgcgtggcaagccaaggctaataacaataaacaatggttagaaatagaccttctgaagatcaagaaaatcactgcgataatcactcagggctgtaagtctctctccagtgagatgtacgtgaagagctacaccatccactactccgagcagggagtagaatggaagccataccggctgaaaagctccatggtggataagatcttcgagggcaatacaaataccaaaggacatgtgaagaacttctttaaccctccaattatcagtaggttcattcgcgtgatacctaagacctggaatcaaagcatagcattgcgcttagaactgtttggctgcgacatatac

SEQ ID NO: 9051 - DNA, 6672 bp, synthetic construct
  misc_feature 1..6672: note = source = /note="Description of Artificial Sequence: Synthetic coding sequence"
  source 1..6672: mol_type = other DNA
atgtttccaggatgtccgcgcttatgggtgctggtcgtgctgggtacatcttgggtggggtggggatcacaaggaacggaggccgctcaactgagacagttttacgtagcggcacaaggaatctcttggtcatatcgcccggaaccgacgaactcatcattgaacttgtcagtcacgtcttttaaaaaaattgtttatcgtgaatatgaaccgtactttaaaaaagaaaagccgcagtctacaatttcaggtcttctggggccgaccttatatgcagaagtaggggacattataaaggtgcactttaagaataaggctgataagccgttatctatccaccctcaggggattcgttactccaaacttagcgaaggagcatcatacttagatcatacctttccggcggagaaaatggatgatgctgtggcgcctggccgtgagtatacgtacgaatggagcatttcagaggattctggccctacacatgatgatcctccatgtttaacgcacatttattattcccatgaaaacttgattgaagattttaacagtggtttaatcggtcctctcttgatttgcaaaaaaggtacgttaacagaaggagggacacaaaaaacatttgacaaacaaatcgtcttgctttttgccgtgtttgacgagtcaaaatcttggtcacagtcatcatctctcatgtatacagtgaatggctatgttaatggcaccatgccggatatcacagtctgtgcccatgatcatatttcatggcatctcctggggatgtcgtcaggccctgagttattttcaattcattttaatggtcaggttttagaacaaaatcaccacaaagtcagtgcaattacgcttgtaagcgcaacatcgacgacagctaacatgacagtcggccctgaaggaaagtggattatctccagcctgactccgaaacatttgcaagccggtatgcaagcgtacattgatattaagaattgtcctaaaaaaacgagaaaccttaaaaagatcacgcgcgaacagcggcggcatatgaaacgctgggaatattttatcgcggcggaggaagtcatttgggactacgcgcctgttattccggcgaacatggataaaaaatatcgcagccaacacctggataatttttctaatcaaatagggaaacactataaaaaagtgatgtacacacaatatgaggatgaatcttttacgaaacatacagtgaacccgaacatgaaagaagacggcatacttggacctatcatacgcgcgcaagtgcgcgacacactgaagatcgtgtttaaaaacatggcaagccgcccgtatagcatctatcctcatggagtcacatttagtccttatgaagacgaagtgaacagcagctttacctctggtcgcaacaacacaatgattagagctgttcagccgggtgaaacatacacatacaagtggaatatccttgaatttgatgaaccgacagaaaatgatgcacagtgcctgactcgtccatattattctgacgtggatatcatgagagatatcgcttcaggactcatcggcttgctcttaatatgtaaatctcggtccctggacaggagaggcatccagcgtgctgcggatattgaacaacaggccgtatttgcagtctttgatgagaacaaatcttggtatttggaggataacattaacaaattttgtgaaaatcccgatgaagtgaagcgtgacgacccgaaattctatgagtcgaacattatgtctacgattaacggctatgtaccggagtccattacaacattgggattttgctttgatgatacggtccaatggcacttctgtagcgtgggaacacagaacgagatcttgacaattcacttcacaggacatagtttcatttatggaaaaagacatgaagacacgcttacgctgtttccgatgcgcggcgaaagcgtaactgtcacaatggataatgtcggcacctggatgttgacgtctatgaactctagcccacgcagcaaaaagctgcgcctgaaatttcgtgacgttaagtgcatccctgacgacgatgaagattcgtacgagatctttgaacctccggaatcaactgttatggccacgcgtaaaatgcatgatagactggaaccagaagatgaagaaagtgatgcggattatgattaccaaaatcgcttagctgccgcactcggaatacgctcttttagaaactcttcactgaaccaggaagaagaggaatttaatctaacggcactagccttagaaaatggtacagaatttgtgagctccaacacagacataatcgttggaagcaattactccagcccgtctaatatcagtaaatttaccgtaaataatcttgcagaaccccaaaaagccccgtctcaccaacaggcaaccacggcaggttcgcctcttagacaccttattggcaaaaattctgtgttgaactctagcaccgcagagcactcatcgccttatagtgaagacccaatcgaggatcccttacagccggacgtcacaggtatcagattactttctcttggagccggagagtttaaatcacaggaacacgccaaacataaaggaccgaaagtagagagagatcaggcggctaaacatcgtttctcatggatgaaattgcttgcccataaagtaggacgccatctctcacaagataccgggagcccgtctggcatgcggccttgggaagatctcccttctcaagatacaggttccccgtcaagaatgcgtccctggaaagaccccccatccgacttgcttttattaaagcagtcaaactcatccaaaattcttgtcggcagatggcatttggcgtccgaaaaggggtcttacgaaattattcaggatactgatgaagacacagctgtgaataattggctaatctctccacagaacgcaagtcgcgcgtggggagaatcgactccgctagctaacaaaccgggcaaacagtcaggacatccgaaattcccgagggtgagacataagtctctgcaggtacggcaggatggtggcaaatcgagattaaaaaaatcacaatttttaattaaaacacgtaaaaagaaaaaggaaaaacacacccatcacgcaccgttatctccgcgcacatttcatccactgaggagcgaggcctacaatactttctcagagagacggctaaaacactctctggttctccataaatccaatgaaacatcactacctacggacttgaaccaaactttgccttctatggattttggatggatagcatccctgccagatcataaccaaaattcttcaaatgacacaggacaggcctcttgcccgcctggcttataccaaaccgtgccaccggaagagcactatcagacatttccgattcaagatccggatcaaatgcatagcacgtcagatccttcacatcgatccagctctccggaactttctgagatgctggaatacgaccggtcacataaatcatttccgacagatatctcgcagatgagcccgtcgtcagaacacgaagtgtggcagacggttatttctcctgatttgagccaagtgacgctgagcccagaactttctcagacgaatctgtcaccggatctctcccacactacgctgtcaccagaattgatccaacgtaatctctcgccggcattaggacagatgccaatctctccggacttgtcccacacgacgctgtcacctgatttaagccatacaactttgtccttggatttgtcacagacaaatctttctccagagttgagtcaaaccaatctgtctccggcgttgggtcagatgccgctttccccggatctgagtcacactacattatcgctcgacttctcgcaaacaaatctatcgccggagctctcacatatgacactaagccctgaactttcccagactaatttgtctccggcacttggacagatgccaatttcacccgacttgtctcacacgacgcttagcttagatttttcacaaacgaatcttagccctgaactgtcacaaacaaatctctctccggccttaggccaaatgccgctttcaccagatccttcacacacgacgttgtctctcgacttatcccagactaatttatctccggaactgtcccagacaaacttatcaccggatttatcagagatgcctttattcgccgacctctcacagattccgttaacaccagacttggatcaaatgactctgtcaccggacctaggggaaacagacctgagtccgaacttcggccaaatgtcgctgtctcctgacttatctcaggtcacgttgtccccggatatttcagatacgacattgttgccggatctttcacagatttcaccaccgccagacctggaccagattttctatccgtccgaatcctcacaatcactgctgcttcaggaatttaatgagtcttttccgtatccggacttaggccaaatgccttctccatctagcccgacacttaacgatacgttcctctcaaaagaatttaatccgctagtcattgtaggactttctaaagatggcacggattatattgagattatcccgaaagaggaagtgcagagttccgaagatgactacgcagaaatcgattatgtcccgtatgacgatccatataaaacggatgttcgtacaaatattaattcttctcgtgatccggacaatatcgctgcgtggtatttacggagcaataacggaaatcgccgaaattactatatcgcggcagaagagatttcatgggactattcggaatttgtgcagcgggagaccgatattgaagattcagacgacattccggaggatactacctacaaaaaagttgtgtttcgcaagtatctggatagcacattcacgaagcgtgatcccagaggggagtatgaggaacatttgggtattttaggtcctataattcgcgcagaagtggacgatgtcattcaagttaggtttaaaaaccttgcatcgaggccgtacagcttacatgctcatggattgtcatatgaaaaatcttcagagggaaagacatatgaagacgatagccctgaatggtttaaagaagataatgcagtccaaccaaattcatcttacacgtatgtttggcatgctacggaacggtcaggcccggagtctcctggatcagcgtgtagggcttgggcgtactattctgcggtgaatccggaaaaagatattcattccggattgataggccctctacttatctgtcagaagggtattctgcataaagattcaaacatgccaatggatatgcgagagtttgtcttgctgttcatgacgttcgacgaaaaaaaaagctggtattatgaaaaaaaatctcgatcatcttggcggttgacatcctcagagatgaaaaaatcgcatgaatttcacgcgataaatggaatgatatacagtttaccgggattgaaaatgtatgaacaagaatgggtgagattgcacttgctcaatattgggggcagccaagatatccacgtggttcactttcacggccagacgctactggaaaatggtaataaacaacaccaactgggagtctggcctctgctgcctggctcttttaagacactggagatgaaagcttctaaaccaggatggtggcttcttaacactgaggtaggggaaaatcaaagggcgggaatgcagaccccatttctgattatggatagagactgcaggatgccaatgggcttatctacgggcattatctcagattcccagattaaagctagcgagttcctgggctattgggaaccgagattggcacgccttaataatggagggagctataacgcgtggtctgtcgaaaagctggccgccgaatttgcaagtaaaccatggattcaagttgacatgcaaaaagaagtcatcattacgggcatacagactcagggcgcgaagcattatctgaaatcttgctatacaacagagttctatgttgcctacagcagtaatcaaataaattggcagatctttaaaggcaattctacacgcaacgttatgtatttcaatggtaactccgacgcatccacgattaaggaaaaccaatttgaccctccgattgtggcaagatatatcaggatcagcccgactcgggcttacaacaggccgacgctgagactagaactccaagggtgcgaagtgaacgggtgttctacaccactgggcatggaaaatggaaaaattgagaataagcaaattaccgcatcgagttttaagaaatcttggtggggagattattgggagcctttccgcgcacgactgaacgcccagggccgggtgaatgcatggcaagcaaaagcgaataacaacaaacagtggctggagatagatctcttaaaaatcaagaaaattacggcaatcatcacgcaaggctgtaagtctctgtcttcagaaatgtacgtcaagagctatacgatccactattcggaacaaggagtagagtggaaaccgtatcggttgaaaagctcgatggtagataaaatctttgagggaaatacaaatactaagggccatgtgaagaactttttcaaccctcccattatttctaggtttattagagtcatccctaaaacgtggaatcagagcatcgcactgagactcgaactttttggatgcgatatttat

SEQ ID NO: 9052 - DNA, 6672 bp, synthetic construct
  misc_feature 1..6672: note = source = /note="Description of Artificial Sequence: Synthetic coding sequence"
  source 1..6672: mol_type = other DNA
atgtttccaggctgtcctcgcctgtgggtactagtggtcttgggcactagctgggtcgggtggggatcccaggggaccgaagctgcccagctgaggcagttctatgtcgcggcccaagggatttcctggtcttaccgtccagagccaacaaactcctcactgaacttgtccgtgacatcattcaaaaagatcgtgtaccgggagtatgaaccatactttaagaaggagaagccacagagtacaatctctggactgctggggccaactctctatgccgaggtcggggatatcattaaggtgcacttcaaaaacaaagcagataaaccgctgtccatccatcctcagggtataaggtattccaagctttcggaaggggcttcatacctagatcatactttccccgccgaaaaaatggacgacgccgttgcacccggccgagagtacacctatgaatggtcaatctctgaagacagtggacccacacatgacgacccgccttgtctgacgcatatatattatagccacgaaaatcttatcgaagacttcaattctggcctcatcggacctcttttgatttgcaagaaggggacactgacagaagggggcacccagaaaaccttcgacaagcagatcgtgctgctgttcgccgttttcgatgagagtaaatcttggagccagagttcctccctgatgtacactgtgaacggatatgtcaacggcacaatgccagacatcaccgtctgcgcccacgaccatatctcttggcatctcctcggcatgtcttccgggcccgagttgttctctattcattttaatgggcaggtgctcgagcaaaaccatcataaggtttccgcaatcactctagtgagcgctacgtccacaactgccaacatgaccgttggccctgagggcaagtggattatctccagcttgacccctaagcatctgcaggcgggaatgcaagcctacattgatatcaagaattgccccaaaaagactcgcaatctcaagaaaattactcgggagcagcgtaggcatatgaaacggtgggaatacttcatagccgcagaggaggtcatttgggattacgccccggtgatccccgccaacatggacaagaagtatcgctcgcaacacctcgacaatttctccaatcagattggaaaacattacaagaaggtaatgtacacgcaatatgaggacgaatcattcacgaagcacaccgttaaccctaacatgaaggaggatggaatcttaggccctatcatcagagcccaggttagagacactttaaaaattgtattcaagaacatggctagcagaccgtactctatttacccacacggcgtgacctttagcccttacgaagatgaagtaaattccagctttacatcaggtcgaaacaacaccatgatcagggcagtgcagcccggagagacttatacgtacaaatggaacatcctcgaatttgatgaacccaccgagaacgatgcacagtgtctcaccagaccatactattccgacgtggatatcatgcgagacattgcaagcgggctcataggactgctactgatctgtaaatccagaagtctggacagacgaggtattcaacgcgccgctgacatagagcaacaggcggtcttcgccgtttttgacgagaataagtcatggtatctggaagacaacatcaataaattttgcgaaaaccctgatgaagtgaaacgagacgaccccaaattctacgagtctaatataatgagtacaatcaatggttacgtccccgagagtatcaccacgcttgggttctgttttgatgacactgtacaatggcatttctgctccgtcggtacacagaacgagattcttactatccactttactggacacagttttatctatggcaaacggcacgaggatacccttaccctctttccaatgcggggggagtccgtgacagtgacgatggacaatgtggggacttggatgttaacctccatgaattcttcccctcgttctaaaaagttgcgactgaagttccgcgatgttaagtgtattcccgatgatgatgaagattcctatgaaatcttcgaacctcccgaaagtactgtcatggctaccaggaagatgcacgatagactggagccggaggatgaggagtccgatgccgactacgattaccaaaacagactagcagctgctcttggtatacggtctttccgcaacagttcactgaaccaggaagaagaagaatttaatctgactgccctggccctcgagaacggaacagagtttgtgtcatctaacactgatattatcgtcggtagcaactatagtagccctagtaacatatccaagtttacggtgaataacctggccgagccccagaaggctccgagccatcagcaagcaactacagcaggtagccccctcaggcacctaataggaaagaactcagtgcttaacagctcaacagcagagcacagttcaccttattccgaggaccctatcgaagacccgctgcagcccgatgtgacaggcatccgactccttagtttgggtgctggagagtttaaatcgcaagaacatgccaaacacaaagggcctaaagtggaaagagaccaggcagcgaagcaccggttttcctggatgaagctgctagcacataaagtggggagacatctctcccaggatactggcagtccttctggcatgagaccatgggaagatctgcccagccaagatacgggatccccgtctcggatgcgtccatggaaggatccgcctagcgaccttctgttgctgaagcagagcaactccagtaagatcctggtgggacggtggcatctcgcaagcgaaaaaggtagctacgagattatccaggatacagacgaagatacagccgtgaacaactggctgatctccccgcaaaatgcatctagggcttggggcgagagcaccccactggccaataagcccggtaaacagagcggacaccccaaattccctcgcgtgagacataaatctctgcaagtccggcaggacggaggcaagtctaggcttaagaaatctcagtttctcattaagacacgcaagaagaaaaaagaaaaacacactcatcacgcccccctgagcccgaggacgttccaccccctccgctcagaagcatacaataccttcagcgaacggcggttaaagcactccctggtgctccacaagagcaacgagacctcattgcccacggacttgaaccagacactcccttcaatggattttggctggatagcgtctctgcctgatcataaccaaaattcctctaacgacacggggcaggccagctgccctcccgggctttatcagaccgtaccgccggaggagcattatcagacgttccctatccaggatcccgatcagatgcattcgactagtgacccttcgcatagaagctccagcccagagctgagtgaaatgctcgagtacgatagaagtcataagagctttcctactgacattagtcagatgtctccgtcatctgaacacgaggtatggcagaccgtgatcagccccgatttatcccaggtgactctgtcacctgagcttagtcagacaaacctctcccctgacttgtctcatactacactatcgcccgagctgatacagcgcaatctgagcccggccctagggcagatgcccattagccccgacctctctcacaccactctcagtccagatttgagtcacactacgctctcgttggatctgagtcagacaaatttgtctccagagttgtcccagacaaacctgagccccgcactgggccaaatgcccttaagccctgatctgtcccacacgacgctatccctggatttcagtcaaaccaacctcagcccggagctcagtcacatgactctctcacccgagttgtctcagaccaatctgagcccagctctcgggcagatgccaatctcacccgatttgtcccacacaactctgtctctggacttcagccagacaaacctctcaccagaattgtcacagactaacttgtccccagcgctgggtcagatgcccctgagcccggatccgtctcacacgactttaagcctggacctaagccaaacaaatctgtctcccgaactgtcccaaaccaacttatccccagatctcagtgaaatgcccctgttcgcagatttgagccagatccccctgacaccagacctcgaccagatgacactctcccctgatctgggagaaaccgacttaagtcccaactttggacagatgagtctgtcacctgacctgtctcaggtgacactgagccctgatatctcggataccaccctgctccccgatctgagccagataagcccacccccagatctcgatcagattttctacccctccgagtcaagccaatccctgctgctccaggagttcaacgagtcttttccctacccggacctgggccagatgccaagcccctcatcccccaccctcaatgatacctttcttagcaaagaatttaatcccctggtgatcgtaggcctgtccaaagacggcacagactatatcgagattatcccaaaggaggaagtgcagtcgtcagaggacgattatgccgaaatagactatgtcccttatgacgatccctacaagacagacgtccgaaccaacattaattccagccgtgaccccgacaacatagcggcgtggtaccttcgctcgaacaacgggaatcgcaggaattactatatcgccgctgaggagatcagttgggactacagcgagttcgtgcagcgtgaaaccgacatagaggatagcgatgacattcctgaggatactacttataagaaagtcgtgtttcgtaagtatcttgattcaacgttcacaaagcgggatccaagaggtgagtatgaggagcatctgggcatattggggcctatcattagagcagaagttgatgatgtaatccaggtccgctttaagaacctagcaagccgtccctatagtcttcacgcccacggattgagctacgaaaaaagtagcgagggcaaaacttacgaggacgattcccccgaatggtttaaagaggacaacgctgtgcagccgaatagtagttacacgtacgtgtggcacgccactgagaggagtggaccagagtcgccagggagcgcttgccgcgcatgggcatactacagcgcagttaaccctgagaaggatatccacagcggcctaattggccctctcctcatttgccagaaaggaatcctgcataaagacagcaacatgcccatggatatgcgggagttcgtgctcctgttcatgacttttgatgagaaaaagtcttggtactacgagaaaaagtccagaagttcgtggcgactgacctcgagcgagatgaagaaatcacacgaattccatgcaattaacggtatgatctattctctgcccgggctgaagatgtacgagcaagagtgggtcagactgcacctgctaaacattggaggatcgcaggatatacatgttgtgcactttcatgggcagactctgctcgaaaacgggaacaaacagcatcagctgggagtttggcccttactccccggtagtttcaagacattggagatgaaggccagcaaacctggatggtggttgctaaacaccgaagtaggcgaaaatcaaagggcgggaatgcagaccccattcctcataatggatagagattgtagaatgcccatgggtctgagtactggaataattagcgattctcagatcaaagccagtgagttcttaggctactgggagccaagactggcacggcttaataacgggggaagttacaacgcctggtcagtggagaaactggctgcagaatttgcatctaaaccttggattcaggtggatatgcagaaggaagtcattataactggaatccagacacaaggggctaaacattacctcaaaagctgttacacgacggagttctatgtggcctattctagtaaccagataaattggcaaatctttaaagggaattcaacacgaaacgtgatgtactttaacggaaacagtgatgcctccactattaaggagaaccagttcgatccgcctattgtagcccgttacattcgcatcagcccaacccgcgcctacaaccgcccaacactgagattggagttacaaggttgcgaagtgaacgggtgctctacaccgttaggcatggagaatggcaaaatagaaaacaagcagattacggccagcagtttcaagaaatcttggtggggcgattactgggaaccatttcgagcaagactaaacgctcaggggcgggtgaatgcatggcaagctaaggcgaataataacaagcagtggctggaaatagatctgttgaaaatcaagaagatcaccgctattatcacccaggggtgcaagagtctgtccagcgaaatgtacgtgaagagctacactatacactattcagaacagggggtagaatggaagccataccgtctaaaatcttctatggtggataagatttttgagggaaatacaaacaccaaaggtcatgtgaagaatttctttaacccaccaataataagccgtttcattagagtgataccaaaaacatggaatcagagcatagcgctgcgattggaactatttggatgcgacatctac

SEQ ID NO: 9053 - DNA, 6672 bp, synthetic construct
  misc_feature 1..6672: note = source = /note="Description of Artificial Sequence: Synthetic coding sequence"
  source 1..6672: mol_type = other DNA
atgtttccgggctgccctcgcctgtgggtgctggtcgtcctgggaacctcgtgggtgggatggggttcccagggaactgaagcggctcagctgcggcagttctacgtggcagcccagggaatctcgtggtcatatagaccggaacctaccaactcgtccctcaatctgtccgtgacttccttcaagaaaatcgtgtaccgcgagtatgagccgtactttaagaaggaaaaacctcagtccaccatcagtggactgctgggacccactctgtacgctgaagtgggtgacatcatcaaggtgcatttcaaaaacaaggccgacaagcccctgtcaattcatcctcaaggcattcggtactccaagctctccgaaggtgcctcatacctggaccacacgttcccggccgagaagatggatgacgcagtcgcgcccgggagagagtacacctatgaatggtccatctcggaagattcgggacccacccatgacgatccgccgtgtctgactcatatctactacagccacgagaacctgatcgaagatttcaactccggactgatagggccacttttgatatgcaagaagggcaccctcacggaagggggcacccagaaaactttcgataagcaaatcgttctgcttttcgccgtctttgacgagagcaagtcgtggagtcaatcgtcgtcccttatgtatactgtcaacggatatgtaaatggaaccatgccggacattaccgtctgtgcccatgaccatatctcctggcacctgctgggaatgtcctcagggcctgaattgttctcgattcactttaacggccaggtcctggaacaaaaccatcacaaagtcagcgccatcactctggtgtcggctacgagcaccactgccaatatgactgtgggacccgaaggaaaatggattatctcctcgctcactccgaagcacctgcaagcaggtatgcaggcgtacatcgacatcaagaattgcccaaagaaaacgcggaacctcaagaagatcacccgcgaacaacggagacacatgaagcgctgggagtactttattgctgccgaggaggttatctgggactacgccccagtcatcccggctaacatggataagaagtatcggtcacagcaccttgacaacttctccaaccagatcggcaagcactacaagaaggtgatgtacactcaatacgaagatgaatcgttcaccaaacacaccgtgaatccaaatatgaaggaggatggaatcctcggccccatcatccgcgcccaggtccgcgataccctgaaaattgtgttcaagaacatggcctcgcggccttactccatctacccacacggggtgacgttttcaccgtacgaggacgaagtcaattcgtccttcacttccggccgcaataacaccatgattagagccgtgcaacctggagagacttatacttacaagtggaacatcctggagttcgacgaaccaaccgaaaacgatgcccagtgcctgactaggccgtactactcggatgtggacattatgcgcgacatcgcatcaggacttattggcttgctgctgatatgcaaatcgcggtcgctggatagacggggaatccagcgggcggcagatatcgaacaacaggccgttttcgccgtgttcgatgaaaacaagtcctggtacttggaagataacatcaacaagttctgcgaaaacccggacgaagttaaaagagacgacccgaaattctacgagagcaacataatgtcgacgattaatggatacgtcccagagtcgatcaccaccctgggattttgctttgatgacaccgtgcagtggcacttctgtagcgtcggaacccagaatgagattctgaccatccatttcaccgggcactcattcatctacggaaaacgacatgaagatacgctgactctgttcccgatgcggggagaatcggtgaccgtgaccatggacaacgtgggcacctggatgctgacctccatgaactcgtccccgaggagcaaaaagctgagactgaagttccgcgacgtgaagtgcatcccggacgacgacgaggactcctacgagatcttcgagccgcccgagtccaccgtgatggcgaccaggaagatgcatgatagactcgaaccggaggacgaagaatccgatgcggactacgactaccagaaccggcttgcagccgccctgggaatccggtcgttccgcaactctagcctcaaccaggaggaggaagaattcaacctgactgcgctcgctctggagaacggaactgaatttgtgagctcgaacacggatatcatcgtgggatcgaattactcctctccgtctaacatctcgaagtttactgtcaacaatttggctgagccgcagaaggcaccttcccaccagcaagcaaccactgcgggaagcccactgagacacctcatcggaaagaacagcgtgctgaattcgtctactgctgagcatagctccccgtacagcgaggatcctatcgaggacccacttcaaccggacgtcaccggcatccgtctcttgtccctgggagctggcgaattcaagtcgcaggaacacgcgaagcacaagggacccaaggtcgaacgcgatcaagcggcaaagcaccgcttctcttggatgaagctcctggcgcacaaggtgggtcggcacctctcgcaggacaccggcagcccgagcggaatgaggccatgggaagatctcccgagccaagacacgggatcaccgtcccgcatgcgcccatggaaagaccccccgtcagatctcctcctgctgaaacaatcgaacagtagtaagatcctcgtgggacgatggcacctcgcctccgaaaagggaagctacgagatcatccaagatactgatgaggacacggcggtgaacaactggttgatctccccccagaacgcgtcccgcgcctggggggaatcaacgccgctggcaaacaaacctggaaaacaatcaggacaccctaagttcccacgcgtgcggcacaagtcgctccaggtgagacaggacggcggaaagagtcgcttgaaaaagagtcagttcctgatcaaaaccagaaagaagaaaaaagaaaagcacacgcatcatgcgccgctgagtccgcggacctttcatcctctcagatccgaagcatacaacacctttagcgagagacgcctgaaacattcacttgtgttgcacaagtcaaatgagacttcgctgccaaccgacctgaatcagaccctgccgtctatggacttcggatggatcgcttcccttccagaccacaaccagaattcgtcgaatgacactggacaagcgagctgcccgcccggcttgtaccagaccgtcccaccagaggagcattaccaaaccttccccattcaggatccggatcagatgcactcgacgtcggatccgagccaccgctcgagcagcccggaactcagcgagatgctggaatacgaccggtcgcacaagtcattcccaaccgacatcagccagatgtcaccgtcgtcagaacatgaggtctggcagacggtgatctcacccgacctctcgcaagtaaccctctcgccagagctctcgcaaacgaacctctcacctgacctgtcgcatactactttgtcgccggaacttattcaaagaaacctttcgccggccctgggacagatgcctatctccccggatctgagccacaccaccctcagccctgacctctctcacactaccttgtcgctggatctgtcacagactaatctctcgcccgaactgagccagactaacttgtcgccagcgttgggtcaaatgcccctgtccccagacctctcgcataccacgctttcactcgacttttcacagaccaacctgtcgccagaactctcacacatgactctgagcccggaactgagccaaaccaacctgagcccggctttggggcaaatgccgatctcaccggacctttcccacactactttgtctctggactttagccaaacgaatctgtcgccagagttgtcccagactaacctttcacctgcgctcgggcagatgcccttgtcgcccgatccctcgcacacgaccctctcactcgatctgtcccaaaccaatctctccccggagctgtcccaaactaatctgagcccagatctgagcgagatgcctctcttcgccgatctgagccagatacctctcactcctgaccttgatcaaatgaccctgtccccggatttgggggaaaccgatctttcaccaaacttcggccaaatgtccctgtcgccggacctcagccaggttaccttgtcgccagacatctcagacaccaccctcctcccagacctgtcccaaatcagccctccaccagatctcgatcagatcttctacccctctgagtcctcccagtcgctcctgctgcaggagttcaatgaatccttcccttacccagatttgggccagatgccctcaccatcgagcccgacgttgaacgacaccttcctctcgaaagagttcaacccactggtcatcgtggggctgtcgaaggacgggaccgactatatcgagatcatcccgaaagaagaggtccagtcatccgaggacgactatgcggagatagactacgtcccatacgacgacccgtataagactgacgtgcggactaacatcaatagctcccgagatcctgataacatagccgcatggtaccttcgcagcaacaacggtaaccggaggaattactacatcgcagcagaagaaatctcgtgggactactcggaatttgtccaacgtgaaactgatatcgaggactccgacgacatcccggaagatactacttacaaaaaggtggtgttcagaaagtacctggacagcacttttactaagcgggatccgaggggagagtacgaagaacatctcggaatcctgggccctatcattcgggcggaagtggatgatgtgatccaggtccgctttaagaacctcgcatcccgaccgtactcgcttcatgcccacggcctgtcgtacgaaaaatcttcggaaggtaagacttacgaagatgattcaccggaatggttcaaggaagataatgcggtccaacctaattcctcatacacttacgtgtggcatgcgaccgagcggtcgggaccggagtcaccaggcagcgcctgccgcgcttgggcgtactactccgctgtgaaccctgagaaggatatccatagcggtctgatcggaccactgctgatctgtcaaaaaggtatcctccacaaagattcgaacatgccgatggacatgcgggaatttgttctgctgttcatgacgttcgacgaaaagaaatcatggtactacgagaagaagtcacgcagcagctggcgcctgacttcgtcggaaatgaagaagagccacgagttccatgccataaatggaatgatctactcactgccaggactgaaaatgtatgagcaagaatgggtgaggctccaccttctgaatatcggggggtcccaggacattcacgtggtgcatttccacggccaaacgctgctcgaaaatggaaacaagcagcatcaactgggagtgtggcctctgcttcctggatcgttcaagactctcgaaatgaaggcgtccaagcccgggtggtggcttctgaacaccgaggtcggcgaaaaccagcgcgcaggcatgcagaccccgttcctgatcatggaccgtgactgcaggatgccgatgggactgtcaactggaatcatcagcgattcccagatcaaggcctcggaattcctcggctactgggaaccgcgcttggcccgcttgaataatggtggaagctacaatgcttggtcggttgaaaagctggccgctgaatttgcatcaaagccgtggatccaagtcgatatgcagaaggaagtgattatcactggtattcagacccagggcgccaaacactacctgaagagctgctacaccaccgaattctacgtggcttactccagcaaccagatcaactggcagatcttcaagggaaactcgacccgcaatgtcatgtacttcaacggaaattcggacgccagcaccatcaaagagaatcaattcgacccgcccatcgtggcccgctacatccgaatctccccgacccgcgcatacaatcggccgactctccggcttgaattgcaggggtgtgaggttaatgggtgctctaccccactgggcatggagaatggcaagatcgaaaacaagcaaatcactgcttcctcattcaaaaagtcctggtggggggattattgggagccatttcgggcacgcctgaacgcccagggtcgagtgaacgcctggcaggcaaaggcaaacaataacaaacagtggttggaaatcgacctgctgaagataaagaagatcactgcgatcattactcagggatgtaagtccctttcgtcagagatgtatgtgaagtcatacaccattcattactccgaacagggtgtggagtggaagccgtacagactcaagtcgtcaatggtggacaagatttttgagggtaacaccaataccaaaggacatgtgaagaacttcttcaaccctcccattatcagccgcttcatcagagtgatcccgaaaacgtggaaccagtccatagctctccgcctggaattgtttggatgcgacatctat

SEQ ID NO: 9054 - DNA, 6672 bp, synthetic construct
  misc_feature 1..6672: note = source = /note="Description of Artificial Sequence: Synthetic coding sequence"
  source 1..6672: mol_type = other DNA
atgtttcccggatgccctcgtttgtgggttcttgtggtgctgggtacatcatgggtcggatggggaagccagggtactgaagccgctcagttgcgtcagttttacgtggctgctcagggcatcagctggtcataccgccccgaacccaccaacagctcattgaatctctctgtgacttcattcaaaaagatcgtctatagggaatatgaaccttactttaagaaagaaaaacctcaatctactatttctggactgctgggtccaacactttacgctgaggtgggagacatcattaaggttcatttcaagaataaggctgataagccactcagtatccaccctcagggcatcagatattctaagctctcagagggagcttcctacctcgatcatacttttccagcagaaaaaatggatgatgccgtggctccaggaagggaatacacatatgaatggtcaattagcgaagattcaggccctacacacgacgatcctccttgcctcacacatatttactactctcatgagaatctgattgaggattttaactccggattgatcggccctctccttatttgcaagaagggtaccttgactgaaggtggaacccaaaagactttcgacaaacagatcgtgctgctgtttgccgttttcgacgagagtaaaagctggtcacagtcttcctcactcatgtacaccgtgaatggttatgtgaacggaaccatgcctgacatcactgtatgcgcccatgatcatatatcctggcacttgttgggtatgtcctccggaccagaactgttctcaatccacttcaacggtcaagtactcgagcagaaccaccataaggtcagtgctatcactctggtgtccgccacttccaccacagcaaacatgacagtcggcccagaaggaaagtggattatcagctccctgacaccaaaacatctccaggccggaatgcaggcctacatcgacatcaagaactgcccaaagaagacacgcaacctgaagaagatcacaagggagcaaaggaggcacatgaagcgctgggagtacttcatcgctgccgaggaagtcatttgggactatgcccccgtgatcccagccaatatggacaagaagtaccgtagtcagcacctggataacttctccaatcagatcggaaagcactacaagaaggtgatgtacacccaatacgaggatgagagctttacaaaacatacagtgaacccaaacatgaaggaagatggaatactcggtccaattataagagctcaggtgagggataccctcaagattgttttcaagaatatggcttccaggccctactctatttatcctcatggagtgacttttagcccctacgaagacgaggtcaattcctccttcaccagtggccgcaacaacaccatgataagggcagtccagcctggagagacatacacttataagtggaatattttggagtttgatgagccaacagaaaatgacgcacagtgtttgacccgtccatattactctgatgttgacattatgagagatatcgcctctggactgatcggccttcttctgatctgcaagtccaggtccttggacagacgcggcatacagcgtgctgctgatatcgagcagcaggctgtgtttgctgtcttcgacgaaaataaatcatggtatctcgaagacaacatcaacaaattctgcgagaaccccgatgaagtgaagcgcgatgatcctaaattctacgagtccaacatcatgtcaaccatcaatggatacgtgcccgagagcatcactacactcggattttgttttgatgataccgttcagtggcacttctgcagtgtaggtacacagaacgagatcctcactatccatttcacaggacactcttttatttatggaaagcgccatgaagatacactgaccctgtttcctatgaggggagaaagtgtaacagttaccatggacaatgtaggcacatggatgcttaccagcatgaactcttccccacgttccaaaaagctccgtttgaagttcagggacgtgaagtgcatccccgacgacgatgaggacagctacgagattttcgaaccccccgagtctactgttatggccactaggaaaatgcacgaccgtctcgagcctgaggatgaggagtctgacgcagactatgactaccagaatcgtctggcagccgctctgggaattcgttcatttaggaattcctctctgaaccaagaggaagaagagttcaatctgacagctctggctttggaaaacggtaccgaattcgtatcaagcaacaccgacataatcgtgggaagtaactacagctctcccagcaacatttccaaattcacagtgaataacctggccgagccacagaaggccccaagccatcagcaggccaccaccgccggctccccccttcgtcacctgatcggcaagaacagcgtactgaactcttctacagccgagcacagttccccttactctgaggatcctattgaagatcccctgcagcccgacgtgaccggtatcagattgttgtccctgggcgctggagagtttaagagtcaggaacacgccaaacacaagggacccaaggtggagcgtgaccaagcagccaagcatcgcttcagttggatgaaactgttggcccacaaggttggcaggcatctgtctcaggatacaggttccccttcaggaatgagaccctgggaggacctgccttcacaagacactggaagtccctccaggatgcgcccctggaaagaccccccttctgatctgttgctccttaagcagtcaaactcttccaagattctggtgggccgttggcacctcgcttctgaaaagggctcctatgaaattatccaggatacagatgaggacaccgccgttaacaattggctgatctctccccagaatgccagcagagcctggggtgaatccaccccacttgccaacaaacctggcaaacagtcaggtcaccccaaattcccacgtgtaaggcacaagagtttgcaagtccgccaggacggaggcaaaagtagacttaagaaaagtcagtttttgatcaagacaaggaagaagaagaaggaaaagcatacacatcacgccccactgagccctaggactttccaccccttgaggtctgaggcatacaacaccttttccgaaagaaggctcaagcatagcctggtcttgcataagtcaaacgagaccagtctgcctactgatctgaaccaaaccttgccaagcatggatttcggatggatcgcatctctccctgaccataatcagaatagcagtaacgacaccggtcaggcatcttgtcctcctggcctgtaccagaccgtcccacccgaagagcattaccagaccttcccaatccaggacccagaccagatgcactccacctccgacccctctcaccgcagttcatcacccgaactgtctgagatgctggaatatgataggtcacacaagagctttcctaccgacatttctcaaatgtcccccagctctgagcatgaggtatggcagaccgtaatatctcctgacctcagtcaggttaccttgtcacccgagctttcccagactaatctgagtccagatctgtctcacacaacactgtccccagaactgattcagaggaatctttccccagctcttggtcaaatgcccatctctccagacttgagccacacaaccctctcccctgatctctcacacacaactctgagtctggatctctcacagactaatctcagccccgagctgtctcagacaaacctgtcacctgctctgggccagatgcccctctcaccagacctcagccacaccactctctccttggatttttctcagaccaacctctcacccgaactgagccatatgacactgtctcctgagttgagtcagaccaacctctcacctgccttgggacaaatgccaatctctcctgatcttagtcatacaacccttagccttgacttttcacagacaaatctgtctccagagctgtcccagaccaacttgagccctgctctgggacaaatgcccctttccccagatccaagtcatactacactcagcctcgatctgagccagaccaacctgtcccctgagctgtcacagactaacttgtctcctgatctgtccgagatgccacttttcgcagacctctcacaaatcccactcacccccgatctggatcagatgaccttgtcccccgatctgggtgagaccgatctgtcacccaactttggccagatgtctctctcccccgatctgagccaggtaaccctgagcccagacatctccgacaccaccttgctcccagacctgtctcagatctcacctcccccagatctggatcagatcttttatccttccgaatccagtcaatccttgcttcttcaggaattcaacgagagctttccataccctgacttgggccagatgcctagcccctcttcacccactctgaatgacactttcctttccaaggaattcaatccccttgtgatagttggtctgtcaaaagatggaaccgattatatagagattatccccaaggaagaagttcaatcctcagaagacgattatgcagagatcgattatgttccctacgatgatccctacaaaaccgatgttcgcaccaatatcaattccagcagagatcctgacaacatcgccgcttggtatctgcgttcaaacaatggtaaccgccgcaattactacattgccgcagaggagatttcatgggactactccgagtttgtacaacgcgagacagacattgaggactccgatgacatccctgaggacacaacttacaagaaggtagtattcagaaagtacctggactcaacattcaccaaaagggatccccgcggtgaatatgaggagcacctgggtatcttgggtcctattatccgcgctgaggtggatgatgtgatccaggtcaggttcaagaatcttgcctctcgtccttattcactgcatgctcacggtttgtcctatgagaaatcttccgaaggaaagacttacgaggatgacagtcctgagtggttcaaggaggacaacgccgtacaacccaattcctcctatacctatgtttggcatgccactgagcgctctggtcctgagagccctggttctgcatgtcgtgcatgggcttattacagcgctgtgaacccagagaaggacattcacagcggcctcatcggacctctcctcatctgccagaagggcatccttcacaaggattcaaacatgcccatggatatgcgcgagttcgtcctcttgttcatgacttttgacgaaaagaagagctggtactacgagaagaaatcaagaagctcctggcgcctcacttcctccgagatgaagaaatcccacgagttccacgctatcaatggaatgatatactcactgcctggtcttaagatgtacgagcaggagtgggtgagattgcatttgctcaacatcggtggttctcaggacatccatgttgtccactttcatggccaaactctgcttgagaatggtaataagcagcaccagctgggtgtgtggccactgctgccaggtagctttaagactctcgagatgaaggcttcaaaacctggttggtggctcctcaacactgaggtcggtgaaaaccagcgcgccggaatgcaaacccccttcctcatcatggacagagactgccgtatgccaatgggcctgtcaaccggaatcatcagcgacagccaaataaaagcatccgagttcctgggctactgggaacctcgcttggccagactcaacaacggaggatcatataacgcttggagcgttgagaagttggcagctgaattcgcatcaaaaccttggatacaagtagacatgcaaaaagaggtgataatcaccggaatacaaacacagggagctaagcactacctcaagtcttgctacaccacagaattttacgtggcatattccagtaaccagataaattggcagattttcaagggaaactccactcgtaacgttatgtacttcaatggaaactctgacgcctcaacaattaaggagaatcaattcgaccctccaattgtagcaaggtatattaggattagtcctaccagagcatacaacagacccacacttagactcgaattgcagggttgcgaggttaacggatgttcaactcctctgggaatggaaaacggaaaaatcgagaataagcaaatcacagcctcctcatttaagaagtcttggtggggagactactgggagccctttagggcccgccttaacgcccagggtagggtgaatgcatggcaagccaaggcaaacaacaacaagcaatggctggagatcgaccttcttaagatcaaaaaaatcacagctataattacccagggatgcaaaagtctgagttctgagatgtacgtcaaatcttacactattcactactccgagcaaggagtggagtggaagccttataggctgaaaagttctatggtcgataagatctttgagggtaacacaaacaccaagggtcacgtcaaaaacttcttcaatccccctattattagcaggttcatcagagtgatccccaaaacttggaaccagagcatcgcccttcgccttgaactctttggctgcgatatttac

SEQ ID NO: 9055 - DNA, 6672 bp, synthetic construct
  misc_feature 1..6672: note = source = /note="Description of Artificial Sequence: Synthetic coding sequence"
  source 1..6672: mol_type = other DNA
atgtttcccggctgcccccgcctgtgggtgttggtggtactagggacgagttgggtgggatggggaagccagggcaccgaggccgcacagttgaggcaattctacgtggcagcacagggaataagttggagttatagacctgaacccaccaattcatcactcaacctcagcgtgactagtttcaaaaagattgtgtacagggagtatgagccatatttcaagaaggagaagcctcaatcaactattagcgggttgctgggcccgaccctctacgctgaggttggcgatatcataaaggtccatttcaaaaacaaggctgataagcccctgtccattcatccacagggaatccgctactctaagctctctgagggcgcgtcctatctggaccacaccttcccggctgaaaagatggacgacgcggtggcgccagggcgcgagtacacttatgagtggtccattagcgaagacagtggaccgactcacgatgacccaccctgtctcacacatatctactactctcacgaaaacctgattgaggattttaattcaggactgatcggcccattgctgatttgcaagaagggcacactgaccgaaggaggaacccagaaaacgttcgataagcagatcgtgctgcttttcgcagtgtttgatgagtcaaaaagctggagccagagcagcagcctcatgtacacggtcaacggctatgtgaacggaaccatgcccgatattaccgtttgcgcacacgatcatatctcttggcacctcctaggaatgagcagcgggcccgagctgttttcgatccattttaatggccaggtgctcgagcagaatcaccacaaggtgagtgctattaccctggtgtcggccacaagcacgacagctaatatgaccgtcgggcccgaagggaagtggatcatcagctcacttacccccaaacatctgcaggcggggatgcaagcttatattgacattaaaaactgcccaaagaaaactaggaatcttaaaaaaatcacacgtgaacaacgtagacacatgaagagatgggaatactttattgccgcagaggaggtgatttgggattatgccccggtgatccccgccaatatggataaaaagtaccggagccaacaccttgataacttcagcaaccagatagggaagcattataagaaggttatgtatacccagtacgaggatgaaagtttcacgaagcatactgtcaacccaaatatgaaagaggacggaattctagggcctataattagggcacaggtgcgcgacacgctgaagatcgtttttaagaatatggcctctaggccctactctatatacccacatggcgtgaccttctcaccttacgaggacgaagtcaactcatctttcacctccggaagaaacaacacgatgataagagccgtccagcccggggagacctatacctacaaatggaacatcctggaattcgacgagcccactgaaaatgatgcccagtgcctgacgaggccttattattctgacgtcgatattatgcgggatattgcgagcggcttaatcggactcctgctaatttgcaaatccagaagcctggatcggagaggaattcaacgcgcggcggacattgaacaacaggcggtcttcgcagtttttgacgagaacaagtcttggtaccttgaggataatatcaataagttttgtgaaaatcccgatgaagtcaaaagggatgatcctaagttctacgagtccaatatcatgtccaccatcaacgggtacgtgccagagtcaatcacgacattgggattctgcttcgacgacaccgtgcagtggcacttctgctccgtcggcacccagaacgaaattcttaccatacatttcacagggcattcatttatctacggcaagaggcatgaggataccctgacactgtttccgatgcgaggagagtctgtgactgtaaccatggacaatgtcggcacctggatgctaactagcatgaactcaagtcctcgctcaaagaagctgcggctgaagttcagggatgtgaagtgcatccccgacgacgatgaagattcttacgaaatttttgagccacccgagtccacagtgatggccacacggaagatgcacgataggttagaaccagaggacgaagagagtgacgcagactacgactatcagaataggttggcagcagcattagggataagatcattccgcaactcaagtctgaaccaagaggaggaggagttcaacctgaccgccctcgccctcgagaatggcacagagtttgtgagtagcaacaccgatattatagtaggaagcaattatagctcaccctcaaacatatctaaatttacagtgaacaatctcgcagagccacagaaggccccatcacaccaacaggcaaccactgccggatccccactgcggcaccttataggcaaaaattctgtattaaactccagcactgctgagcactcctctccatatagcgaagatcccatcgaggacccgttgcagcctgatgtgaccggcatcagactgttgagcctcggcgctggagagttcaaatcgcaagaacacgctaaacacaaaggacccaaagtggagcgggaccaggccgcgaagcatcgtttctcatggatgaagctcttggcgcacaaagtggggagacatcttagtcaggacaccggatccccatctggaatgcgtccatgggaggacctcccttctcaagatacggggtccccctctagaatgcggccatggaaagatccaccttcagacctgcttctcctaaagcagagtaactcaagtaaaatactggtcggccgatggcatctagcctctgaaaaggggtcctacgagatcatacaggacacagatgaagacactgccgttaataactggctgatttcacctcagaatgcctccagagcctggggcgaatccaccccacttgccaacaagcccggcaagcagtcgggccatcctaagtttcctcgggtccgccataagagcctccaggtacgacaagatggcggaaagtcacggctgaaaaagagccagtttcttattaaaaccaggaagaagaagaaggagaaacatactcatcacgcacctctgtcacctaggacatttcatcctctgcgctctgaagcatacaatacattctctgagagacgtctgaaacattccttagtgttgcataagagcaacgagaccagtttgcccactgatctcaaccagacgctcccgagcatggactttggatggatcgctagcctgcccgaccacaatcagaattcgagcaatgatacaggacaggcctcttgcccacctggactgtatcaaaccgttccaccagaagagcattatcaaacattcccaattcaagatcccgaccagatgcacagtacctcggatccctcccatcgcagctctagcccagaactgagtgaaatgctggaatacgaccggagtcataaaagcttccctaccgacatttctcagatgtctccatcctcagaacacgaagtatggcaaactgtgataagccctgacctgtcacaggtgacactgtcccctgagttaagtcagacaaatctgtcccccgacctctcgcatactaccttgtcgcctgagctcatacaaagaaatctgagccccgcactggggcagatgcctattagcccagacttatcccataccacactgtcgcctgatctcagccacaccaccttgagtctcgacctgagccaaacgaatctttcacccgagctatctcaaactaatttgtctccagccttggggcagatgccccttagtcccgacctctcccatactaccctgtctttggattttagtcagactaacctctccccagagctctcgcatatgactctcagtccggaactaagtcaaaccaacctgagcccagcccttgggcagatgccaatatccccggacttgtcccataccaccttgagcctcgatttcagtcagaccaacctatcgccagaactgtcccagactaacctctccccggcccttgggcagatgcccctgtctccagacccctcccatactacgctcagtctggacctgtcacagactaatttgtccccagaactttcccaaacaaacctgtctcctgacctttcagaaatgccgttgtttgccgacttgtcccagattcccctgacacctgaccttgatcaaatgaccctcagcccggaccttggcgaaactgacctgtctcccaattttgggcagatgagcctgagccctgacctgtcacaagtcaccctaagtccagatatcagtgataccaccctgctccctgacctgtcccaaatttctccacccccagaccttgaccagatcttttatccttccgaatcttcacagtccctgctgctgcaagagttcaatgagtcttttccttaccccgacctaggccaaatgccaagtccgagttctccaactttgaacgacacctttctgtccaaggaatttaatcctctggttatagttggcctttccaaggacggcaccgattatatcgagattatccctaaagaagaggtccagtcctccgaggatgattacgccgaaatcgactatgtgccgtatgatgacccttataagaccgatgtacgcaccaatattaactccagtagagatccagataatatagccgcttggtacctgagatcaaacaatgggaacagacgcaattattacattgctgccgaagagataagttgggactattcggagttcgttcaacgagaaaccgatatcgaggactcagacgacataccagaagatactacttataagaaagtggtctttcgcaagtatctggactctacattcaccaaaagagaccctcggggagaatatgaagagcatctggggatcctcggccctatcatcagagcagaagtggacgatgtgattcaggtgcggttcaaaaacctggcctctcggccctatagtttacacgcccacggattatcgtatgaaaaatcttctgaggggaaaacttacgaggatgactcccctgagtggttcaaggaggataacgctgtgcaaccaaattcttcatatacatacgtgtggcacgccactgaacggtctggcccagagagtccggggtccgcttgccgcgcatgggcctactacagtgccgtgaaccccgagaaggatattcattctggtcttattgggccactgctcatctgtcagaagggaatcctgcataaggatagcaatatgccaatggacatgcgcgagttcgtacttctgtttatgacctttgacgagaaaaagtcctggtattacgagaagaaaagcagatccagttggcgactgacatcttctgagatgaaaaaaagccacgagtttcacgctatcaacgggatgatttactcgctcccggggctgaaaatgtacgagcaagaatgggtgagactgcacttactgaacattggcggatcacaagatattcacgtggtgcatttccacggccaaacactgcttgaaaatggaaacaagcaacaccagttgggagtgtggccgctgctgccaggtagcttcaaaaccctggagatgaaggcatctaaacccggatggtggctcttgaatacagaggtcggagaaaaccagagggcggggatgcaaacacccttcttgattatggatagagactgtaggatgccgatgggcttaagcacaggcataatcagtgactctcaaatcaaggcctccgagttccttggctattgggagccgaggttagcacggttgaataatggagggtcttacaatgcatggagtgtcgaaaagcttgccgccgaattcgcatcgaaaccatggattcaggttgacatgcagaaggaagtgatcataactggaatccagacacagggcgccaaacactatctgaaatcctgctatacaacagagttttatgtggcctattcaagtaaccagattaactggcagatctttaagggcaattcaacccgtaatgtgatgtattttaacgggaacagcgacgccagtactatcaaagagaaccaatttgatccgccaattgtagcaaggtacatacgcattagccccacccgagcttacaataggcccacactgagactagaactccagggatgtgaggtgaacgggtgtagcactcctttgggtatggaaaatggtaagatcgaaaataaacaaatcaccgctagctcctttaaaaaatcctggtggggcgactactgggaaccatttcgcgctcggctgaatgcccaaggacgcgtcaacgcttggcaggcgaaggctaataataacaagcagtggttagagatagacttacttaagatcaaaaagatcaccgctataattacccaaggctgcaagagtctatcctctgagatgtatgttaaaagttatactatacactatagtgaacagggggtggaatggaaaccatatagattgaagtcctctatggtggacaaaatttttgagggcaatactaatacaaagggacatgtgaagaacttctttaatcctccaatcataagtagattcatccgggttattcctaaaacctggaaccagagtatcgcactgcgactagaactgtttggctgtgatatctac

SEQ ID NO: 9056 - DNA, 6672 bp, synthetic construct
  misc_feature 1..6672: note = source = /note="Description of Artificial Sequence: Synthetic coding sequence"
  source 1..6672: mol_type = other DNA
atgtttcctggatgccctaggctgtgggtgctggttgtgctgggcacaagctgggtcggctgggggtcacaagggaccgaagcagcccagctgagacagttttacgtcgccgcacagggcatttcatggtcctaccggcccgagccaactaatagttctcttaatctctccgtaacttctttcaagaaaattgtttatagggagtatgagccgtactttaagaaggagaaaccgcagtctactatctccgggctgttggggccaaccctctatgctgaggtgggtgacatcattaaggtgcatttcaagaacaaagcggataagcccctgagtatccatccccagggtatccgctattccaagctgagcgaaggcgcatcttacctcgaccacacattccccgccgagaagatggacgatgccgtcgcccctggaagggagtacacctatgaatggagcatatctgaggattctggccctactcatgacgaccctccctgccttacgcatatctactattctcatgaaaatttgatcgaggattttaacagcgggcttatcggccctctgctgatttgcaaaaaaggaacactgacagagggcgggacacagaagacctttgacaagcagattgtgctcctgtttgctgtgttcgacgagtccaagagttggagtcagagtagttccctgatgtatacagtcaacggctacgtgaatgggacaatgcccgacattacagtgtgcgcacacgaccacatcagttggcatcttttggggatgtcaagcggccccgaactcttttccatccacttcaatgggcaggtactggagcagaaccatcacaaagtgtctgctattacgctggtgtccgcaacaagcaccaccgcaaacatgaccgtcgggccggagggtaaatggattataagtagtctcacacccaagcatctgcaggcaggcatgcaagcgtacatcgatattaaaaattgtcccaaaaaaacccgcaacctgaagaagatcacaagggagcagcggcgacacatgaaacgatgggaatacttcatagcagcagaagaagtaatctgggattacgccccagtaatcccagctaacatggataagaaatatcgcagtcagcatctcgacaatttctccaatcagattggcaagcactacaaaaaggttatgtacactcaatatgaggatgagtccttcacgaaacatacggtgaatccaaacatgaaagaggatgggattctgggacccatcattagagcacaggtccgggacaccctgaagatcgtctttaagaatatggcttccaggccttacagcatctaccctcacggagtcacattctccccgtatgaagacgaagtgaatagctccttcacgtcaggcagaaacaatactatgatccgggctgttcagcctggagagacctatacttataaatggaatatccttgaattcgacgaacctaccgagaacgacgcccaatgcctgacccgaccatactattccgacgttgatatcatgagagatattgctagtgggctcatcggtctgctcctgatctgcaagagcagaagcttggaccgccgcgggatacagcgcgcagcggatattgagcaacaggctgtattcgccgtatttgatgagaataagtcctggtacttggaagataacattaacaaattctgcgagaatcctgacgaggtcaaaagagatgaccccaaattctacgagtccaacattatgagcactatcaacggttatgtccctgagtcaattaccacactcggtttttgtttcgatgacacagtccaatggcacttctgctccgtcgggacccagaacgaaatcctgaccatacattttaccggacactccttcatttatggcaagagacatgaggatacgttgacgctgttcccaatgcgaggagaatccgtaacagtaaccatggataatgtcgggacttggatgcttacttcaatgaattcctctccaaggtcaaagaaactgcggctgaagttccgcgatgtcaagtgcattcctgatgacgatgaggattcttatgagatcttcgaaccccctgagagtactgtgatggcgacaaggaaaatgcacgatcggctcgaacccgaagatgaggagtcagacgccgactacgattaccagaacaggcttgcggccgcactggggattagaagcttccggaactctagtcttaatcaggaggaagaagagttcaacctgacagctcttgctctggaaaatggcacagagtttgtgagctccaacacagacataatcgtgggttcaaactattcttcaccttctaacatcagcaagttcactgttaacaacttggccgagccgcagaaggcccccagccaccaacaagcaactactgccggatctccactgcgacacctgatcgggaaaaactccgtgctgaattcctctaccgccgaacattcatctccatacagtgaggaccccattgaggatccattgcaacccgatgtcaccggaattcggttgctctcccttggggccggcgaattcaagagccaggaacacgctaagcataaggggccaaaagtggagcgcgatcaagcagcaaagcatagattcagttggatgaagctgcttgcgcataaggtggggagacacctgtctcaggataccggctctccatcaggcatgagaccatgggaggacctgccttcccaggacactggctcaccttcccggatgagaccttggaaggatcctccttctgatctgctgttgctgaagcagtccaattctagtaagattctcgtggggcggtggcacctggcctctgaaaaaggttcctatgagatcattcaagataccgacgaggatactgcagttaacaactggctcatatcaccccagaacgccagcagggcctggggggaaagtactcccttggcaaataagcctggaaagcagtctggccatcccaagtttccgagggtccgccataaaagcctgcaagtgcggcaggacggcggaaagtcacggctgaagaaatctcagttcctcattaaaaccaggaagaaaaagaaggagaagcatacccaccatgctcccctgagccctcggaccttccatcccctgcgcagcgaggcatataatactttcagcgaaaggagactcaagcactcactcgtgctgcataagtctaatgagacatccctcccgaccgacttgaatcagactctgccctccatggacttcggctggattgcgagcctgccagatcacaatcagaactccagcaacgacaccggccaggcatcctgccctcccggcttgtaccaaaccgtacccccggaggaacactatcagaccttccccatccaggatccagatcagatgcacagcacctcagatccatctcaccggagtagtagccccgaactctccgaaatgcttgaatacgacagaagccacaagagcttcccaaccgacattagccagatgagccccagctctgagcacgaagtatggcaaactgtcatttccccggatttgtcccaggtgactctgtcccctgagctgtcccagaccaatttgtcccctgatctttcccacacaacccttagccccgagctgatccagaggaacctgtctccggccctcggccagatgccaatttctccagatctgtcacacaccaccctgagccccgacttgtctcacactactctgagcctggacctgtcccagactaatcttagccctgaactgtcccagactaatttgagtcccgccttgggacaaatgcccttgtcccctgatctgagtcacaccactttgagtcttgatttctcacagacaaacctgagcccagagctgtcccacatgacactgtctccagagctgtcccaaacaaacctttcccctgccttggggcaaatgcccatctccccagacctttcacacaccacactgtctctggacttttctcagaccaacctgagcccagaactctcacagactaatctgtctcctgctcttgggcagatgcccctttctccagatccatcccacaccactttgtccctggacctctcccagacaaacctcagtcccgagctttctcagacaaatctttcacccgacctgagcgaaatgcctctcttcgctgacctgtctcagatcccactcactcctgacctggaccaaatgaccctgagcccagatctgggagagaccgacctttccccgaattttggccagatgagtttgagccccgatctcagccaggtcaccctgagccctgacatctccgataccactttgctgcccgatctgtctcagatctcccctcccccagatcttgatcagatcttctatccgtccgagtcttcacagtctctgctcctgcaggagtttaatgaatcttttccataccccgatctcgggcagatgccgagccctagttctccaactctcaatgacacattccttagcaaggagtttaatccgctcgttatagtcggcctgagtaaggatggcacagactacatcgaaatcatccccaaggaggaggtgcagtcctctgaagacgactacgcggagatcgattatgtgccctacgatgacccttacaagaccgacgtgcgcaccaacatcaactcatcacgcgaccctgacaacatcgcagcgtggtacctgagatccaacaacggtaaccggcgcaattattatatcgccgcggaagagatttcttgggattacagcgagttcgttcagagggaaactgatatagaagactcagacgacattccagaggataccacttacaaaaaggtggtgtttagaaagtatcttgactcaacattcaccaagagggatccccgcggtgagtacgaggagcaccttggcatactgggccctattataagggccgaagttgatgatgtcatccaggttaggttcaagaacttggcctctagaccgtatagtctgcacgcgcacggactgtcctacgagaaatctagcgaagggaagacctacgaagacgattcacctgagtggtttaaggaagataatgccgtacagcctaatagtagttacacctatgtttggcatgccactgagagatctggcccagaaagtcccggttccgcctgtcgggcatgggcgtactacagtgccgtcaatcccgagaaggatatacatagcgggctgattggcccgctgctcatctgtcagaagggcatcctgcataaggacagcaacatgccaatggacatgagggaatttgtgcttctcttcatgactttcgacgaaaaaaaatcctggtattatgagaaaaaatccagaagctcttggcggctcacttcatcagagatgaagaagtctcacgaattccacgccataaatggaatgatttactctcttccgggcctgaaaatgtacgagcaggagtgggtgcggctgcacctcctgaacatagggggatcccaagatatacatgtggtccatttccacggacaaaccttgttggaaaacgggaataagcaacatcagctgggagtctggccgctgctgcccggctcttttaagaccctcgagatgaaggcttccaaacccgggtggtggctgcttaacacagaagtcggtgagaaccagcgggccggtatgcagactcctttcttgatcatggaccgagattgcagaatgccaatgggtctgagtacagggattatctccgatagccagataaaggcatctgagttcctcggctattgggaaccccggctggccaggctcaataacgggggcagctataatgcttggtcagtggaaaaacttgctgcagagttcgcgagcaagccatggatacaagtggatatgcaaaaggaggtgataatcacagggatccagactcaaggagctaagcactatctgaagagctgttataccaccgagttctatgtggcctacagctccaatcagatcaactggcagatttttaagggtaattccacccgaaatgtaatgtattttaacggcaatagcgacgcttccacaatcaaagaaaaccaattcgatccaccgattgttgcacgctacattagaatctcccccacaagagcctataataggccgacccttcgactggaactccaaggctgcgaagtcaacggttgctccacgccactcggaatggagaacgggaaaatcgagaacaagcagattaccgcaagctcatttaaaaagtcttggtggggagattactgggagccattccgggcccggctgaatgcacaaggtagagtcaatgcctggcaagccaaagcaaataacaacaaacagtggctggagatcgatctgctcaagataaagaagatcaccgcgataatcacacagggctgtaagtctttgtccagtgaaatgtacgtcaagagctacactattcattatagcgagcaaggggtggagtggaagccctatagactcaaatcaagcatggtcgacaagatcttcgaagggaacacaaataccaagggccacgtgaaaaatttcttcaatccccctattatttctaggttcattagagtgattccgaaaacttggaaccagagcatcgcactgaggctggagcttttcggctgcgacatctat

SEQ ID NO: 9057 - DNA, 6672 bp, synthetic construct
  misc_feature 1..6672: note = source = /note="Description of Artificial Sequence: Synthetic coding sequence"
  source 1..6672: mol_type = other DNA
atgttccctggatgtccacgattatgggtattggttgtgctgggcaccagttgggttggatggggatcccaaggtacagaggctgcccaattaaggcaattctatgtagctgcccaaggaatctcctggtcatatagaccagagcctactaattctagcctgaatttatccgtaacatcttttaagaagatagtttatagggaatatgaaccttacttcaaaaaggaaaagcctcagagcactatttcgggtcttcttgggccgacgctttacgctgaagtaggtgacataatcaaggttcatttcaaaaataaagccgacaagccattgtctattcatccacaaggtatccggtatagcaaacttagcgagggtgctagttatctagatcatacttttccagcagagaaaatggatgatgcagttgctccaggccgtgaatatacttacgagtggagtatctctgaggactctgggcctacacatgacgatcctccttgtttaactcacatctattactctcatgagaacttgatcgaagacttcaattcaggattaattggaccattactcatttgtaagaagggcactttgacagaagggggtacccaaaagacttttgacaagcaaatagttcttcttttcgccgtatttgacgagtctaaatcatggtctcaatcatcctcattaatgtacaccgtcaatggttacgtaaacggcactatgcctgacattacagtttgtgctcatgatcatatcagctggcatcttctcggaatgtcctctggtcccgaattgttttccatccactttaatgggcaggttttggagcaaaaccaccacaaggtgtcggcgatcacgctggtatctgccacctccactaccgcaaatatgaccgttgggcctgagggaaaatggattatcagctctttgactccaaaacacttacaagctgggatgcaggcttacatcgatatcaagaattgtcccaaaaaaactcgtaatttaaaaaagattactagagagcagagaaggcacatgaagaggtgggaatactttatagcagcggaagaggtaatctgggattacgctccagttattcccgctaacatggataaaaagtatcgttctcagcacctcgacaatttcagcaaccaaattggaaagcattataagaaggttatgtatactcaatacgaggatgaatctttcactaaacataccgttaacccgaatatgaaagaggatggtatattaggtccaattatcagagcgcaggtccgtgatacccttaaaatagttttcaaaaacatggcatcgaggccatactccatttatcctcatggcgtgacatttagtccgtatgaggatgaggtgaattcttcttttacgtctggccgaaataacactatgatacgagctgttcaacctggcgaaacatacacttataaatggaatatcttggaatttgatgaacctactgagaacgacgctcaatgccttacaaggccctattactccgatgttgatattatgagagatatcgcatcgggcttgatcggcttactactgatctgtaagagcagatcactagataggcgcggcattcaacgcgctgcagatatcgaacagcaagctgtattcgccgtctttgacgaaaacaagtcgtggtatctcgaggataacattaataagttttgtgaaaaccctgatgaagttaaacgtgatgaccctaaattttacgaatctaacattatgagcactataaatgggtatgtcccagagtcaattaccaccttaggattctgcttcgacgacaccgtacagtggcatttctgcagcgttggtacccagaacgagattctcactatacatttcactggccattcattcatctacggtaaaaggcatgaagataccttaactcttttccccatgcgaggggaatctgttactgtgactatggataatgttggcacttggatgttgacatctatgaactcatctcccaggagcaagaaacttagacttaaattccgtgacgttaagtgtattccagatgatgacgaggactcctatgaaattttcgagccacccgagtctacagtcatggctacacggaaaatgcatgatcgattagagccagaagatgaggaatcagatgctgattatgattatcagaacagattagccgctgccctaggcattcgtagtttccgaaactcttcgctcaaccaagaggaagaggagttcaacctgacggcgttagctctagagaacggaacggagtttgtttcttccaatacagatatcattgtcgggtccaactacagctctccatcaaacatttctaagttcaccgttaacaaccttgccgagcctcagaaagcaccctcacatcaacaggcaaccacggctggttcccccttgaggcatcttatcggaaaaaactcggtattaaattcttccactgctgagcattcatcgccttattccgaagacccgattgaggatcctcttcaacctgatgtaacaggcatccgcttattaagtttaggggctggagagtttaagtctcaggaacacgccaagcataaaggaccaaaggttgaacgggatcaagctgctaaacaccggttctcttggatgaaattgttggcccataaggtggggagacatctatcgcaggatacaggttctccgagcgggatgaggccttgggaggatttgccatcgcaggatactggcagcccctctcgtatgagaccatggaaagatccaccctctgaccttttgctactcaaacaaagtaacagttccaaaatcctcgtggggagatggcatcttgcttcagaaaaggggtcttacgagatcattcaggataccgatgaagatacagctgtaaataactggctaatctcaccccaaaatgccagtagggcctggggtgagagcactccacttgcgaataaacccgggaaacagtcaggacatcctaaatttccaagggttcgtcataagagccttcaggttaggcaagacggaggaaagagtcgtctgaaaaaatcacaatttctgatcaaaaccaggaagaaaaaaaaagagaaacatacacatcatgcgccattgtcacctagaactttccaccctctccgcagtgaggcttataatactttctcagagcgacgtcttaagcattctcttgttttgcacaagtcaaatgagaccagccttcccactgatctgaatcagacattgccatctatggattttggatggattgcttctcttccagaccataaccagaattcctcaaacgatacagggcaagcatcctgtcctcctggtctctaccagacagttccaccagaggagcattatcagacattcccaatccaagatcccgatcagatgcacagcacttccgacccatcgcatcgctcatccagccctgagctctcagaaatgttggaatatgacagatctcataaatcctttcccaccgacatatcacaaatgtcaccttccagcgaacatgaagtatggcagaccgttatcagcccggacctatctcaggtaacattgagccccgagctatcccaaactaacctttctcctgatttgtctcacaccactttgagtcccgaacttatccaaagaaatctaagccctgcccttggtcaaatgcccatctctccagacttgtcccatacgaccctctctccagatctcagtcatacaactttatctctggatctctctcagacaaatcttagcccagagttgagtcaaactaaccttagcccggcacttgggcagatgcctcttagccccgatctgtcacacactaccctttcgcttgacttctcccagactaatctatctccggagctttcgcatatgacactttcgccggagctcagccagacgaacctttctcctgctctgggccagatgcctatttctcctgacctctcgcacacaaccttgtctctcgacttctctcaaaccaacttgtctcctgaactgagtcaaactaatttgtctcctgcgcttggtcaaatgcctttgtccccagatcctagtcataccactttgagtctcgatttatctcagactaatctaagcccagagctatctcaaacgaacttatctcctgatctctccgagatgccattatttgcagatttgagtcaaattccactgacgccagacttggatcaaatgaccctgtctcccgatttgggagaaaccgatctttcaccaaattttggacaaatgagtctttctccagacttatcccaggttactttatcacctgatatttcggatacaacactacttccagacctttctcaaataagtccgccaccagatctggatcaaattttctatcctagcgaatcaagtcagtctttacttcttcaggagttcaatgaaagttttccttatcccgatttaggtcagatgcctagcccatcttcgccaactctgaacgatacattcctgtctaaggagtttaacccactggttatcgtcggtctctccaaagacggtacggattacatcgagatcattcccaaagaggaggttcaatcctcagaagacgactatgctgagattgactatgtgccttacgatgacccatataagaccgacgttagaactaacatcaacagctctcgggaccccgataacatcgcagcatggtacttgaggtcaaataacggtaatcgcagaaattactacatagctgctgaggagatttcttgggactactcagagtttgttcaaagggagactgatatcgaagactcggatgacattccagaagatactacctacaagaaagtggttttccgtaagtatcttgattccactttcactaaacgagacccaaggggcgaatatgaggaacatcttggtattcttgggcctattattcgtgcagaagtggatgatgtaatccaagtgagatttaagaacctggctagtagaccatattctcttcacgcacatggtctcagttacgagaaaagctctgaaggaaagacatatgaggatgattcacccgaatggtttaaggaagataacgctgtccagccgaactcttcctatacttatgtctggcacgctaccgaaaggtccgggccagagtcccctggatctgcatgccgtgcttgggcatattattctgccgttaatcctgagaaagatatccactctggacttatcggcccattattgatctgtcaaaaaggtattcttcataaggacagtaacatgcctatggatatgagagagttcgtgttgttgtttatgacctttgatgagaaaaaatcatggtactacgagaaaaagagtaggtctagttggcgtttgacctcttccgaaatgaagaagtcccacgaatttcatgcgatcaacggtatgatatactctttgccaggtttgaaaatgtacgagcaagaatgggtgagacttcatcttttgaacattggaggttctcaagatattcatgttgttcacttccatgggcaaacactcctggaaaatggtaacaagcagcatcagttgggtgtgtggccacttttgcccggatcttttaaaacccttgagatgaaagcctctaagcctggctggtggttgttgaatactgaagtgggagagaaccagagagcaggaatgcaaactccattccttattatggatcgtgattgtagaatgccaatgggcttatctacaggtataatttcagatagtcagatcaaagcctcggagtttctaggctactgggaacccagacttgccaggctgaataatggaggctcttataatgcttggagtgttgagaagttggccgctgagttcgctagtaaaccctggatacaggtagatatgcagaaggaggtaattatcaccggcattcagactcaaggagccaagcattacctgaaatcgtgttacaccacagaattttacgttgcttatagttccaatcagatcaactggcagattttcaaggggaattctactcggaatgtgatgtactttaatggaaattccgatgccagcactattaaggagaaccaatttgatccaccgattgttgctagatacattcggatttctcccactagagcttataatcgaccgactcttaggttagagttgcaaggttgcgaggttaatgggtgcagcacacctttaggaatggagaatggtaagatagagaataaacaaatcacagcatcttcatttaagaaaagttggtggggtgattactgggaaccattccgtgctcgtcttaacgcacagggtagggttaatgcatggcaagccaaggccaataataacaagcaatggctcgaaatagatctgcttaaaatcaaaaagataaccgctataataacccagggctgtaagtcgctatctagtgaaatgtacgttaagtcctacactatccactactctgagcagggtgtagagtggaaaccttatagactaaaatcatccatggtcgacaaaatctttgaaggcaacacaaacacaaagggacacgttaaaaacttcttcaatccaccgattatttcccgtttcatcagagtaatcccaaagacctggaaccaatccattgctcttcgtttagaattgttcggttgtgatatctat

SEQ ID NO: 9058 - DNA, 6672 bp, synthetic construct
  misc_feature 1..6672: note = source = /note="Description of Artificial Sequence: Synthetic coding sequence"
  source 1..6672: mol_type = other DNA
atgttccctggatgccctcggctctgggtgctggtggtgctgggaacttcttgggtgggatgggggtcccaggggaccgaagccgctcagctccgccagttctatgtggccgcgcagggcatttcctggtcgtaccgcccagaaccgactaactcgagcctcaacctgtcggtgacttcattcaagaagatcgtgtaccgcgaatacgaaccgtactttaagaaagagaagccgcaatccaccattagcggactgctggggccgaccctctacgcggaggtgggcgacattatcaaggtccacttcaagaacaaggcggacaaaccactgtcgatccacccgcaaggaatccggtatagcaagctgtccgagggagcttcgtacctggatcatacttttcccgctgagaaaatggacgatgccgtcgccccaggtcgggagtacacctacgaatggtccatttcagaagattcgggtccgactcatgacgacccaccatgcctcactcatatctactacagtcacgagaaccttatcgaggacttcaactcgggactcatcggtcctttgctcatctgtaagaagggcaccctgaccgagggaggaactcagaaaacctttgacaaacaaatcgtgctgctgttcgctgtgtttgatgagtcgaaatcgtggtcccagtcgagcagccttatgtacactgtgaacggatacgtcaacggaaccatgccagacatcaccgtgtgtgcccatgaccacatcagctggcacttgctgggaatgtcctcgggaccagagctgttttcgatccacttcaacggccaggtcctggaacagaaccaccacaaggttagcgcgattacgctggtgtcggccacttccactaccgccaacatgaccgtggggccggagggaaagtggatcatctcgagcttgacgccgaagcaccttcaggctgggatgcaggcttacatcgacatcaagaactgccctaaaaagacccggaacctgaaaaagattaccagggaacagcgccggcacatgaaacggtgggaatacttcatcgccgccgaggaggtcatctgggactacgccccggttattcctgcaaacatggacaagaaatatcgcagccagcacctggacaatttctccaatcagatcggaaagcactacaagaaggtcatgtacactcaatacgaggacgagagcttcaccaagcacaccgtgaatccaaatatgaaggaagatggtattctcggcccgatcatccgcgcccaagtgcgggacactctgaaaattgttttcaagaatatggcctcacggccatacagcatctacccgcatggtgtgactttcagcccgtatgaggatgaggtgaactcatcattcacttccggacgaaacaacaccatgatccgcgccgtccaacctggagaaacttacacctacaagtggaacatcctggagttcgatgagccaactgaaaacgacgcgcagtgcctgacccgcccgtactattccgacgtggatatcatgcgagatatcgcgtccggactcatcggactgctgctgatctgtaagtcccggtcgctggaccgtaggggcatccagcgcgcagccgacatcgaacagcaagcggtgttcgccgtctttgacgagaacaaatcttggtatctggaggacaacatcaataagttttgcgagaaccctgatgaggtgaaacgcgacgatcctaagttctacgaatctaacatcatgtcgactatcaacggatacgtgccggagtcaatcactactctgggattctgctttgacgacaccgtgcagtggcacttctgttccgtcggcactcagaatgaaatccttaccatccactttactggtcatagcttcatttacggtaaacgccacgaagataccctcaccctgttccctatgcgcggtgagtccgtcaccgtgaccatggataacgtcggaacctggatgctcaccagcatgaattcgtcaccccgctcgaagaaacttaggcttaagttccgggacgtcaaatgcatcccggatgacgacgaagatagctacgagatttttgaaccaccggaatcgactgtgatggccactcgcaagatgcacgacagacttgaaccggaagatgaggaatcggatgccgactacgactaccagaatagactggctgccgcattgggcattcgctccttccgcaactctagcctgaaccaggaggaagaggaattcaacctcaccgcactggccttggagaatggaaccgaattcgtgtcgagcaacaccgacatcattgttggttccaactactcctcgccatccaatatctcaaagttcaccgtgaataatctggccgagccgcagaaggcaccaagccatcagcaagccaccaccgcgggaagcccacttcggcacctgatcggcaaaaactcggtgcttaattcatctaccgcggaacacagctcaccatactcagaagatccaattgaagatccgctgcaaccggacgttaccggcatccggctgctgtcgcttggtgcgggagagttcaaaagtcaggagcatgccaagcataagggaccgaaagtggaacgggatcaggcggcaaagcaccggttctcctggatgaagctgctggcgcataaggtcgggcggcatttgagccaggacaccggaagccccagcgggatgcgcccctgggaggacctgccttcacaggacactggaagcccatcccggatgcgcccgtggaaggacccaccgagcgacctgctgttgctcaagcagtctaactcgagcaagatcctggtcggcagatggcacttggcctcggagaaaggatcctatgaaatcattcaagacaccgacgaggataccgctgtgaacaattggctgatctccccgcaaaatgcctcgcgggcgtggggcgagagcactccgctggcgaacaagccaggtaagcaatcgggtcacccaaagttcccgagagtgagacataagtcgctccaagtccggcaggacggagggaagtcacgcctcaagaagtcccagttcctcattaagaccagaaagaagaagaaggaaaagcatacccaccacgcccctctgtccccccggaccttccacccgctgagatcggaggcttacaacactttctccgaaaggcggctcaagcattccctggtgctgcataagtccaacgagacgtcactgccgaccgacctcaaccaaactctgccgtccatggactttggatggatcgcttcgctgcccgaccataaccagaactcctcaaacgacaccggacaggcgtcgtgccctccgggactgtatcagactgttccgccagaagaacattaccagacctttcctatccaagacccggaccagatgcactcgaccagcgatccttcccaccgcagctcgagcccggaactgtccgaaatgctggaatacgacagatcacacaagtcgtttccaaccgatatcagtcaaatgtcgccctcttcagagcacgaggtgtggcaaaccgtgatctcccctgatctgtcgcaagtcaccctctcaccggaactgagccaaactaacttgagcccagatctttcccacaccactctgagtcctgagcttatccagcggaaccttagcccagcgctcggacagatgcctatttcgccggacctgtcccacactaccctcagcccggacctctcacacaccactctcagcctggatctctcgcaaactaacctctcccccgagctgtcacaaaccaacctctcaccagctctcggccaaatgccgctctcccccgatctctcacataccactctgagcctcgacttctcccaaaccaacttgtcgcccgaactctcccacatgactctttcaccagaattgtcacagactaatctgtccccggccctcgggcagatgcctatctcgcctgatctgtcacatactactctctcgctcgatttttcgcaaaccaatctttcacctgaactgtcccagactaacctgtccccagcgcttgggcaaatgcctctctcgcctgaccccagccacactactctgtcattggatctgtcccagaccaatttgagccccgaattgtcgcaaactaatctctcgccagatctctcagagatgccccttttcgcggacttgtcgcaaatcccactgaccccggacctggatcagatgaccctctcgcccgacttgggagagactgacctctcaccgaactttggacagatgtcactgtcgcctgacctcagccaagtgaccttgtccccggacatcagtgacacgacgctcctgcccgatctgagccagatctcgcctccacccgatctcgaccaaatcttctatccatccgaatcgtcgcaaagccttttgctccaggagttcaacgaatcctttccctacccagacctgggccaaatgccttcgccgtcgtcaccgactctgaacgataccttcctctcaaaggagttcaaccccttggtgatcgtgggtctttcaaaagacggcaccgactatatagagatcattcccaaggaagaggtgcagtcgtcagaggacgactacgccgaaatcgattacgtcccctacgatgacccttacaaaaccgacgtgcgaacgaatatcaactcctcgcgggacccggacaacatcgctgcctggtacctcagatcgaataacggaaacagacgcaactactacatcgcagcagaagaaatctcgtgggattactccgagttcgtgcagcgggaaaccgatatcgaagattcggatgatattccggaggacaccacgtataagaaagtggtgttccggaaatatctcgacagcactttcaccaagcgcgacccgcgaggagaatatgaagagcatctgggaattctgggaccgattatccgcgccgaagtcgatgacgtgatccaggtgcggttcaagaacctggcgagccgcccatacagcctgcatgcccatggactgagctacgagaaatcatccgaaggcaagacttatgaagatgattcacctgagtggtttaaggaggacaacgccgtgcagccgaactcctcgtacacttacgtctggcatgcgactgagcgctccggaccggaatccccgggatcagcgtgccgggcgtgggcgtactactccgccgttaacccggaaaaagacatccattcaggcctcatcggcccactgctgatttgccagaagggaatcctgcacaaagattccaatatgccgatggacatgcgcgaattcgtcctgctgtttatgacgtttgatgaaaagaaatcctggtactacgaaaagaagtccaggtcatcctggaggctcacctcgtccgagatgaagaagtcccatgagttccatgcgatcaatggaatgatctactcgctcccgggcctcaagatgtacgaacaagagtgggtccgcctgcacctgctgaacatcggtggatcgcaggacatccacgtggtgcacttccatggacaaaccctgctggaaaacggtaacaagcagcaccagctgggtgtgtggcctctcctgccgggatcgttcaagactctggagatgaaagccagtaagccagggtggtggctgttgaataccgaggtcggagagaaccaacgggcaggtatgcagactccctttctgatcatggaccgggattgtcgcatgccgatgggtctgtcgacgggtatcatcagcgactcccagatcaaagccagcgaattcctcggctattgggagccgcgactcgcacgcctgaataacgggggatcgtacaatgcctggtccgtcgaaaagctggctgctgagttcgcgtcaaagccatggattcaggtggatatgcagaaggaagtgatcatcactggcatccaaacgcaaggggccaagcattacctgaaaagctgctacaccactgaattctacgtcgcatactcctcgaaccagatcaattggcagatctttaagggcaactccactagaaacgtgatgtacttcaacggaaattcagatgcctcgactatcaaggaaaaccagttcgacccgccgattgtggcgcgctacatccgcatctccccgacgcgggcatacaaccggccgaccctccgcttggaactccagggatgcgaagtgaacggatgcagcacgccgctgggaatggaaaacggaaagattgagaataaacagatcactgcgtcctccttcaaaaagtcgtggtggggagactactgggaaccgtttcgcgctagacttaacgcacagggacgcgtgaatgcttggcaggctaaagccaataacaacaaacagtggctcgaaatcgaccttttgaagatcaaaaagatcacggccatcatcactcagggttgcaagtccctgtcctcagaaatgtacgtcaagagctacaccattcactactccgaacaaggagtggagtggaagccttaccgcttgaagtcctcaatggtggacaaaatctttgaaggaaacaccaacaccaagggccatgttaagaatttcttcaaccccccgattatcagcaggttcatccgtgtgattcctaaaacgtggaatcagagcatcgccctgcgcctcgagctcttcggatgcgacatctac

SEQ ID NO: 9059 - DNA, 6672 bp, synthetic construct
  misc_feature 1..6672: note = source = /note="Description of Artificial Sequence: Synthetic coding sequence"
  source 1..6672: mol_type = other DNA
atgtttccaggttgccctcggctctgggtgttggtagttttgggaacaagttgggttgggtggggatcacaaggcacggaagccgcacagttgcgacaattctatgttgctgcacaaggcatatcttggtcttacagaccagagccaactaactcttctctcaacttgtcagtcacatcatttaagaagattgtttatagagaatatgaaccctatttcaaaaaagaaaagccacaatctactatatctggccttttaggaccgacattgtatgctgaagttggagatattatcaaagttcatttcaaaaataaggccgacaaaccactatcgattcacccacagggaatacgttatagtaagctgtctgaaggagcatcttatttagatcatacttttccagctgagaaaatggacgatgcagttgctccaggacgtgaatatacatatgaatggtcaatatcggaagacagtggaccaactcatgacgatccaccttgcctcactcatatttactacagccatgaaaacctaatagaggatttcaattcagggctcattggtccactgcttatatgcaaaaaaggaactcttactgaaggaggaactcaaaaaactttcgataagcaaattgtcctccttttcgcggttttcgatgaatcaaagtcctggtctcagtcctcttcgctaatgtatacagtgaatggatacgtcaatggaacgatgccagatataacggtatgtgctcatgatcatatttcgtggcacttattaggaatgtcctccggacctgaattgttctctattcacttcaacggacaggttctggaacaaaatcatcacaaggtgagtgcaataacccttgtatctgctacttcaacgaccgcaaatatgacagtaggcccagaaggtaaatggataatttcgtcattgacaccaaaacatctgcaggcaggcatgcaggcttatatcgatattaagaactgccctaagaaaacacgtaatttaaaaaaaattacccgagaacaacgtcgtcatatgaaacgttgggaatatttcattgcagcagaggaggtaatttgggattatgctccagtcatcccagccaacatggataaaaagtaccgatcacaacatttggataatttctcgaatcagatcggaaaacattataagaaagttatgtatactcagtatgaggatgaatcgttcacgaagcatactgttaaccctaacatgaaagaggacggtattttaggtccaatcattagggcacaagttagggatacattgaagattgtcttcaagaatatggccagtcggccgtattctatatatccacacggagttactttttcaccatacgaagatgaagtcaatagctcgttcacgtcaggacggaataacactatgatcagggctgttcaaccaggagaaacctacacctataaatggaatattctcgaattcgacgaacccacagaaaacgatgcccagtgtttgactagaccatattattctgacgttgacatcatgagagacatagcttccggactaattggtttgcttcttatctgcaagtctcgttcactcgatcgtcgtgggatccaacgtgctgccgatattgaacaacaagcggtattcgctgtgtttgatgaaaacaaatcgtggtatttggaggataatattaataaattctgtgagaatccagacgaagtgaagcgtgatgatccaaaattttatgaatccaatattatgagtactattaacggatacgtgccagagtcgattacaacccttgggttttgcttcgacgacacggtccaatggcacttctgctcagtgggtacccaaaacgagatattgacgatccattttacagggcactcgttcatttatgggaaacgacatgaagatacacttacgcttttcccaatgcgcggagaatcggttaccgtcactatggataacgttgggacctggatgttgacatccatgaacagctcgccgcgttcaaaaaagctccgactcaaattccgagatgtcaagtgtatcccagatgacgatgaagactcatatgagatctttgaaccaccagagtcgactgttatggctaccaggaagatgcatgaccgactagaacccgaagacgaggagtcagatgcagattatgactatcaaaatagacttgcagccgcactgggaatcagatcgtttagaaattcgtccttgaatcaagaagaagaggaatttaatctcaccgctctggcactcgagaacggaacggagttcgtgtctagtaatacggatataatcgtcggaagtaactattcgtctccaagtaatatttccaagtttaccgttaataacttagccgaacctcaaaaggcaccgtcacaccagcaagctaccacggcaggatcaccactccgtcatctgattggcaaaaactccgtcttgaatagctcaactgctgagcattcatcaccatatagtgaggatcctatagaggatcctctccaaccagatgtgactggtatccgattgttgtctctgggcgctggggagtttaaatcgcaggaacatgccaaacacaagggaccaaaggtggaacgagatcaagctgccaagcatcgtttctcatggatgaaattactcgctcacaaggtcggtagacacctctcgcaagatactggatcgccatcaggaatgcgaccctgggaggatcttccatcacaagataccggatctccatcgcgaatgcggccatggaaagatccaccatccgatcttctgttgctaaaacagagcaactcatccaaaattcttgtgggtcggtggcatcttgcctcagaaaaaggatcttatgaaattatccaggatacagacgaagatacagccgttaacaactggcttatttcgccacaaaacgcctctcgggcttggggtgaatcaacgccgttagcgaataaacccggtaagcaaagtggacaccctaagtttcctagagttaggcataagtcactacaagtccgtcaagatggtggaaaaagtcgactaaaaaaaagtcaattcttaatcaagacaaggaaaaaaaaaaaagaaaaacatactcatcatgctccactctctccaaggactttccatccactacgttcagaggcctataacacttttagcgaacgtcgtttaaaacactctcttgttctgcacaaaagtaatgaaacatcactgccgactgacctcaatcagacattgccttccatggatttcggatggatcgcatcgctgcctgatcataatcaaaattcaagcaatgatacaggacaggcctcctgtccaccaggactgtatcaaaccgttccaccggaagagcactatcaaacatttccaatacaagatccagaccagatgcattccacttccgatccgtcccatcgtagttcatcacctgaactctcagagatgttggaatacgacagatcacataaatcttttccaacagatatctcacaaatgtcaccaagttccgaacacgaagtgtggcagacggttatttcacctgacttgtcgcaagtgacattgtctcccgaattgtcccaaacaaacctcagcccagatttgagtcatacaactctttcgccggagttgattcagcgcaacctaagcccggcattgggacagatgcccatctccccagatcttagccatactacattgtcaccggatctgtctcataccactctctcacttgatttatcgcagacgaacctttcgcctgagctctcgcagactaatctctccccagctcttggtcaaatgcccctgtcacctgacttgtcgcatactactctctctttagatttctcgcaaactaatctttcgccagaattgtctcatatgactttgtctccagagctttcgcaaacgaatttgagcccagctcttggacaaatgccgatttccccagacctttctcacaccacactctccttagatttctctcaaactaatctatcacctgaacttagtcagacaaatttgtctccggctttaggacaaatgccactctctccagatccatctcatacaacgcttagtttggacctttcacagaccaatctttctccagaattgtctcaaactaatttgtcaccagatctttctgagatgcctttatttgcggatctttcacaaatccctctcactccggacctcgatcagatgactctttcacctgacttgggagagactgacctgtcacctaatttcggacaaatgagtctcagtccagacctttcacaagtcacattatccccagatatttcagatactacactgctgcccgatctgtctcaaatttctcctccaccggatcttgatcaaatattctatccatcagaatcttcacaatcattgcttcttcaagaatttaacgaatccttcccgtatccagatctaggtcagatgccgtccccaagttcgccgaccctgaatgacactttcctgtcgaaggaattcaatcctttggtcattgtgggactctctaaggacggaacggattacatagagatcattccaaaggaagaggttcaaagttcagaagacgactatgccgagattgattatgtaccctacgatgatccatataagaccgatgttaggacaaacatcaacagctcgcgtgacccggataacatagctgcctggtatttacgctccaataatggaaatagaagaaattattacattgcagctgaagagatctcatgggattactcagagttcgtccaaagagaaacggatattgaagactcagatgacatcccagaagatacaacttataagaaggttgtgttccgcaaatacctcgattcgactttcactaaacgggatccaagaggagagtatgaagaacatctgggaatattgggcccgatcatacgtgctgaggtcgatgatgtaattcaagtccgtttcaagaatttagcttcccgtccttatagccttcacgcacacggactttcttacgaaaaaagtagcgagggaaaaacatatgaagacgattcaccagagtggtttaaggaagataatgctgttcagccaaactcatcttacacatacgtttggcatgcgaccgaaaggtctggtccagaatcgccgggttcggcttgtcgtgcctgggcatactattcagcggtgaacccagaaaaagatatacactcgggtttgattggaccacttctgatctgtcagaaaggcattttgcacaaagattctaatatgcccatggatatgcgagaatttgtattgcttttcatgacgtttgatgaaaaaaaatcctggtattacgaaaagaaatcgcgatcgagttggcgattaacatcgagtgagatgaaaaaatcacatgagttccacgctataaatggaatgatctacagtctgcctggactcaaaatgtatgaacaagagtgggtccgcttgcatttattgaacattggaggatcccaggatattcatgtcgtccatttccacggccagactcttctggagaatggaaataaacaacatcagcttggagtatggcccctgctcccaggctcgtttaagacattagagatgaaagctagcaagccgggatggtggttgctcaataccgaagttggagagaatcaaagggctggaatgcaaacccctttcctaataatggaccgagactgtcgtatgccaatgggattgtctactggcattatcagtgacagtcagattaaggcaagcgagttcctaggctattgggaaccacgcttagcccgactgaataacggaggcagttataacgcatggtctgtcgagaagcttgctgcagagttcgcctctaagccctggattcaagtggatatgcagaaagaagttataataactggtatccaaacacagggagccaaacactatcttaaatcctgctacacaactgaattttatgtcgcatactcatcgaatcaaatcaactggcagatcttcaagggaaactcaacacgaaatgtcatgtacttcaatggcaactcagatgcgagtacaattaaagaaaatcagtttgatccaccgattgttgcgaggtatattaggatatcgccaactcgtgcttacaatcgcccaaccttaagactggaattgcagggatgtgaagttaatggatgcagtactccactgggaatggaaaatggcaaaattgagaataagcaaataactgcatcctcttttaaaaagagttggtggggtgattattgggaaccattcagagctcgtcttaatgctcaaggaagagttaacgcttggcaggccaaagctaacaataataagcaatggcttgagatcgatttgttgaaaatcaagaagattactgccatcatcactcagggatgcaagtcgttgtcatctgagatgtatgtcaaatcttacacgattcactactcggaacagggagttgagtggaagccgtaccgcctgaaaagctcaatggtagataaaattttcgagggaaatacaaacactaagggacatgttaagaattttttcaaccccccaattatttctcgtttcataagggttatcccaaaaacttggaatcaatctattgctttgcggctggaactcttcggttgcgacatctat

SEQ ID NO: 9060 - DNA, 6672 bp, synthetic construct
  misc_feature 1..6672: note = source = /note="Description of Artificial Sequence: Synthetic coding sequence"
  source 1..6672: mol_type = other DNA
atgttccccggatgtcctaggctctgggtgctggtcgtgctggggacatcgtgggtcgggtggggctcccagggaaccgaagctgcacagctgcgacagttttatgtcgccgcgcaaggaatctcctggtcgtaccgtccagagccgaccaatagcagtttgaacctttcagttacttctttcaaaaaaatagtgtaccgcgaatacgaaccctactttaagaaagaaaagccacagtctaccataagcgggcttttgggtccaacactctacgccgaggtgggagatataattaaagttcacttcaagaacaaggccgataagccgctgagcatccacccccaaggcatacgatactctaaactgagtgaaggagcatcctatctagaccataccttccccgcagaaaagatggacgatgctgtggctcctggccgggagtacacctacgaatggtctatctctgaagattccggacccactcacgacgaccccccttgtctgacgcacatctactacagtcatgagaatctgatcgaagattttaactctggtcttatcggccccctgctgatctgcaagaagggaacacttaccgagggtggtacccaaaaaacatttgataagcagatcgtgctgctgtttgccgtctttgacgaaagcaagtcttggtctcagagttcgagtctgatgtacaccgtaaatggatacgttaatgggacgatgcccgatataacagtctgcgctcacgatcacatctcttggcacctccttggtatgtcttctggaccagagctgttttccatacactttaacggccaggtactcgagcagaaccatcataaggtctcagccattaccctggtctcagctacgtccacaacggcgaacatgacagttggacctgaaggaaagtggatcatatcctctctgacaccaaagcacctacaagccggaatgcaagcatatattgacatcaaaaactgcccaaagaagacccgaaacctgaagaaaattacacgagaacagcgccgacacatgaaaaggtgggagtactttattgccgccgaggaggtgatctgggattatgcccctgtgataccagctaacatggacaagaaatacaggagccaacaccttgacaactttagtaaccagataggcaagcattataaaaaggtgatgtacacacagtacgaagatgagagctttacgaagcataccgttaaccccaatatgaaagaagacggaatcttggggcctattattagggcccaggtacgtgacacactcaaaatcgtcttcaagaatatggccagccgaccctactccatatatcctcatggggtgacattctccccgtatgaagatgaggttaattcatcatttacatccggacgtaacaataccatgattcgtgccgttcagcccggggaaacatacacatataagtggaacatccttgagtttgacgagcccaccgaaaacgatgcccaatgtctcacaaggccatactactcagatgtcgacatcatgcgagacatcgccagcggactgatcggactgctgcttatctgcaagtcccgatctctagacaggagaggcattcaaagagcagcggacatagagcagcaggcggtgttcgcagtgttcgatgaaaacaaatcgtggtacctagaggacaacattaataagttttgtgagaacccagacgaggtgaaacgagacgaccctaagttctatgagtccaatattatgtctacaattaacggctacgtccccgaatccattacaacactgggattctgttttgacgacacggtgcaatggcacttctgttccgtcgggacccagaatgagatcttgactatacatttcaccggccattcatttatctacggcaaacgtcacgaagatactctcacactatttcctatgagaggtgaaagtgttactgtgacaatggacaacgttggaacttggatgttgaccagcatgaattcgagccctcgcagtaagaaactccgattaaaattccgagacgtgaagtgcatcccagacgacgatgaagacagctatgaaatcttcgagcccccggaatcaacagtcatggctactcgtaagatgcacgaccgtttagaaccggaggacgaggaatccgacgctgattatgactaccagaaccgactggctgccgctctcggtattaggagctttcgaaacagcagtcttaaccaggaagaagaggaatttaatttaacggccctggcgctggagaatggcaccgagttcgtctcaagcaacacggatataatagtgggaagtaattatagctccccaagtaacatatccaaattcactgtgaataaccttgccgaaccacagaaggctccttctcatcaacaggctaccacggcagggagccccctacgacacctgattgggaaaaatagcgtcctcaacagctccacggcagagcatagttccccctactctgaagaccccattgaggaccccctgcagcctgacgtgacaggcatccgactgcttagtttaggagctggcgagttcaaatcccaggagcacgccaagcacaaaggaccgaaagtggagagggaccaggccgccaagcacaggttttcgtggatgaagctgttagcccacaaggtcggaagacatctcagccaggatacgggatccccttctggcatgagaccatgggaggacttgccgtcccaggacaccggaagtccgagtcggatgcgaccttggaaggacccccccagcgacctcctcctccttaagcagagcaattctagcaagattctggtcggaaggtggcacctagcatctgaaaaaggatcttacgaaataatccaggatacagacgaggacaccgctgtgaataactggctgatcagtccgcagaacgctagcagggcttggggagaatctacaccactagcgaataagcccggaaaacaaagtggacaccctaagttccccagggtcaggcacaagagcttgcaggttagacaggacgggggcaagtctaggctcaaaaagagccaattcttgattaagacccgcaagaaaaaaaaggaaaaacacacccaccatgcacccctctcccccaggaccttccatcctctgaggtctgaggcttacaacactttctcagagaggcgactgaaacactcactggtcctgcataaaagcaacgaaactagcctcccaactgacttgaatcagaccttacccagtatggactttggatggatcgcttctctgcctgatcataaccagaatagctcaaacgatacaggtcaagcctcgtgtcctcctggcctataccagaccgtcccacccgaggagcattaccagaccttcccaatccaagaccctgatcagatgcattccacaagtgacccctctcatcgttcctcatcaccagagctttcagaaatgctggagtatgatcgatctcataagtctttccctacagacatctctcagatgtccccgtcttctgagcacgaagtctggcagaccgtcattagtccggacctctcacaggtgacactctccccagagctcagccagaccaacctgtcgccggacctatcacatactaccctatccccggagcttattcagcgaaacctttctccagcgctgggccagatgcctatcagtccagatttgagtcacactacgctgtcgcctgacttatcacataccacactttcccttgatttgtcccaaacaaacctctctcccgagctgtctcaaaccaatctgtcaccagccttggggcagatgccgctgagccccgacctgtcccacaccaccttgagcctggatttctctcagacaaatctgtcaccagaactgtcccatatgactttgagtcctgagctttcacaaacaaatctatccccagcactcgggcagatgcccatcagccccgatctttcgcacacaacactgtcgctggatttttcacagaccaatctaagcccagagctctctcagaccaatctttctcccgctttgggacagatgcccctttctcctgaccctagtcacacaactctgagcctggatctgtcccagaccaatctttcaccagaactttcacagacaaacttgtctcccgatctgagcgagatgccacttttcgcagacttgtcacagattccacttacccccgacctggatcagatgactctttcgccagatctgggtgaaaccgatcttagtcccaactttggtcagatgagtctgtctcctgacctgagccaagttacactgtcaccggacatttctgatacaactctgctgcccgatttgagccagatatccccccctcctgatctggatcagattttttatcctagcgagagtagtcagtctttgctcctgcaagagtttaatgagtcttttccatacccagacctcgggcagatgcccagccctagctctccgactctgaacgatactttcctgtcaaaggaattcaaccccctggtaattgtcggcctgagtaaggacggtacagattacatagagatcatccctaaggaagaggtccagtcgtccgaggatgactacgccgagattgattatgtgccttacgatgacccttacaaaactgacgttcgcaccaacatcaacagctcaagggaccccgacaacattgcagcctggtatctaaggagtaacaacggaaatcgacgtaattactacatcgctgccgaagaaatcagctgggattacagcgagtttgtgcagcgagagaccgatatagaggattccgacgatattcccgaagacacaacctacaagaaagtggtcttcagaaagtatctggacagtacgttcaccaaaagggatcctaggggggaatatgaggaacacctgggaattctgggacctatcatccgggctgaggtggatgatgtcattcaggttcgattcaaaaatcttgctagccgtccctattctttacacgcccatggcctgagctacgaaaagtcttctgaaggcaaaacatacgaagatgactcacctgaatggtttaaagaggataacgcggtccagcccaatagctcatatacctacgtgtggcacgcgaccgagcggagtggccccgagtctcctggcagcgcttgtagggcctgggcctattactccgcagttaatccagagaaggatatccattcgggtctgattggccccctgctgatttgccagaagggaatcctgcacaaagattctaacatgccgatggatatgcgagaattcgtgctgctgttcatgaccttcgatgaaaagaaatcatggtactatgagaagaagagtcgatcttcgtggcggctgacttcttcagaaatgaagaaaagccacgaatttcatgctattaacggaatgatttattctctgcccggcctcaagatgtacgaacaggaatgggtgcgacttcatctgctgaacattggggggagccaggacatacatgtggtgcattttcatggacagactctccttgagaatggcaataagcaacatcaactcggcgtgtggccccttctacccggctccttcaaaacgttagaaatgaaagcttccaagccaggctggtggctgcttaacactgaggtaggagagaaccagagggcaggcatgcagactccatttctcattatggatcgtgactgcagaatgcccatggggctgtccacgggtatcatctccgacagtcaaattaaggcctctgagttcttggggtattgggagccacgactggccagactcaacaacggcgggtcttacaacgcgtggtcagtagagaagttggccgcagagtttgcaagcaaaccctggatccaggtcgatatgcagaaagaagtgataataacagggatccagacacagggggccaaacactatctcaagagctgttacactactgaattttatgtggcctattcttccaaccagattaattggcaaattttcaagggtaactctactaggaacgtaatgtacttcaatggcaattctgacgcatccactatcaaagaaaatcaattcgatcctccaatcgtggcacgatacatcaggatatctcctacacgtgcttataacagaccgactctgagactcgagttacaaggctgtgaggttaatggctgctccacccctttgggtatggagaacggaaaaatcgaaaacaagcaaatcaccgcctcctcattcaagaagagctggtggggagactactgggagcctttcagggcaagacttaatgcgcagggcagagtaaacgcttggcaagcaaaggctaataacaataagcagtggcttgaaatagatctattaaaaatcaagaaaataaccgccattatcactcaagggtgtaaatccttatcatccgaaatgtacgtgaagtcgtacactattcattactctgaacagggtgttgagtggaaaccttaccgactcaaatccagcatggtggataaaattttcgaagggaataccaacacaaaggggcacgttaaaaactttttcaatcccccaataatcagccgattcatcagagtcattcccaagacctggaatcagtcgatagccttgaggctggaacttttcggatgtgatatctat

SEQ ID NO: 9061 - DNA, 6672 bp, synthetic construct
  misc_feature 1..6672: note = source = /note="Description of Artificial Sequence: Synthetic coding sequence"
  source 1..6672: mol_type = other DNA
atgttcccgggatgtccaagactgtgggtgctcgtggtgttgggaacctcatgggtcggatgggggtcccagggaacggaagcggcgcagctcaggcaattctatgtcgctgcccaaggaatctcctggtcttaccgccccgagcctaccaacagctcattgaatctgtcggtcaccagcttcaagaagatcgtctaccgggaatacgaaccgtactttaagaaggaaaagccccaatcaactatctcaggcctgctgggacctaccctctacgccgaggtgggagacatcatcaaggtgcacttcaagaataaggcggacaaaccactgtctattcacccacaaggcattaggtactcaaagctgtccgaaggtgcttcgtacctcgaccacaccttcccagccgagaagatggacgacgctgttgcccctggacgcgagtacacctacgagtggtcaatttcggaagattccggacctactcatgacgacccgccgtgcctgacccatatctactactctcatgaaaaccttattgaggatttcaattccggactcattggaccgctcctcatatgcaaaaagggcaccttgactgagggaggcacccagaaaacctttgacaaacagatcgtcctcctgtttgcagtgtttgacgagtctaaatcctggtcccagtcatcgtcccttatgtacaccgtcaacggatatgtgaacggaactatgccagacatcactgtgtgcgctcatgatcatataagctggcacctgctgggaatgagctcgggaccggaactgttctcgatccacttcaatggccaagtgctggagcagaatcaccataaagtgtcggctatcactcttgtgagcgcgacttcgaccacggcgaacatgacggtgggaccagaaggaaagtggatcatttcatcactgaccccgaagcacctccaagcaggcatgcaggcctatatcgatatcaagaattgccccaaaaagactcggaacctcaaaaagatcactcgagagcaacggcgccatatgaagaggtgggaatacttcatcgcggcagaggaggtgatctgggactacgcgccagtcatccctgccaatatggacaagaagtaccgctcgcagcacctggacaacttctctaaccagatcggcaaacattacaagaaggtgatgtacacccagtacgaagatgagagcttcaccaaacacaccgtcaaccccaatatgaaagaggacggcattctgggcccaatcataagagcgcaagtcagagatacgctgaagattgtgttcaagaacatggcctccagaccctactccatttacccgcacggagtcacgttctcgccgtacgaggacgaagtgaactccagctttacttcgggacgtaataacactatgatccgcgcggtccaacctggcgaaacgtacacctacaagtggaacatcttggagtttgacgaaccaactgagaacgatgcccaatgcttgacccgcccttactacagcgatgtggacatcatgcgtgacatcgcctccgggctgatcgggctcttgctcatctgcaagagccgcagcctcgatcgacgtggaatccagagggccgccgacatcgaacaacaggcggttttcgcggtgttcgatgaaaacaagagctggtaccttgaggataacatcaacaagttctgcgagaacccggatgaagttaagcgcgacgaccctaaattctacgagtcaaacattatgtccaccatcaatggctacgttcctgaatcgatcaccacgctgggtttttgtttcgatgataccgtgcagtggcacttttgctccgtcgggactcagaacgaaatcctcactatccatttcactgggcattcgttcatctacgggaagcgccatgaggacaccctgaccctgttcccaatgcgcggagaatccgttaccgtgactatggataacgtgggaacgtggatgctcacgagcatgaactcctcacctagatccaagaaactccggctgaagttccgagatgtgaagtgcataccagatgacgacgaggattcatacgaaatcttcgagccgccggaatcaactgttatggctaccagaaagatgcacgaccggctcgaaccagaggacgaagaatccgacgcagactacgattaccagaatagactggctgcagcgctgggaatccggtcgttccggaattcttccttgaatcaggaggaggaagaattcaatctgaccgctctcgcattggagaacggaacggagtttgtcagctccaacaccgacatcatcgtgggctcgaactactcgtccccatcgaatatctcaaaattcaccgtcaataacctcgcggaaccgcagaaagccccgtcacaccagcaggctactaccgcagggagcccgctcagacaccttatcggaaaaaactccgtgctgaattcgtcgactgccgaacattcgtcaccctactcggaagatcccatcgaagatcctctgcaacctgacgtcacggggatccggctgctgagcctcggggccggggagttcaagtcacaagagcatgctaagcataaaggccccaaggtggaaagggaccaagccgcaaagcaccgctttagctggatgaaactgttggcgcacaaagtgggccgccacctgtcacaagataccggttcgccctcgggaatgcgtccttgggaggacctgccatcccaagacaccggttccccatcgaggatgcggccttggaaagatccgccgtccgatctgttgctccttaagcagtcgaactcatcaaaaatcctcgtgggacgctggcacctggcgtcagagaagggatcgtacgagatcatccaggacactgacgaggacaccgccgtgaacaactggctgatctcgccgcaaaatgcctcgcgcgcgtggggtgaatcaacgcccctggccaacaaacctggcaagcagtcgggtcacccaaagttcccaagagtgcggcacaagtcacttcaggtgcggcaggatggtggaaagtcgcggctgaagaaatcacagtttctcatcaagacgcgcaagaaaaagaaagagaagcacacccaccatgcccccctgtccccgcggactttccacccactccggtccgaagcatataacaccttctcggagcgacggctgaaacattccctggtgctgcataaatccaacgagacttcccttccaaccgatttgaaccaaactctcccaagcatggacttcgggtggatcgcgtctttgcccgaccataaccagaactcctcgaacgatactggtcaagccagctgtccgcccggtctttaccagaccgtgccacccgaagagcattaccaaacttttccaatccaggacccggatcagatgcactcgacctccgatccgtctcaccggtcaagctcgccggaattgtctgaaatgctggaatacgatcgctcccataagagcttccccactgatatcagccaaatgtcaccgtcatcggaacacgaagtgtggcagactgtgatctcgcctgacctctcccaagtgaccttgtcaccggaactttcgcaaaccaatctttcaccggatctctcgcataccaccctgagcccggaactcatccagcgcaacctctcgcctgcacttggacaaatgccaatctcgccggatctgtcgcacactactctcagccccgatttgtcacatactactctgtcactcgacctgtcgcagactaatctttcgcctgaactcagccaaacgaatttgtccccggcactgggtcagatgccgctgtctccggacctcagccacaccactctgtcgctggacttctcacaaaccaacctctccccagaactcagccatatgacccttagccccgaactgagccagactaatctctcgccggccctgggacagatgccgatctccccagatctgagccataccaccctctcactggatttttctcaaaccaacttgtcacctgaactgtcccagacgaacttgtccccggcgctgggccaaatgccactgtccccggatccttcacacaccactttgtcactggatctctcccaaacgaacctgtctccggaactttcacagactaaccttagcccggacttgtcggaaatgccgctctttgccgacctctcccagatccctctgacccccgacctggatcagatgacgctgtcccctgacctcggtgaaaccgacctcagcccgaacttcggacaaatgagcttgtcgcctgatttgtcacaggttactctgagcccagatatttcggacacgacgctgctgccggacctgtcacaaatatcaccgcctccggacctggaccagattttctacccaagcgaatcgtcccagtcactgctcctccaagagtttaacgaatcgtttccctaccccgacctgggccagatgccgtccccgtcgtcaccgactctgaatgacacttttctgagcaaggagttcaaccctctggtgatcgtgggtctttctaaggacggaaccgactacatcgaaatcatcccgaaggaagaagtgcagtcatccgaggacgactatgccgagatcgattacgtgccatacgacgacccttacaagactgatgtgagaaccaatatcaactcctcacgggacccagacaacattgccgcttggtacctgaggtctaacaacggtaacagacgaaactattacattgccgcagaagagatcagctgggattactcggagttcgtgcaaagagagactgatatcgaagattccgacgatatcccagaggacacgacttacaagaaagtcgtgttccgcaagtacctggactccacctttactaagcgggatccgcgcggagaatatgaggagcaccttgggatcttggggccgattattcgcgcagaagtcgacgatgtcattcaggtgcgatttaagaatcttgcatcgcgcccttactcactgcatgcgcatggtctgagctacgaaaagagctccgagggaaagacttatgaggacgattcaccggagtggttcaaggaggacaatgccgtgcaacccaacagctcctatacctacgtgtggcacgcaactgaacggtctgggccagaatcgccgggatcggcatgtagagcctgggcctactactcagcagtgaatccagaaaaagatatccactccggcctgattgggccgctgctgatttgtcagaaaggaatcttgcacaaggactccaacatgccgatggacatgcgcgaatttgtgctgttgtttatgactttcgacgagaaaaagtcatggtactacgagaagaaatcccggtcctcctggcggctcacctcctcagagatgaagaagagccatgagttccatgccatcaacggaatgatttacagcctgccaggtctgaagatgtacgaacaagaatgggtgcggctgcacctgctgaatatcggcggatcccaggatatccatgttgtgcacttccacggacagaccctgctggaaaacggcaacaaacagcaccaactgggagtctggcctctgctccctggatccttcaagacccttgagatgaaggcctcgaagccgggatggtggcttcttaacactgaagtcggagagaaccaacgggccggaatgcagactcccttcctcatcatggacagagactgccgcatgccgatggggctgtccactggcatcatttcggattcacagatcaaagccagcgaattcctcgggtactgggaaccccgcttggcaagactgaataatggcggatcttacaacgcttggtcggtcgaaaagctggccgcggagttcgcaagcaagccgtggatccaggtcgatatgcagaaagaagtgattatcaccggaatccagactcagggggccaaacactacctgaaatcctgctacaccactgagttctacgtcgcgtacagctcgaatcagattaactggcagatcttcaagggcaacagcactaggaacgtcatgtacttcaatggaaattcggacgcatccactatcaaggagaatcagttcgacccacccatcgtggctcgctacatccgcatctcgcctacccgcgcttacaaccgcccaactctgaggttggagctgcaggggtgcgaagtgaacggatgtagcaccccgctgggaatggagaacggcaagatcgagaataagcaaatcaccgcctcatcgttcaagaaatcgtggtggggggattactgggaaccattcagagctcggctgaacgcccagggccgcgtgaatgcttggcaggccaaagctaataacaataagcagtggctcgagatcgaccttttgaaaatcaagaagatcaccgcgatcatcacccaagggtgcaagtcgctgtcctcggaaatgtacgtgaagtcctacactatccactactctgagcagggagtcgaatggaagccttatcggcttaagtcctcgatggtcgacaagatctttgaaggaaatactaacacgaagggccacgtgaaaaacttcttcaatccgccgatcatcagccgcttcatacgcgtgattccaaagacttggaaccaatccattgcgttgaggctcgaactgttcggatgcgatatctac

SEQ ID NO: 9062 - DNA, 6672 bp, synthetic construct
  misc_feature 1..6672: note = source = /note="Description of Artificial Sequence: Synthetic coding sequence"
  source 1..6672: mol_type = other DNA
atgtttcctggctgcccaaggctctgggtgcttgtggttctggggacgagctgggtgggttggggttcgcaaggcaccgaagcagcacagctgagacagttctacgtcgcagcacaaggaatctcgtggtcgtaccgcccagaaccgactaattcgtcgctcaacctctcggtgaccagctttaagaaaattgtctaccgagaatatgaaccgtacttcaagaaggaaaagccacagtccactatcagcgggctccttggacctaccctctatgccgaggtcggtgacattatcaaagtccactttaagaataaggcggataaacctctgtcgattcacccacaaggtatccggtactcaaagctgagcgaaggtgcctcataccttgaccacaccttccctgctgagaagatggatgatgccgtggcccctggtagggaatacacctacgaatggtcgatctccgaagattccggcccgactcatgatgatccaccctgcttgactcacatttactactcgcatgaaaacctgatcgaggacttcaactcaggactgattggccctcttctgatttgcaagaagggtactctcaccgagggtggtactcagaaaactttcgataaacaaatcgtcctgcttttcgccgtgttcgatgaatccaagtcctggtcgcaatcttcttcgctgatgtacaccgtcaacggctacgtgaatggaaccatgccggatattactgtttgcgcacacgatcacatttcatggcatctgcttggaatgagctccggtccggaactgttttccatccatttcaacggccaggtgttggaacaaaaccaccataaggtgtccgcaattactctggtgtcggcaacctcaaccaccgccaatatgactgtgggacccgagggcaaatggatcataagcagcctgactcccaagcatctccaagctggaatgcaggcctacattgacataaagaactgtcccaagaaaactagaaacctcaagaagattaccagagaacaaagacgccatatgaagcggtgggagtactttatcgccgcagaagaggtgatctgggactatgcaccagtgatccctgctaacatggacaaaaagtacaggagccaacatctcgacaacttctccaatcaaattggcaagcactacaagaaagttatgtacacgcagtatgaagatgagtcctttaccaagcacaccgtgaaccccaatatgaaagaagatggaatcttggggcctattatccgagcgcaggtgagggataccttgaagattgtctttaagaacatggcttcaaggccctactcaatatacccacatggagttaccttctccccgtatgaggatgaagttaattcctcgtttactagcggacgtaacaataccatgattcgtgcagtgcagcctggtgaaacctacacctataagtggaatattcttgaatttgatgaaccaactgaaaatgatgctcaatgccttaccagaccgtactactcggatgtggacattatgcgagacattgctagcgggcttatcgggcttctgcttatttgtaagagccgatccttggatagaaggggtattcaacgcgctgccgatatcgagcagcaagcagtgtttgcagtctttgatgaaaacaagtcctggtatctggaggacaacatcaataagttctgcgaaaatcctgatgaagtgaagcgtgacgaccccaagttttacgagtcaaacattatgtcgacgattaacggatacgtgccagaatcgattaccacccttggcttttgttttgacgataccgtgcaatggcatttttgctcggtcggaacgcagaacgaaattctcaccatccattttactggccattcctttatctacggtaaaagacatgaggacactctgacgctgtttccaatgcgcggagaatctgtgaccgtgactatggataatgtgggaacgtggatgcttacctccatgaactcgtcacctaggtccaagaaactgcgcttgaagttcagagacgtcaagtgtattcctgatgatgatgaggattcttacgagatttttgaacccccggaaagcactgtcatggccaccagaaagatgcacgacagactcgagccagaggatgaagagtcggatgcggactacgactaccagaaccggcttgcagcagcgctggggatccgctccttccgaaattcatccctcaaccaggaggaagaagagttcaatctgaccgcactggcacttgaaaatggaaccgagtttgtcagctcgaacaccgatatcatagtgggatcgaattactcgtctccctccaacattagcaagtttaccgtgaacaatctggcagaaccccaaaaggcaccatcccatcagcaggcaacgacggccgggagccctttgagacacctgatcggcaaaaacagcgtgcttaactcctcgaccgcggagcatagctcgccatatagcgaagatcctatcgaggatcctctgcagccagatgtgacgggaatcagattgctgtcattgggggcgggtgaattcaaaagccaggaacatgcaaagcacaagggacctaaggtggaacgagatcaggcagcaaagcatcggttctcgtggatgaagttgctggcccataaggttgggagacatctctcccaagatactgggtcaccatccggtatgcggccgtgggaagatctgccttcgcaagacaccggatccccctcacgaatgaggccttggaaggatccaccttcagaccttcttctgcttaagcaatcgaactcctcgaaaattcttgtcggtagatggcatctggcgtctgaaaagggatcgtacgaaatcattcaagacacggatgaagatactgcagtgaacaattggctgatttcgcctcaaaatgcatccagagcatggggggaaagcactcctctggcaaacaagccagggaagcagagcggtcatcccaagtttccccgcgttcgtcataagtcacttcaagtccgccaagatggaggaaaatccagacttaagaaatcccagttcctgatcaaaacgcgcaagaagaaaaaagaaaagcacactcatcatgcacccctgtcccctaggacttttcatcctcttcggtccgaagcctacaacacgttcagcgagcgcagactcaaacacagccttgtgctgcacaaaagcaacgaaacctctctgccgactgatctgaaccaaactctgccatcgatggacttcggatggattgcctcgcttccggatcataatcagaactcgagcaacgacaccggtcaagcatcctgtccccctggactctaccaaaccgtccctcccgaagagcattaccaaacgtttcctattcaagaccccgaccagatgcatagcacttccgacccatcacatcgctcttcgtcccctgaactctccgaaatgctcgaatacgatcgaagccacaagtccttccctacggatatatcccagatgtcgccttcatcagagcacgaagtctggcagaccgtgatttcccctgatttgtcacaggtgacgctctccccagaattgtcgcagaccaacctcagcccagatctctcccatactaccctctctcctgaattgatacaaagaaatctttcgcctgcacttggacaaatgcctatttcgcctgatcttagccataccacgctcagccctgacctgtcccacaccacgctgagcctcgatctgtcgcaaactaatctttcgccagaactctcgcagactaatctgtcgccagcactggggcagatgccactgtctcccgatctgtcccataccacccttagcctggatttttctcagactaacttgtcgcccgaactttcccacatgactctttccccagagcttagccagaccaacttgtcccctgcactgggtcagatgcccatcagcccagacctctcacacaccactctgtcgcttgacttctcacagaccaatctttcaccggagctgagccaaaccaacctgtcccccgcccttggtcagatgccactctcacctgacccctcacatactactctgagcctggacttgtcacaaacgaacctttcccccgagttgagccaaacgaacctcagccctgatctctccgagatgcccctttttgcagacctgtcgcaaattccgctcacccctgatctcgaccaaatgactctgtccccagatctcggtgaaactgatctgtccccgaattttggacagatgagcctttcgcctgacctctcgcaagtcactctttcacctgacattagcgatactacgctccttcctgatctgtcgcagatctcgcctcctccggacctggaccagatcttttatccttcggagtcatcacaatcccttcttctgcaagagtttaacgagagctttccatacccggaccttggtcaaatgccctcgccatcctcaccaactcttaatgacacttttctgtccaaggagttcaacccccttgtgatcgtcgggcttagcaaagacggtacggattacatagaaatcattccaaaggaggaagtccagtcgtcggaagatgactacgcagagattgattacgtcccttatgatgacccctacaaaactgatgtgagaaccaatatcaacagctcccgggatcctgataacattgcggcatggtacctcagatcaaacaatggaaatcgtcggaactattacattgccgccgaagaaatatcatgggactactcagagtttgtgcaacgcgaaaccgatatcgaagattcagatgacatcccagaagatactacctacaaaaaagttgtctttagaaaatacctcgattcaacttttactaaacgcgacccccgaggtgaatacgaggaacatctgggcattcttgggccaatcatacgcgcagaggtggatgatgtgatccaagtccgctttaagaatcttgcaagccgtccatacagcttgcatgctcatggcttgtcatacgaaaaatcgagcgaaggaaagacttatgaagatgactcgccggaatggtttaaagaggataacgcagttcagcctaattcctcgtacacttatgtctggcacgccacggagcgctcgggacccgagtcacctggatccgcatgtcgtgcatgggcatactactccgccgtgaacccggagaaggatatacactcagggctgattggaccgctgctcatttgtcagaagggcatactgcacaaagattcgaacatgccaatggatatgcgggaatttgtgctgttgtttatgacttttgatgagaagaagtcatggtattacgaaaagaagtcacgctcgtcctggcgacttacttcctccgagatgaagaagtcacatgaattccatgctataaacggaatgatctattcactgcctggcctcaagatgtacgaacaggaatgggtccggttgcatctcctgaacattggaggaagccaagatatacacgtggtgcatttccacggtcaaaccctgcttgaaaacggcaacaagcagcatcaacttggtgtgtggcctcttctgcccgggtcgttcaagactcttgagatgaaggcgtcaaagccaggatggtggctgcttaacaccgaagtgggagaaaaccaaagagcaggcatgcagaccccttttcttatcatggatagagactgtaggatgccaatgggtctttccaccggaattatctccgactctcagattaaggcatccgagtttcttgggtactgggaaccgaggcttgcccggcttaacaacggtggatcgtacaacgcgtggtccgtggagaaactggcagcagaatttgcctcaaaaccttggatacaagtggacatgcaaaaagaagtgattatcactggtattcaaacccaaggcgcaaagcactatctcaagtcgtgttacacgactgaattctacgtggcctatagctcgaatcaaatcaactggcagattttcaagggcaactcgactcggaatgtgatgtactttaatggaaattcagatgcgtcgacgatcaaggagaaccagttcgatccacccatcgtcgctcgctacattaggatcagcccgactagagcgtacaaccgcccgacccttcgacttgaactccaaggttgtgaagtgaacggttgttctaccccactgggaatggaaaacggcaagattgagaataagcagattaccgcctcgtcgtttaagaaatcctggtggggcgattactgggaaccattccgggcacgtctcaatgcgcagggacgggtgaacgcttggcaggctaaggcaaacaataacaaacaatggcttgagattgacctgcttaagatcaaaaagattaccgcgatcattacccaaggatgcaaaagcctgtcatctgaaatgtacgtgaagtcgtacacgatacattactccgagcagggcgtcgaatggaagccataccgtctcaagtcctcaatggtcgacaagattttcgaaggaaacacgaataccaaaggacatgtcaaaaactttttcaatccaccaatcattagccgctttatacgcgtgattcctaagacctggaatcaatcaattgccttgaggctcgagctgtttggctgtgacatttac

SEQ ID NO: 9063 - DNA, 6672 bp, synthetic construct
  misc_feature 1..6672: note = source = /note="Description of Artificial Sequence: Synthetic coding sequence"
  source 1..6672: mol_type = other DNA
atgttcccaggatgtccccgcctttgggttttagtggtgctagggacaagttgggttggatggggatcccagggaactgaagctgcacaacttcgtcagttttacgtggctgcccaggggatctcttggtcttataggcccgaaccaactaattcatcccttaatctgtcagtgacttcctttaagaaaatcgtatatagggaatatgaaccttattttaagaaagaaaaaccacagtctactatctccggattactcgggccaacattgtatgccgaggtgggagatataatcaaagtccatttcaaaaacaaagccgacaaacctctctcaatccatccacagggaatccggtatagtaagctttctgaaggggctagttaccttgaccacacattcccagctgaaaagatggacgatgcagtggcccccggacgagaatacacttacgaatggtctatctccgaagattccggacctactcacgatgatccaccctgcttaacacacatttattacagtcatgagaacctgattgaagattttaactcagggcttattggacccctcttgatatgtaaaaaggggacattaactgaaggggggactcagaaaacattcgataaacaaatagtgctgctgttcgccgtttttgatgaatctaaatcatggtctcagagttcctcattgatgtatactgtcaacggatatgtgaacgggactatgcccgacattacagtgtgtgctcatgatcacatttcctggcacctgctaggaatgtctagtggacctgaactgttcagtatacatttcaacggacaggtcctggaacagaatcatcataaggtatctgcaatcactctggtgtctgccacaagtactacagcgaacatgactgtgggaccagaaggaaaatggatcatctcctctctcacacccaaacatctgcaagcagggatgcaggcctatatcgatatcaagaactgtcccaagaagacaagaaatttgaagaaaatcactagggaacagcgtaggcatatgaagcggtgggagtactttatcgcggctgaggaggtgatctgggattacgctcccgttattcccgccaatatggataagaaatatcggtctcagcatctagataatttttctaaccaaataggaaaacattataaaaaagtcatgtatacacaatatgaagatgaatcatttacaaagcacactgtgaatcccaatatgaaagaagatgggatactcgggccaatcattagggcacaggtacgggatactctaaaaattgtgtttaaaaatatggcatctcggccctatagtatctaccctcatggggtaacattcagtccatatgaggatgaggtgaatagttctttcacaagtggacggaacaacacaatgatacgcgcggtccagcctggggaaacttatacttacaaatggaacatcctcgaatttgatgaaccaactgagaacgatgcgcagtgccttacaagaccttattattccgatgtggatataatgcgggatattgcttctgggcttatagggcttctcctgatttgtaaatcacgctcactcgatcgacgggggatccaaagagccgccgacatcgaacagcaggccgttttcgcagtcttcgatgaaaataaatcttggtatctggaagataacattaataagttctgtgaaaaccctgatgaagtaaaacgggatgatccgaaattttatgaatccaatatcatgagtacaataaatgggtacgtgcctgaatccataacaacattgggattctgcttcgatgatacagtacagtggcacttctgttctgttgggactcagaacgaaatcctcactatacacttcacagggcatagtttcatatatgggaaaaggcacgaggacactctgactctattccctatgcggggggaatcagttacagtcactatggacaacgtgggaacttggatgctgacatccatgaattcttctcccagatccaaaaaacttaggttaaaattccgagatgttaaatgtatacccgatgacgatgaggactcatatgagatctttgagccaccagagagtacagtgatggcaacaagaaaaatgcacgaccggcttgagcccgaagatgaagaaagtgatgcagactatgactatcagaatcgactggcagctgctctcgggattcggtccttcagaaacagtagtctgaatcaggaagaagaggagtttaatctcacagccttagctctcgaaaacgggacagaattcgtaagtagtaacacagatatcatcgtcggaagtaattatagttccccttccaacatctccaagtttactgtaaataaccttgctgaaccacagaaagctccaagtcaccagcaggctacgacagccgggagtccactcaggcacctcattgggaagaacagtgtgctgaattcttcaactgcggaacatagttccccctattccgaagatccaatcgaagatccccttcagcccgatgttactgggatacgactcctttctctcggggctggagaattcaaatcccaggaacacgccaagcacaaaggacctaaagtggaacgcgatcaggccgccaaacatcgcttttcttggatgaagctcctcgctcataaggtaggaaggcacctttcacaggacacagggtcaccctctgggatgaggccttgggaagatctccccagtcaggatactggaagtccttccagaatgcggccctggaaggatccccccagtgatctcctactcctgaagcaatcaaattcatctaaaatactagtcgggagatggcatttagcctcagaaaaagggtcctacgaaataatccaggatacagatgaggatactgctgtgaataactggcttatctctccccagaatgccagtcgggcgtggggggaatccactccactggccaacaaaccaggaaaacagtccggacatcccaaattcccgagggtgaggcataaatctttgcaggtccggcaggatggggggaaatcccggttgaaaaaaagtcagtttctaataaaaacacgaaaaaagaagaaagaaaaacacacacatcacgctccactctcccccagaacttttcatcctttacggtctgaagcgtataacacattctccgagagaaggctcaaacacagtctcgttcttcacaagtcaaatgaaacatcccttcctacagatttaaatcagacacttccttctatggatttcgggtggattgcatccctccctgaccataatcagaactcatctaacgatactgggcaggcctcatgccccccaggactctaccagactgtaccgcctgaggagcattaccagactttccccatacaggatccagaccagatgcattctacatccgacccatcccaccggtcatcgtcccctgaactctcggaaatgcttgaatatgatcgcagtcacaaatctttccccacagatatctcacagatgagtccatcctccgaacatgaagtgtggcagactgtcatctctcccgacctcagtcaggtgacgttgagtcccgaattatctcagacaaacctctccccagatctctcccatacaacactgtctcccgaactgatccagagaaacttgtccccagccctcgggcagatgcctatatccccagacctttcgcacactacactgtctcccgatctgtctcatacaacactctcactggatctctcacagacaaacctctcacctgagttgagtcagactaatctctcccctgctctcggacagatgccactgagtcccgatctctcccatacaacactttctctggacttttctcagacaaatctatctcccgagctgtcacatatgactctgagtcccgaattatctcagactaacctgtctccagcgctggggcagatgcctatatcgcctgatctttctcatactactctatctcttgatttttcccagacaaacctatctccagaactctctcagactaatctctctcccgcgctgggacagatgcccctctctcccgacccttcccatacaacactttccctcgacttatcccagacaaatttgagtcctgaactgagtcagacgaacctctcaccagatctttctgaaatgcctctgttcgcagatctttcacagattcctctgactccagatctggatcaaatgacactgtcacctgatcttggagagacagacctgtctcctaatttcgggcagatgtctttatccccagatctttcccaggtaacactctctcccgatatttccgatactacactgcttccagatctatctcagatctcccccccacccgatttggaccagatcttttatccctcagaatcgagtcagtctctactgctgcaggaattcaacgagagttttccctatcctgatctcggacagatgccttctccctcctcccccacacttaatgatacatttctgtcaaaggaattcaatccactcgtcatcgtggggctatcgaaggatggaacagattatatcgaaataataccaaaggaagaagttcagtcctcagaagatgattacgcagagatagattatgtgccatatgatgatccctacaaaacagatgtcagaacaaatatcaactcaagtcgcgatcccgataatatcgctgcttggtatctgaggtctaataacgggaataggcggaactattatattgccgcagaagaaatatcctgggattattcagaatttgttcagagggagacagatatcgaggattccgacgatatacccgaagacacaacatataaaaaagtggtattcagaaagtacctcgatagtactttcacaaaaagggatcctcgaggagaatatgaagaacatctcggaatcctagggcccattatcagagccgaggttgatgatgttatacaggtgagattcaaaaaccttgcaagtcggccatattctctccacgcccacgggctcagttatgaaaagtcaagtgaaggaaaaacatatgaagatgattccccagaatggttcaaagaggacaacgccgtacagcctaattcatcgtatacgtatgtatggcatgccactgagcgttccggacccgagtcccctggatccgcttgtagggcctgggcttattattcagccgtgaatcctgaaaaagatatacatagtgggctgatcgggcccctattaatctgccagaaagggatcctgcacaaggattccaatatgccaatggatatgcgcgagtttgtgttactcttcatgactttcgacgagaaaaaatcctggtattacgagaaaaagagtaggagttcttggagactgacttcatccgaaatgaagaaatctcacgagtttcacgccataaacggaatgatatattcattaccaggactgaagatgtatgagcaggaatgggtccggttacacctgctgaatataggaggatcacaggatatccatgtggtccactttcacgggcagacattactcgaaaacgggaacaagcagcaccagcttggagtgtggcctctcttacctggatcattcaaaactttagagatgaaagcctccaaaccagggtggtggcttctcaacacagaagtcggagaaaatcagcgggctggaatgcagactccttttctcatcatggatagagattgtcgaatgcctatgggattatcaacaggaattataagtgactcacagataaaagcttccgaatttttgggatattgggaaccccgcctggcaaggcttaataacggaggatcctataacgcctggtctgtcgaaaaactggcggccgaattcgcttctaaaccatggatacaggttgatatgcagaaagaagtcataatcactgggattcagacacaaggagcgaaacactacctcaaatcttgttatacaactgaattttatgttgcctatagttccaaccagattaattggcagatctttaaaggaaactcaactagaaacgtgatgtattttaacggaaactcagatgcctcaacaataaaggaaaaccagttcgatcccccaattgtagcacggtatatcaggatatctcctacacgggcttataatagacctactctgaggctggaacttcaaggatgcgaggtcaatggatgttctactccactagggatggaaaacgggaaaattgagaataagcagataactgctagttcattcaagaaatcttggtggggggattattgggaaccttttagagccagattgaatgctcagggaagagtgaatgcctggcaggctaaggcaaacaacaataaacagtggcttgaaatcgaccttctaaaaatcaaaaaaatcactgcgattatcactcagggatgcaaatccctttcttcagaaatgtacgttaaatcttatactattcattatagtgagcagggggtggaatggaaaccttacagactcaaatcttccatggtcgataaaatcttcgaggggaatactaacactaaagggcacgtgaaaaatttcttcaacccaccaattatttcccgattcatccgggtcatccctaagacttggaatcagtctatcgctctgcgactcgaactgtttgggtgtgatatatat

SEQ ID NO: 9064 - DNA, 6672 bp, synthetic construct
  misc_feature 1..6672: note = source = /note="Description of Artificial Sequence: Synthetic coding sequence"
  source 1..6672: mol_type = other DNA
atgtttcccggttgcccccgactgtgggttctcgtcgtgctagggaccagctgggtcggatgggggagtcaaggaaccgaagcggcgcagctgaggcagttttacgttgccgcgcagggcatcagctggtcctatagaccagagcccactaattccagcctcaatttgtccgtgaccagctttaaaaaaattgtctaccgcgagtacgagccctacttcaagaaggagaagcctcagtccacaatctctggtctgctgggacctacgctgtacgctgaagtgggtgacatcatcaaggtgcacttcaaaaacaaagccgataagcctctgagcattcatccccaaggaatccggtacagtaaattaagcgaaggggcatcttatctggaccacaccttccctgcagagaagatggacgacgcagttgctccgggccgcgagtatacatacgaatggtccatttcagaagactctggccccacccatgatgacccaccttgtcttacccatatatactatagccatgaaaatctgatagaggatttcaattctggcctcattggccccctattgatctgtaagaaaggcacactaacagaggggggcacacagaagacctttgataaacagattgtcttactgttcgcggtgttcgacgaatccaagtcctggtcccagtctagtagcttaatgtacacagtcaatgggtatgtcaacggcacaatgcctgacatcacagtttgcgcccatgatcacatctcctggcatctcttaggcatgagtagtggcccagaactgtttagtattcatttcaacgggcaagtgttggaacagaatcaccataaggtgtcagccataaccctagtgagcgctacctccactaccgcaaacatgactgtcgggccggagggtaaatggatcatttcctcactgactcctaagcacctgcaagccggcatgcaggcatacattgacattaagaattgccctaaaaagacaaggaacttgaaaaaaattaccagggaacagcgccggcatatgaaaaggtgggaatactttatcgctgccgaagaggtgatctgggactacgcacctgtaatccctgctaatatggacaagaaatatagatctcagcatttggataatttcagtaatcagatcggtaagcattataaaaaagtgatgtacacacagtacgaagacgagtcatttacaaaacatactgtgaatcccaatatgaaggaggacggaattctcgggccaattatcagagcccaggtgagagacacactgaaaattgtgtttaagaacatggcttcacggccctattcaatctacccccacggggttactttctcaccctatgaagatgaggtcaatagttccttcacttcaggtcgcaacaacaccatgattagggccgtccagcctggggagacttacacttataagtggaacattttagagttcgacgagcccacagagaatgatgctcagtgccttaccagaccttattattcagatgtggacataatgcgcgacatagctagtggccttattggattgctcctgatctgcaagagccggagcctggatcgcagaggcatacagcgggcagcagatatcgagcaacaggccgtcttcgccgtcttcgacgagaacaaaagctggtatttggaagacaacatcaataaattttgtgagaaccctgacgaggtcaagagggacgacccaaaattttacgaatctaatatcatgtccacgatcaacggttacgtgcccgagtccatcactactctgggattttgttttgatgatactgttcagtggcacttctgttctgttggcacacagaacgagatacttaccatccatttcacagggcattccttcatctatggtaaacgacatgaggatactctcaccctgttccccatgagaggagagagtgtgactgtgaccatggacaacgtggggacctggatgctgacaagtatgaactctagccctcgcagcaaaaagctcagattaaaattcagggacgtcaaatgcattccggatgacgacgaggattcctatgagatcttcgagcccccggagagcactgttatggctacaaggaaaatgcacgaccgcttagagccagaagacgaggaatcagacgccgactatgactaccaaaatcgcctcgccgcagccttgggaatacggtccttccgcaattcctctctgaaccaggaagaggaggagttcaatctcactgccctagctctggagaacggaactgagttcgtatccagtaatactgacattattgtcggttctaactactcctccccaagtaatatttcaaagttcaccgtgaataacctggccgaaccccaaaaggcccccagtcaccagcaagcgacgacggcagggagtcccctgcgccacctgatcggcaagaatagcgttctaaatagcagcacagccgagcactccagcccatacagtgaggaccccatcgaggatcccctccaacccgacgtgaccggtattaggctgctttcgctgggcgctggggagttcaagagtcaagagcacgcaaagcacaaaggtcccaaagtcgagcgcgatcaagccgccaagcatcgctttagctggatgaagctgctggcgcataaagtcgggagacatcttagccaggatacaggatcgcccagtgggatgcggccgtgggaggacctgcccagccaagatactggtagccccagccgaatgaggccctggaaggacccgccgtcggatctgttgctgctgaaacagtcaaactcaagtaaaattctagtggggcgatggcacctggctagcgaaaaaggatcctatgaaattatccaggataccgacgaggacactgcggtcaataactggcttatttcacctcagaatgctagccgggcctggggggaaagcacacccctggcaaacaaaccagggaagcagtccggccaccctaaatttccccgggtcaggcataagtctttgcaggtacgccaggatggtggtaagtcccggctgaaaaaatcacaattcctcattaaaaccagaaagaaaaaaaaagagaagcacacacaccacgcccctttgtctcctagaacatttcatcccctgcgctcagaagcctacaacacgtttagcgagagaagactcaagcattccctggttttacacaagtctaacgagaccagccttcccactgacctgaaccagactctgcctagcatggacttcggttggatagcctccctaccagaccataatcagaacagttcaaatgatacagggcaggcctcctgtccccccggcctgtatcagactgtccccccagaagaacactatcagaccttcccaatccaggatcccgatcagatgcactctacatctgatcccagtcatcggagtagcagtccagagctcagtgagatgctagaatacgatcgcagtcacaagagtttccccactgatatctcacagatgtctccatcaagcgagcacgaggtttggcaaacagtaatttccccggacttgagtcaggtgacgctgtcccctgagctgagccagaccaacctgtcccctgatctcagccatacaacactgtctcctgaactaattcagcgcaatctttctcccgccttgggccagatgccaattagccccgacctctcacatactactttgagccctgacttgagtcatacaactctttcactggacctctcacagactaacctgagcccagagctgtcccagacaaacctctcacccgccctcggccagatgcccctgtccccagatctgtcccacaccaccctgtccttggatttcagtcagaccaatctttcacctgagctaagtcacatgacactctcccccgaactgtcacagaccaatctctcacctgccctcggacagatgcctatctcaccagaccttagtcacactacgctgtcactggatttttctcagactaacctcagccctgaactctcgcagaccaatttatcgccggcgctcggacagatgcccttatcaccagacccatctcacacaactctgtcactcgatctcagccaaaccaacctgtcccctgaattgagccagacgaatctctctccagacctttctgagatgccacttttcgccgacctcagtcagatccctctgacacccgatctggaccagatgaccctcagccccgacctcggggaaacagatctttcccccaatttcgggcagatgtctctgagccctgatcttagccaggtaacactttctcctgacatcagtgatacaacactactccccgacctgagccaaatctccccgccacctgatctagatcagatattttaccctagtgagtcttcacaatcactgctactgcaggagtttaatgaatctttcccatatccagaccttggccagatgccatccccctcaagtcccacattaaatgataccttcctctctaaagagttcaaccctctggtcattgtaggcctctcgaaagacggaaccgactatatcgaaataattccaaaagaagaggtgcagagcagtgaggacgactatgccgagatagactacgtgccctacgatgatccctacaaaaccgacgtgcgaactaacatcaacagcagtcgcgaccccgataacatagctgcgtggtatctgcgatccaacaatgggaaccgaagaaactactatatcgccgcagaggagatcagttgggactatagtgagttcgtgcagcgcgagaccgacattgaggattcagatgatatccctgaggacacgacctataaaaaggtagtttttcgcaagtaccttgatagtactttcactaagcgggaccctcggggagaatacgaggagcacctgggcatcctgggtcccattataagggcggaagtggatgacgtgattcaagttcgcttcaagaatttggcctctcgcccctacagcctccacgctcacggtctgtcttacgaaaagagttctgaaggtaagacctatgaggacgacagtcccgagtggtttaaagaagacaacgcagtacagcccaatagttcctacacctacgtgtggcacgctacagaacgctccggccccgagtccccaggctcagcgtgcagagcgtgggcatattatagcgcagtgaatccggagaaagatatacacagtggtcttatcggcccactgttaatatgtcaaaagggaattctccacaaggatagcaacatgcctatggacatgagggaattcgtgctcctcttcatgacatttgacgaaaaaaagtcctggtattacgaaaagaaatcaaggtctagttggcgccttaccagtagcgagatgaagaaatcacatgagttccacgcgattaacggtatgatctatagtcttcctggcctcaaaatgtatgaacaggaatgggtgcgtctgcatctgctgaacatcggcggctcccaggatatccacgtggtgcactttcacggccaaacactgttagagaacggcaacaagcagcaccaactaggcgtatggcctctcctgcccggaagcttcaagacgctcgagatgaaagcttccaagcccggatggtggttactcaacaccgaagtgggggaaaaccaaagagcggggatgcaaacaccattcctaatcatggatagggactgcaggatgcccatgggcctgagtacaggcatcatttccgattcccagattaaggccagcgagtttctaggatattgggagcctagacttgcccgattgaacaatggtggatcgtataatgcttggagcgttgagaaactggccgcggagttcgccagcaagccctggattcaggttgatatgcaaaaagaggttatcatcaccggaatacagacccagggcgccaagcattacctgaaatcatgttacactacagaattttacgttgcctactcttccaatcagattaactggcagatttttaaaggcaactcaactcgaaatgtgatgtacttcaacgggaattcagacgcatctacaatcaaggagaatcagtttgaccctcctatcgtcgctagatatatccgcatctctccaacaagagcctacaatcggcccaccctgcggctggaacttcagggctgtgaggtgaacggctgctccaccccactaggtatggagaacgggaaaatcgaaaacaaacaaataacagcctcgtcttttaaaaagtcttggtggggggactactgggagcctttccgtgcgcgtttgaatgcccagggaagggtcaacgcttggcaggccaaagccaacaacaataaacagtggctggagatcgacctgttgaaaattaagaaaatcaccgccataatcacccaaggatgtaagtctctgagcagcgagatgtatgttaaatcatatacgatccattattctgaacaaggcgttgaatggaagccatataggctgaaatcaagcatggtcgataagatcttcgagggtaacacaaacactaaaggccatgtaaagaacttctttaatcccccgatcatcagccgattcattcgcgtgatccctaagacctggaaccagtctatcgccctacgcctggaactgttcgggtgcgacatctat

SEQ ID NO: 9065 - DNA, 6672 bp, synthetic construct
  misc_feature 1..6672: note = source = /note="Description of Artificial Sequence: Synthetic coding sequence"
  source 1..6672: mol_type = other DNA
atgtttccggggtgtccgagactctgggtgcttgtggtgttgggaacgtcgtgggtggggtggggatcacaaggaaccgaagcggcacagctgcggcagttctacgtggccgcgcaggggatctcgtggagctacaggccggaaccaacgaactcgagcctgaatctgagcgtgacctcctttaagaagatcgtgtaccgcgaatacgaaccatactttaagaaagaaaagccccaaagcactatatccggactgctgggaccgaccctttacgccgaagtgggagatatcattaaggtccacttcaagaacaaagccgacaagccactgtccatccatcctcaggggattcgctattcgaagctgtcggagggtgcttcgtacctcgaccatactttcccggcggagaaaatggacgacgccgtggcccctgggcgggagtacacttacgaatggagcatctcagaggattcaggacctacccacgatgatccaccgtgcctgactcatatctactattcacatgagaacctgatcgaggacttcaactctggactgatcggccctctcctgatctgtaagaagggcacgctcactgagggaggaactcagaaaaccttcgacaagcaaatcgtcctgttgttcgcagtgtttgacgaatccaagtcctggtcccagagcagctcactgatgtacaccgtcaatgggtacgtgaatggaaccatgccagacataactgtatgcgcacatgaccatatctcgtggcaccttctgggcatgtcctcgggccctgaactcttttcaatccactttaacggtcaggtgctcgagcagaaccaccataaagtgtcagccatcaccttggtgtccgccacttcaaccaccgccaacatgaccgtcggccctgaaggaaaatggatcatttctagcctcaccccgaaacatctgcaggccggaatgcaagcgtacatcgacattaagaactgcccaaaaaagactcgcaatctgaaaaagattaccagagagcaaaggcggcatatgaagaggtgggagtactttatcgcagcggaggaagtgatctgggattacgcccctgtgatcccggctaacatggacaaaaagtaccgaagtcaacatctggacaatttctcaaatcagatcggaaaacactacaagaaggtgatgtacacccagtacgaagatgaatcattcacgaagcataccgtgaaccctaacatgaaagaagatggtattctcggtcccatcattagggcccaagtccgggacactctgaaaatcgtctttaagaacatggcctccagaccgtacagcatctacccgcatggagtgactttttcgccttatgaagatgaagtgaattcatcattcacctcgggccgcaataacaccatgatccgggctgttcagcccggggaaacttacacctacaagtggaatatccttgagttcgatgagccaactgaaaacgatgcgcagtgcctgacccggccgtactactcagacgtggacatcatgcgcgacatcgcctccgggctgatcgggctgctgctgatctgcaaaagccggtcactcgatcgcagagggatccagcgcgcggccgacatcgagcaacaggccgtgttcgcagttttcgatgagaacaagtcctggtacctcgaggacaatatcaacaagttttgtgaaaacccagacgaagtgaaaagggatgacccgaaattctacgaaagcaacattatgtcgaccataaacggttacgtgccggaatcaatcaccactctcggattctgcttcgacgatacggtccaatggcatttctgcagcgtgggaactcagaacgagatcctgactatccatttcacgggtcactctttcatctacggaaagcggcacgaagataccctcaccctcttcccgatgcgcggggagagtgtgaccgtgaccatggacaatgtgggaacctggatgctgacctccatgaattctagccctcgctcgaagaaactccggctcaagtttagagacgtgaaatgcattccggacgacgatgaggattcgtatgagatcttcgaaccgccggaatcgaccgtgatggcgaccagaaagatgcacgacagactggagcccgaggatgaagaaagcgacgccgactacgattaccaaaaccgcttggcagcagccctgggaattcggtcattccggaactcgtcgctcaatcaagaggaggaggagtttaacctcactgccctcgcgctggaaaatggaactgagttcgtctcttcgaacacggacatcatcgtgggctcgaactacagctccccaagcaacatcagcaagttcaccgtgaataacctggccgaaccgcaaaaggcaccgagccaccagcaagctaccaccgctggatccccgctgcgccaccttatcggaaagaattccgttctcaactcgtcgacggcggagcacagctctccatactccgaggacccaatcgaagatccgctgcagcctgatgtcactgggatccggctgctgtcactgggtgcgggagagttcaaatcccaggaacacgccaagcataaaggcccgaaggtggagcgcgaccaggctgctaagcaccgcttcagctggatgaagctgcttgcccataaggtgggccgacatctctcacaagacaccggctcgcccagcggcatgcggccgtgggaggacctgccatctcaagatactggctccccgagcagaatgaggccgtggaaggacccgccatccgatcttctgctgctgaagcagtctaactcctcgaagatcctcgtcggacgatggcacctggcttccgagaaagggagctacgagattatccaggataccgatgaagatactgccgtcaataactggctcatctcaccgcaaaatgcgtcgcgcgcgtggggcgaatcgactccactggcaaacaagccgggcaaacagtcaggccaccctaagttcccgcgagtgcgccacaaatcccttcaggtccgccaagacggaggaaagtcacggcttaagaagtcgcaattcttgataaagactaggaagaaaaagaaggaaaagcatactcatcacgcaccactgtcgccccggactttccacccgctccgtagtgaagcgtataacaccttcagcgaacggcgtctgaagcactcgctggtgttgcacaagtccaacgaaactagccttccgactgatctcaaccagaccctcccctccatggactttggatggatcgcgtccttgccggaccacaatcaaaactcgtccaatgacacgggccaggcatcttgcccgccaggcctctaccagaccgtgccgccagaggagcactaccagactttcccgatccaggacccagaccaaatgcatagcacttcggacccgtcgcacagatcctcgagccccgaactgtctgagatgttggaatacgaccggtcacacaagagcttcccgacggacatttcgcagatgtccccatcaagcgaacacgaggtgtggcagaccgttatcagtcctgatctgtcgcaggtgactctctcgccggaactgtcgcaaactaacctctcgcccgatttgtcacataccaccctgtctcccgagctgatccagagaaatctctccccggcgctgggtcaaatgccaatcagcccagatttgtcccacacgaccctttcgccggacctgtcacacacgacgctctcgcttgatcttagtcaaactaatctctcaccggaactgagtcagaccaatctctcgccagctctcggtcagatgcctctgtccccagatctctcgcacactaccctgtcgctggatttctcacagaccaatctgtcaccggagctgtcccacatgaccctgtcgcccgagttgtcacagactaacctgtccccggctctgggacagatgccgatttcaccggatctgtcgcatactaccttgtcgctcgacttttcgcagaccaacttgtcccctgagctgtcgcaaacgaatctgtctcccgcgcttggtcaaatgccgttgtccccagacccatcgcacactactctgtcgctggacctgtcccagacgaacctctcaccagagctctcccaaactaacctttcgcctgacctcagcgaaatgcctctgttcgctgaccttagtcaaatcccgcttactccggacctcgaccagatgacgctctcgcccgacctcggggaaactgacctcagccctaacttcggccagatgtctctgtcccccgacctttcgcaagtaaccctgtcccctgatatatctgacactacccttctccctgacttgagtcagatcagcccaccaccggacctggaccaaatcttttacccgagtgaatcctcgcagagcttgctgctgcaggagttcaacgaatccttcccgtaccctgatctgggccaaatgccatcgcccagctcaccgaccttgaatgataccttcctttccaaggaattcaatcccctggtgatcgtgggattgtccaaggacggaactgactacattgagatcattcccaaggaggaagtgcaatcctcggaggacgattacgctgaaatcgactacgtcccgtacgacgacccttacaaaaccgatgtgcgcactaacatcaattcatcccgggatcccgacaacatcgccgcttggtatctgaggtccaataatggaaatcgcagaaactactacatcgccgcggaagaaatcagctgggactactcggaatttgtgcaaagagaaactgatatcgaggactcggacgacatcccagaggatactacttataagaaagtggtgttcagaaagtacctggactccaccttcactaagagagatcctcgcggcgaatacgaagagcatttgggcatcctcggaccgatcattcgcgcagaggtcgacgacgtgattcaggtgaggttcaagaacttggccagccgcccttactcactgcacgcccacggactcagctacgaaaagtcctcagagggcaaaacttacgaagatgactcaccagaatggttcaaggaagataatgccgtccagcctaactcttcatacacctacgtctggcacgcaaccgagcgctctggaccggaatcccctggctcggcatgcagggcatgggcctactatagcgctgtgaacccggaaaaagatatccactccggtctgatcggaccactgttgatttgccaaaagggcattctccataaggatagcaacatgccaatggacatgcgggaattcgtgctgctgttcatgacctttgatgaaaagaagtcatggtattacgagaagaagtccagatcgagctggagactgacttccagcgagatgaaaaagtcccacgagttccatgccatcaacggaatgatctacagcctccccggactcaagatgtacgagcaagaatgggtccgcttgcacttgttgaatatcggagggtcacaggatattcacgtggtccatttccacggacagaccctcctggaaaatgggaacaagcagcatcagttgggagtttggccgcttcttccggggagcttcaagaccctggagatgaaggcttcaaaaccaggatggtggctgctgaataccgaagttggcgaaaaccaacgggccggtatgcagactccgtttctgattatggaccgggattgtaggatgcctatgggactgtcaacgggtatcatctccgactcgcagatcaaggcttcggaattcctcggatactgggaaccgagactggccagacttaacaacggtggatcctacaacgcctggtcggtcgaaaaactggccgccgaatttgcatccaagccgtggatccaagtcgatatgcagaaggaagtaatcatcaccggaatccagacccagggcgcaaagcactacctgaagtcatgctacaccactgagttctacgtcgcatactcctcaaaccagatcaactggcagatctttaaaggaaactccacccgtaacgtcatgtacttcaacggaaactccgatgcttcgactatcaaggaaaatcagttcgacccaccaatcgtcgcccgctacatccggatcagcccgactcgcgcctacaacagacctaccctgcgccttgaactgcagggatgtgaggtcaatggatgctcaactccgctcggcatggagaacggtaagatcgagaacaaacagattactgcgagctccttcaaaaagagctggtggggtgactactgggagccttttagggcacgtttgaatgcgcagggacgcgtcaacgcgtggcaagccaaagcgaacaataacaaacaatggctggaaatagacctcttgaagatcaaaaagatcaccgcgatcatcactcagggctgcaagagcctctcctcagaaatgtatgtgaaatcgtataccatccactactcggaacagggagtggagtggaagccataccgcctgaagagctcgatggtggataagatcttcgaaggcaacaccaatactaagggacatgtgaaaaactttttcaatccgcccatcatatcccgattcattcgcgttatcccaaagacctggaatcaaagtatcgccctgcggctcgaacttttcggatgtgacatctac

SEQ ID NO: 9066 - DNA, 6672 bp, synthetic construct
  misc_feature 1..6672: note = source = /note="Description of Artificial Sequence: Synthetic coding sequence"
  source 1..6672: mol_type = other DNA
atgttccctgggtgtcctagactgtgggtgctggttgtgctcggaacatcatgggtggggtggggatcccagggcaccgaagcagcacaacttagacagttctatgtcgccgcacaaggcatttcctggagctacaggcccgaacccacaaacagctcactcaacctgtctgtcaccagctttaaaaaaattgtataccgggaatacgagccatatttcaagaaggagaagccacaatccaccatcagcggcttgctgggaccaaccctatacgccgaagttggtgacattatcaaggtgcacttcaagaataaagccgacaagccgttgtcaatacatccccaaggaattcgctattcgaagttgagtgagggcgcttcatacttggaccatactttcccagcagaaaaaatggacgatgcagtggcacccgggagagaatacacttacgagtggagcatctctgaggattcaggaccaacacacgatgaccccccgtgcctgacacacatctattactcccacgaaaacctgatcgaggatttcaattccggtctaatcggcccgttgttaatttgtaaaaaaggtaccctcaccgaaggaggcacccagaaaaccttcgataaacagattgtactcctctttgcggtgttcgacgagtccaagtcatggagtcaatcatcttccctaatgtacacggtgaatggatatgtgaacggaactatgcccgacattacagtttgcgcacatgaccatatttcttggcacctcctgggtatgtcctcggggcccgagctgttttctatccattttaatggccaggtactggagcagaatcaccacaaagtgagtgctatcacactagttagtgctacctccaccactgcaaacatgacagttggtcctgaggggaagtggattatttccagtctcacccctaagcacctgcaggccgggatgcaggcctacattgacatcaaaaattgtcccaaaaaaacaagaaatctaaaaaaaataactcgcgaacaacggcgccatatgaaaaggtgggagtacttcatcgcggccgaagaagtgatctgggactatgccccagttatacctgccaatatggacaagaagtatcggtcccagcacctggataacttctcaaaccagattgggaagcactacaaaaaggttatgtatacccagtatgaggacgagagcttcactaaacataccgtgaatccaaacatgaaggaagatggaatcctgggtcctattatccgcgcccaagtccgggataccttgaagattgtttttaaaaacatggccagtcgaccgtacagtatctaccctcatggagtaacctttagcccctatgaggacgaagtcaattctagttttacctctggccgtaacaacacaatgatccgcgcggtgcagcctggagaaacatacacttacaagtggaatatcctggaattcgatgaacctaccgaaaatgatgcacagtgcctaacacgcccctattactccgatgtggacattatgcgcgatatagcttcggggctgattggcctcctcctaatttgcaagtcacgcagtcttgaccggagaggaatccagcgagcagccgacatcgaacaacaagcagtgtttgctgtctttgacgaaaataagtcatggtacttggaagacaatatcaataagttttgtgaaaatcctgatgaggtgaagagggatgaccccaaattctatgagtctaatatcatgtcaacaattaacggatacgtgcctgaaagcataacaacactgggtttttgttttgatgacacagtgcagtggcacttttgtagtgttggaacgcagaatgagatcctgactatacatttcacggggcattcctttatctacggcaagcggcacgaagataccctgacactgtttccgatgcgcggagaaagcgttaccgttactatggataacgtcgggacttggatgctgacgagcatgaactccagccctcgctctaagaagctgcgacttaagtttcgcgacgtgaaatgtatacccgatgacgatgaagactcttacgaaatctttgaaccaccagagagcacggtcatggccacaaggaagatgcacgacagactggagccggaagatgaagaatctgacgcagattacgactatcagaacagactggctgccgccctgggtattcggagctttagaaactcgtcactgaatcaggaggaagaagagtttaacctaacagccctggccttagaaaacggtactgagtttgtctccagcaatacagatatcatcgtgggctctaattactcttcccccagcaacatatcaaaattcaccgtcaacaatctggccgaaccccagaaagcaccgagtcaccagcaagctacaaccgctgggagtccccttcggcacttgattgggaaaaacagcgtgttgaactcctctactgccgaacactcttccccttactccgaggacccgatagaagatccccttcagcctgacgtgacaggtatccgtctactgtcattgggtgcaggggaattcaaatcgcaggaacacgcaaagcacaaggggcccaaggtggaaagggaccaggccgcaaagcatagattttcttggatgaagcttttggcccacaaagtgggaaggcacttgtcccaggatactggaagcccttctggaatgagaccctgggaggaccttccctcacaggataccggcagcccttcaaggatgaggccgtggaaggaccccccctctgatctcctcctcttaaagcaatccaattcctcaaaaatcctggtcggtaggtggcacctggcttctgagaagggctcttatgaaatcatccaagacacagacgaagacactgctgtaaataattggctgatatccccccaaaacgccagccgggcttggggagagagtacccccctggcgaacaagccaggcaagcagagtgggcatcctaagttccctcgcgtgcggcataaatctctccaggtgaggcaggatggcggcaagagccgccttaagaagtcccagttcctgattaaaaccaggaagaagaagaaagaaaagcatacacatcatgctccccttagccccaggacgttccacccgctcagaagcgaggcttacaacaccttcagtgagcgacgactgaagcatagcctggtgctgcataaatcgaacgagacctcattgcccacagacctgaaccagactctaccaagtatggactttggttggattgcctctctgcccgaccataatcagaactccagcaacgacacagggcaggctagctgcccccccggactataccaaaccgtgccgcctgaagagcactaccagacatttccaatccaggatccggatcagatgcactccaccagtgaccccagccatcgaagctcatcgcccgaattaagtgaaatgttagagtatgaccgcagccacaaatcttttcctaccgatatatctcaaatgtcacctagttctgagcacgaggtgtggcaaaccgtgatttccccagatttatcgcaggtgaccctgtctcctgagctctctcagaccaatctttcgcctgacctgtcacacaccaccctttctcctgagttgatccagcggaacctcagccccgcgctcggacagatgccgatttcaccggacctgtcacacactacgttatcgccggatctgtctcacacgacactgagcctggatttatctcagactaatctctcacccgagttgagccagaccaatttgagccctgcgctgggccaaatgcctctgagtccggatctaagtcatacaactttgtcgctggactttagtcaaaccaacttatcccccgagttgagccacatgacactgtctcccgagctgtcccagacaaatttgagtcccgcgttgggacagatgccaatatcccccgacctgtcccacacaactttatccctagatttttcccagactaatctctctcccgagctgtctcagacaaatttgagtcccgcactgggccaaatgccactctccccggatcccagccatacaaccctgagtcttgatctgtcgcaaacaaacttgtccccagaattatcccagaccaacctatcacccgacttatccgagatgcccctctttgcagaccttagccagattcctctgacgcccgatctcgaccagatgactctcagcccggacctgggtgaaacagatctctctcctaatttcgggcagatgtccctgtcgccagacctgtctcaggttactctctcaccagacatttccgacaccactctgttaccggacctgtcacagatctcaccccctccggatctagaccagatcttctatcccagcgaaagtagtcagagtctccttcttcaggagtttaatgagtcattcccataccctgacctcggacagatgccttctcccagttcccccacgcttaacgacactttcctgagcaaagaattcaatcccttggttatagtaggcctcagtaaagacggaactgactacatcgagatcatcccgaaggaagaggttcaaagctctgaggacgattatgccgagattgattatgtgccttatgatgacccctacaaaaccgacgtccgcacaaacattaacagcagtcgggaccccgacaatatcgccgcctggtatcttaggtccaacaacggaaaccgccggaactactacatcgcagcagaagaaatcagctgggactacagcgagtttgttcagcgtgagaccgacattgaggattccgacgacatccccgaagacactacttacaaaaaggtcgtcttcaggaaatatctggactcaacgttcaccaagagggaccctagaggcgagtacgaggagcacctaggcattctgggccctataatacgcgctgaagtggacgacgtaatacaagttagatttaaaaacttggccagccgaccttattctctgcacgcccacggtctctcctatgagaaatcttcagaggggaagacctacgaagatgatagtccagaatggtttaaggaagacaatgctgttcagccgaacagctcttatacatacgtttggcacgccaccgagcggtccggaccagagagccccgggtccgcctgtcgggcatgggcctattattctgcggtaaatccagagaaggatatacacagtggtttaattggaccactgctgatctgccagaagggaatcctgcataaagacagtaacatgcccatggatatgcgcgagtttgtcctgctgtttatgaccttcgacgagaagaagtcatggtattacgaaaaaaagtcacgctcaagttggagactcacaagttcagagatgaagaagagccatgaattccacgccattaatggaatgatttacagcctgcctgggttgaaaatgtacgagcaggaatgggtaagactccaccttttgaacattggcggatctcaggacatacacgtcgtgcactttcatggtcagactttgctcgaaaacggcaacaagcagcatcagcttggagtctggcccttgctgccaggcagcttcaagaccctggagatgaaggcaagtaagcctggctggtggcttctcaataccgaggtcggggaaaatcaaagagccggaatgcaaacacctttccttatcatggatcgggactgccgtatgccaatgggcctgtccacaggaatcatcagtgatagtcagatcaaggcttcagagttcctcggttattgggaacccagattggccaggcttaacaatggggggagttataatgcctggtccgtagagaaattagcagctgagttcgccagcaagccgtggatacaagtagacatgcagaaagaggttatcatcacaggcattcagacgcagggagcgaagcactatcttaagtcatgctatacaaccgagttctatgttgcttatagcagcaaccagattaactggcagatcttcaaggggaacagtacgagaaacgtaatgtactttaatggcaacagtgatgctagtaccattaaggagaaccagtttgacccaccgattgtcgcccgatacataagaatcagcccaacccgggcatacaaccggcctacgctaaggcttgagcttcagggatgtgaagtcaatggatgtagcacaccgctgggcatggaaaacggaaaaatagagaacaaacagatcacagcgagctctttcaagaagagctggtggggtgattattgggagcccttccgtgcccgactgaatgcccagggacgggtgaatgcttggcaggccaaggccaataataacaaacagtggctggagatagacctcctgaagatcaaaaagattaccgcgataataacgcaaggatgcaagtccctgtcctccgagatgtatgttaagtcatatacgatccactacagcgagcaaggcgtcgagtggaagccatatagacttaaatctagcatggtcgacaaaatattcgagggcaatacgaacacaaaaggccacgttaagaacttcttcaaccctccaattatttcacggtttattcgtgtgataccaaagacctggaaccaaagcatcgcactccggcttgaactgttcgggtgtgatatctac

SEQ ID NO: 9067 - DNA, 6672 bp, synthetic construct
  misc_feature 1..6672: note = source = /note="Description of Artificial Sequence: Synthetic coding sequence"
  source 1..6672: mol_type = other DNA
atgtttccgggttgtcctagactgtgggtgctggtcgtgcttggcaccagctgggtgggttggggatctcagggcactgaggcagcccaactgcgccagttttacgtggctgcacaaggaatttcatggtcgtacagaccagaacccaccaactcaagcctcaacctgtcggtgaccagcttcaagaagatagtgtaccgcgaatacgagccttactttaagaaggaaaagccacaatctactatttcaggtcttttggggccgactctgtacgccgaggtgggagacatcattaaagtgcatttcaagaataaagcagataagccattgtccatccacccccaagggatacggtactcaaaactgtccgaaggtgcatcctacctggaccatacgttccctgccgaaaagatggatgacgcagtggcgccgggaagagagtacacttacgaatggtcaatctccgaggactcaggacctacccacgatgatcctccgtgtcttactcatatctactacagccacgaaaatcttattgaggactttaactcggggctcattggccctctccttatttgcaagaagggcaccttgaccgaaggagggacccagaaaacctttgataagcagatcgtgttgctctttgcagtgtttgatgaaagtaaaagctggtcacagtcctcatcccttatgtatactgtgaacggatacgttaatggtaccatgcctgatattaccgtctgtgcccatgatcatatctcatggcatctcctcggaatgtcgagcggcccagaactgttctccattcactttaacgggcaggtgctggaacagaaccatcataaagtgtccgctatcactctggtgtccgcaacctctaccaccgccaacatgaccgtcggtcctgaaggcaaatggatcatctcgtcactgacgccaaaacatctgcaagcaggaatgcaagcctacattgacatcaaaaactgtcccaagaaaactcggaacctcaaaaagatcactcgagaacaaagaaggcacatgaagcgttgggaatactttattgccgcagaagaggtcatctgggactacgcacctgtgattcccgccaatatggataagaaataccggagccagcatcttgataacttttccaaccaaattggaaagcactacaagaaagtgatgtacacccaatacgaagatgaaagttttactaagcataccgtgaatcccaacatgaaagaagatggtattctgggacccattatcagagcccaggtgagggacaccctcaagattgttttcaagaacatggcaagcagaccctattcgatctacccacatggtgtgacgttctcgccgtacgaggacgaggtcaactcctcatttacgtcaggacgcaacaacaccatgattcgagcagtgcagcctggtgaaacttacacctataagtggaacatccttgagtttgatgaacctaccgaaaacgatgcacagtgtctgacgcgtccctactactcggatgtggacataatgcgggatattgcatcagggctgataggacttctgcttatttgtaagtcccgctcacttgaccggcgcggtattcagagagcagcagatatcgaacagcaagccgtgtttgctgtgtttgacgaaaacaagagctggtacctcgaagataacattaacaagttttgtgaaaacccagatgaggtcaagagagacgacccgaagttttacgagtccaatatcatgtccacgattaacgggtatgtccccgaaagcattaccacccttggattttgttttgatgataccgtccaatggcacttttgttcggttggtactcaaaatgaaattctgactatccactttactggccacagcttcatttacgggaagcgccatgaggacacccttaccctctttccaatgcgcggagaatcggtcacggtgaccatggataacgtgggtacctggatgctcacttccatgaacagctcacctcggtctaagaaactgcgtttgaagtttcgggatgtcaaatgtatcccagatgatgatgaagattcgtacgagatcttcgaaccacctgaatcaacggtcatggcaactcgaaagatgcatgatagacttgaacctgaagatgaagagagcgatgcagattacgattaccaaaaccgtctggcagcagcccttggtattaggagctttaggaattcgtctctgaatcaagaagaggaagagtttaatctgactgccctggcgctggaaaacggaaccgaatttgtctcctcgaacacggacattattgttggctcgaactattcctcgccttcgaatatctccaagtttactgtgaacaacctcgcggaaccgcaaaaggcaccctcacaccaacaggcgaccactgcaggctcccctcttcgccacctgattggtaagaacagcgtgctcaattcgtcaactgccgaacattcgtccccatacagcgaagatcctattgaggaccctcttcagcctgacgtgaccggaataagactgctgtcactgggagcaggtgaattcaaaagccaggagcatgcgaagcataagggacctaaagtggaaagagatcaggcagcaaaacataggtttagctggatgaagctgttggcccacaaggtgggacgccatctgtcccaggataccggatctcctagcggaatgcggccgtgggaggaccttccctcacaagatactggcagcccatccagaatgcgaccatggaaggatccccccagcgaccttcttctcctgaagcaatcgaactcatccaagatcctggtgggcagatggcatctggcatcggaaaagggcagctacgaaatcatccaggataccgatgaggacactgctgtgaacaactggcttatctcccctcaaaacgcatcccgcgcatggggtgagtctaccccattggcaaacaagcctggcaagcagagcgggcacccaaaattcccacgcgttcgtcacaaatctctgcaggtccgacaagatggaggaaaatcgcgactcaagaaatcccagttcctgattaagactcggaagaagaaaaaggagaagcatactcaccatgctcccctttcccctcgcaccttccatcctctgcggtcggaagcctacaataccttctccgaaagacgtcttaaacactccttggtcctgcacaagtctaacgaaaccagcctcccaaccgaccttaatcaaactctgccatccatggactttggatggattgcaagcctgccagatcacaaccaaaactcttccaacgatactgggcaagcgagctgccctccaggattgtaccaaacggtgccgccagaagagcactaccaaacctttccaattcaggatccagatcagatgcattcgacctcggacccatcgcatagatcgagctctccagaactcagcgagatgcttgagtacgatcggtcccacaaatcatttccaactgatatcagccaaatgtcaccatcatcagaacatgaagtgtggcaaaccgtgatctcccctgacctttcgcaagtgaccctgtcccccgaattgagtcaaactaatctgtcaccagatctctcgcatactactctgagccccgaattgattcaaaggaatctctcgcccgcgttgggacagatgccaatatcccctgacttgtcacacactaccctttctccagatctcagccatacgaccctctccctggatcttagtcagactaacctttcgccggagctgagccagacgaatttgtcgccagccctcggtcaaatgccactgagcccagacctgtcgcacaccacgctttccctggatttttcacaaactaatctcagccctgagctgtcgcacatgactcttagcccagaattgtcacagactaacctcagcccagcactgggacaaatgccgatttcgccagatctctcccatacgactctgagcctggacttttcccagaccaaccttagcccagagctgagccaaactaacctttccccagccctgggtcaaatgcccctctccccagatcctagccacaccaccctgtcgcttgacctctcgcagacgaacctgtcacctgaactttcccaaaccaacctctcaccagacctgtccgagatgcccttgtttgctgatctgtcacaaatccctctgactcctgaccttgaccaaatgacgctgtccccagatctcggtgaaaccgatctttcgcctaactttggtcaaatgtcattgtcaccggacctttcccaagtcactctctcccctgatatctcagataccacccttcttcccgaccttagccaaatctctcctccaccggaccttgatcagatcttttacccatccgaatcatcccaatcgctcctgctgcaagaattcaacgaatcattcccctaccctgatcttggacagatgccttcaccctcctcccccactcttaacgataccttcctcagcaaagagtttaaccccctggtgatagtcggtcttagcaaagatgggaccgactacattgaaatcatacctaaagaggaagtgcagtcctccgaggatgactatgcagaaatagactacgtgccctacgacgacccttacaaaacggatgtgagaaccaacattaacagctcaagagatcctgacaatattgctgcatggtacctgcggtcaaacaatggaaatcgccgtaactactacatcgccgcagaagaaatttcgtgggactacagcgaatttgtccagagagagacggatattgaagattcggatgacattcccgaggacaccacctacaagaaggtggtgttcaggaaataccttgattccactttcactaagagggatccaaggggtgagtacgaagaacatctgggtatcctcggaccaatcataagagctgaggtggatgatgtgattcaggtgcgctttaagaatcttgcgtccagaccttactcactgcacgcccacgggctgtcatatgaaaagtcatcggagggaaaaacgtatgaggacgatagccctgagtggttcaaagaggataatgccgtgcagccaaactcgtcctacacttatgtatggcatgctacggagcggtccggacctgagtcgccaggatccgcatgcagggcatgggcctactacagcgcggtgaaccctgagaaggatatccattcgggcctgattggccccctgcttatttgccagaaaggcattctccataaggattccaacatgcctatggatatgcgcgagttcgtccttctgtttatgactttcgacgagaagaaatcatggtattacgagaaaaagtcacgatcctcctggagattgacgtcgtccgagatgaagaaaagccacgaatttcatgccattaatggtatgatctattcccttccggggctgaagatgtacgaacaagagtgggttcgccttcacctcctgaacatcggtggctcacaggatatccacgtggtgcattttcatggtcaaaccctcctcgaaaacggtaacaaacaacatcagcttggagtttggcccttgctgccgggttcattcaaaactctcgagatgaaggcatcaaagccaggttggtggcttctcaacacggaagtgggagaaaaccaacgggcaggtatgcaaaccccatttcttatcatggacagggattgtcgcatgcctatgggtttgtcgactggaatcatatcagactcacaaatcaaagcatcagagtttctcggttattgggaacccagactggcacgtctgaacaatgggggttcttacaacgcatggtcggtggaaaaacttgcggcagagtttgcgtcgaaaccttggattcaggtggatatgcaaaaggaagtgatcattaccggcattcaaactcagggagcaaagcactacctcaaatcgtgctacactactgaattctacgtggcctattcatccaatcagattaactggcagatctttaaggggaactcaaccagaaacgtgatgtacttcaatggtaattcagacgcatcaactataaaggagaatcagtttgaccctccaatcgtggcgagatacatccgtatcagccccactcgggcatacaaccggcccactctgagactggaactccagggatgtgaagtgaacggatgctcgacccctcttggaatggaaaatggtaagatagagaacaaacaaattaccgcaagttcctttaagaagtcttggtggggagattactgggagcccttcagagcaaggcttaatgcacaaggaagggtgaatgcatggcaggccaaagctaataacaacaagcaatggttggaaattgatcttctgaagattaagaagattaccgcgatcataactcaagggtgtaaatctcttagctcggaaatgtacgtgaagtcatacactatacattactccgaacaaggggtcgaatggaaaccttaccggcttaagtcatccatggtggacaagatttttgaaggtaacactaatactaaaggtcatgtcaagaacttcttcaacccacctatcatctcacgctttatacgggtcatcccgaaaacctggaaccagtccattgcactcagactggaactgtttgggtgtgacatatat

SEQ ID NO: 9068 - DNA, 6672 bp, synthetic construct
  misc_feature 1..6672: note = source = /note="Description of Artificial Sequence: Synthetic coding sequence"
  source 1..6672: mol_type = other DNA
atgtttccaggctgcccccggctgtgggtactggtggttttaggcacaagttgggtaggttgggggtctcaaggcactgaggcagcccagctaaggcagttctacgtcgcagcacaggggatctcttggagctaccgccctgaacccacaaactcatccctgaacctgtccgttacaagttttaaaaagatcgtgtatagagagtatgagccttactttaaaaaggaaaaaccccagagtactatcagtggcctgttggggcctaccctctacgctgaagtgggagatattattaaggtgcatttcaaaaataaagcagacaagcctctctcaattcatccccaaggcattagatacagcaaattaagcgagggggcctcttatctagatcatacattcccagccgagaaaatggatgacgccgtagcgcccggacgtgaatacacttacgagtggagtattagtgaggactctggccccacgcacgatgaccccccttgtctcactcacatctattattctcacgagaatttgattgaagactttaactccggcctgatcggaccactccttatctgtaaaaaggggaccctgacagaaggagggacgcaaaagacattcgataaacaaatagtgctcctgtttgctgtgttcgatgagtccaagtcctggtcacagtcctcttcgctgatgtataccgtcaatggttatgtcaatggaacaatgcccgatatcacagtgtgtgcacacgatcacatttcatggcacttgcttgggatgtcttccgggcccgagttgttctcgatccacttcaacgggcaagtcctcgagcagaaccatcacaaggtgtccgccattacattagtatcggctacctctacaaccgctaacatgactgtgggccccgagggaaagtggatcataagttctttgacgccaaagcacctgcaagccggcatgcaggcctacattgacattaaaaactgcccaaagaagacccgcaaccttaaaaaaatcacacgcgaacagcgcagacatatgaagcgttgggaatatttcatcgcagccgaggaggtaatctgggactacgccccggtgattcctgcaaatatggataagaaatatcgaagccagcatctagacaacttttccaaccagattggcaagcactacaaaaaagtgatgtatacacagtacgaggatgagagtttcaccaaacatactgttaacccaaacatgaaggaggacggcattctcggtccaataattagagctcaggtcagagacacgctgaagatcgtctttaagaacatggcatctagaccttactccatatatcctcacggagtcacattcagtccctacgaagatgaggtcaattcgtcctttacaagcgggcgcaataacaccatgatcagggctgtgcaaccaggcgagacctatacgtataaatggaatattcttgaattcgacgagccaaccgagaacgatgcacaatgccttacgaggccctactactccgatgtcgacatcatgcgcgacatagcgagcggattaatcggactcctgctaatctgtaagagtagatcactggacagacgaggcatccaacgggccgcggacattgagcagcaggccgttttcgccgtgttcgacgaaaataagtcgtggtacctggaagataacatcaacaagttctgcgagaatcctgacgaggttaagagggacgaccccaaattctatgagagcaatatcatgtctacaataaatggctacgtgccagagtccatcactaccttgggtttttgtttcgacgacacagtgcagtggcatttctgctctgtgggcacacagaatgaaattctgactattcactttaccggccacagctttatctacggtaaacgtcacgaggacactctcacactcttcccgatgcgcggagaatccgtgaccgtcactatggataatgtagggacctggatgctgacgtcaatgaacagctccccccgcagtaagaaactccgcctgaagtttcgggacgtaaaatgcatcccagatgacgacgaagatagttatgagatctttgaacctcccgagtccactgtgatggccactaggaagatgcacgaccgcctggaacccgaggacgaggaaagtgacgccgattatgattaccagaatagactcgcggctgcgctcggcatccggtcctttaggaacagcagcctgaatcaggaggaagaggagtttaatctcacagcacttgctctcgaaaatgggaccgaattcgttagctcaaacacagatataatagtcggatccaattactcttccccaagcaacatcagcaagttcactgtgaataatcttgcggagccccaaaaggcaccaagccatcagcaggctacaactgcaggcagtccccttcgtcacttgattggcaaaaattcagtcctgaactccagcaccgcagagcattcttccccttactccgaggatccaattgaagatcccctgcagccagacgtgacgggaattagactcctgtctttgggggccggcgagttcaaatcacaggaacacgccaaacacaaggggccaaaggtggaacgagatcaagcagccaagcacaggttttcatggatgaagttactagctcacaaggttggcaggcacttgagtcaagacaccggctccccttcgggcatgaggccatgggaagacttaccctcacaggacaccgggagcccgtctagaatgcgtccctggaaagaccccccctcagacttgcttctgttgaaacagtccaactcgtcaaaaatattggtcggtcgttggcacctggctagtgagaaggggtcttacgagataatacaggacacagatgaagacactgctgtgaacaactggctaataagtcctcagaacgcttctagagcatggggggaaagtacccctcttgcgaataaacccgggaagcagagcggccatcccaaattcccgagagtgaggcataagtcattgcaagtccggcaggacgggggaaaaagccgcttaaagaaatctcagttcctgattaagaccagaaagaagaaaaaggagaaacacacacaccatgcacccttgagtccaaggaccttccatcctctaagaagcgaagcctacaataccttctccgaacggagactcaagcactccctggttctccacaagtctaatgaaaccagcctgcctacagatcttaatcaaactcttccttcaatggactttggatggatcgcaagcttgcccgatcacaatcaaaattcgagtaatgataccgggcaagcctcgtgccctcccggcctgtaccagacagtaccaccagaggaacattatcagaccttcccaatccaggatcctgatcagatgcacagcacgtcagatccttcccaccgttctagtagccccgagctgagcgagatgctggagtatgatagatctcataagagtttcccgacagatatctcacagatgagtccctctagtgagcatgaggtttggcagactgttatctctcctgatctgagtcaggtgacccttagccccgagttgagtcaaacaaatttaagcccagaccttagccacaccacactcagccccgagttgattcagcgcaatctttcacctgctctgggtcagatgcctatatccccggacctcagccatacaacattgagtcctgaccttagccataccacactgtccctggaccttagtcagactaatctgagccccgaactctcccagacgaacttgagcccagctctaggacaaatgccacttagccccgacctgtcacatacgacgctttctctcgatttttcgcaaacgaatctgtctcccgaactcagtcacatgaccctgtcccctgaactgagccaaacaaacctgtcgcctgccctcgggcagatgcccataagtcccgatctgtctcataccaccctctcattggatttttcacagactaacttaagtccggagctatcccagaccaacctgtcaccggccctcgggcagatgccactcagccccgacccaagccataccacgctaagcctggacctcagccagaccaacctcagtcccgagctgtctcagaccaacctgagccccgatctcagtgagatgcccctatttgctgacctgtcgcaaatcccgctgacacctgatttggaccagatgactctgagtcccgatcttggagaaaccgatttatctcccaatttcgggcaaatgagcctgagcccagacttgagccaagtgacactgagtcctgacatctccgatactaccctcctgccagatctctcacaaatctcgcccccacctgacctcgaccagattttctatccctccgagtcgagccaatccctcctgttgcaggagtttaacgagagcttcccataccctgacctcgggcaaatgccaagcccatcttctcctacactgaacgataccttcttgtcaaaagagttcaatcccctggtgatagttggcctgtccaaggatggaacggattatattgaaattattcctaaagaagaggtacagtcctcagaagacgattacgctgagatcgattacgttccctacgacgatccgtataagactgacgtgcggacgaacataaactcatccagggatccagataacatagctgcctggtatctgcggtctaataacgggaataggcgaaactactatattgctgcagaggagatctcttgggactactccgagttcgtgcagagagaaacagatatcgaggactcagatgacatccccgaagatacgacctacaagaaggttgtgttccggaagtatttggatagtacctttaccaagagagatcctcgaggcgaatatgaagagcacctaggcatcctgggacccattattagagccgaggtcgatgacgtgattcaagtgcgtttcaaaaatctggcctcacggccatacagccttcatgcccatggtttgagctacgagaaatccagcgaaggcaagacctatgaagatgattcccctgaatggttcaaggaggataacgccgttcagccaaactcaagttacacatacgtatggcatgccaccgagaggagcggccccgagagtccaggaagcgcttgtcgagcgtgggcatattattccgccgtcaaccctgaaaaggatatccattcgggcctcattgggccactactgatctgccaaaagggaatcctccacaaggattctaatatgccgatggatatgagagagtttgtcttgctcttcatgacatttgacgaaaagaagtcctggtactacgagaagaaatctaggagctcctggaggctcaccagctccgagatgaagaagagccacgagtttcacgcaattaacgggatgatctatagtctgcctggcctgaaaatgtatgagcaggaatgggtccggttgcatctcctaaacatcggcgggtcccaggacattcacgtggttcattttcatggtcagactcttctggaaaatggcaataagcagcaccagttgggggtgtggccactgctgccagggagtttcaagaccctcgagatgaaggcgtcaaaaccaggctggtggcttctgaacactgaggtaggggagaaccagagggccggtatgcagaccccctttctgataatggatagagactgtcgaatgcccatgggcctttcaactggcatcatctccgactcacagataaaagctagcgagtttctgggttactgggagcctcggctggctagactgaataatggcgggtcctacaacgcgtggtcagtcgaaaagctcgccgccgagttcgctagcaaaccatggatacaagtggatatgcagaaggaggtgatcataaccgggatacagacccagggcgctaaacattatttaaagagttgttataccaccgagttctacgtggcctatagctccaatcagattaactggcagatctttaaagggaactctactagaaatgtgatgtactttaatggcaactcggacgccagcactatcaaggagaatcagttcgatccacccattgtagccagatacatccggatcagcccaacccgagcttacaacagacctacactccgcctcgaactgcagggctgcgaggttaatggttgcagtaccccattggggatggagaacggtaagattgaaaacaaacagataactgcctcatctttcaagaagagttggtggggcgattactgggagccttttcgcgccaggctcaacgcccaaggaagggtcaacgcatggcaagccaaggctaacaataataagcagtggctggagatcgacctactgaagattaaaaagattaccgcaattattacccaaggctgtaagtcgctgagctccgagatgtacgtgaagagctataccatacactactccgagcagggtgtggaatggaagccgtatcgtttgaagtcgtccatggtagacaaaatctttgaggggaatacaaacacaaaggggcacgtgaaaaactttttcaatccgcctattatctcccgcttcatacgcgtgattccaaagacctggaaccagtcaattgccctacggctagagcttttcggttgcgatatttat

SEQ ID NO: 9069 - DNA, 6672 bp, synthetic construct
  misc_feature 1..6672: note = source = /note="Description of Artificial Sequence: Synthetic coding sequence"
  source 1..6672: mol_type = other DNA
atgttcccaggctgcccacgcctgtgggtcctcgtcgtcctaggcacaagttgggtagggtgggggagtcagggaactgaagctgcgcagctaaggcagttctacgtggccgcccagggcataagctggtcctatagacccgaacctactaattcatccctcaacctgagcgtaacttctttcaaaaagatcgtttatcgggaatacgagccctactttaagaaagaaaaacctcaaagtaccatctcgggcctcctcggccccaccctctatgcagaggtgggggacatcatcaaggtacattttaagaacaaggccgacaagccactgagcatccatccacagggtatccggtactccaagctgtcagagggcgccagctacctagaccacacctttcctgccgaaaaaatggacgatgctgtggcacctggtagagaatacacctatgagtggtcgattagtgaggattccggacctacccatgacgacccaccatgcctcacccacatttactacagccacgaaaacctgatagaggacttcaatagcggccttataggtcccctgttaatctgtaaaaaaggaacactgactgaggggggcactcagaagactttcgataagcagatcgtcttactgtttgccgtttttgacgaaagcaaatcttggagccagtcaagtagtctgatgtacactgtgaatggctacgtcaatggaacaatgcccgatataacggtgtgtgcccacgaccacatatcctggcacctgctgggtatgagctcaggtcctgaactcttttccattcattttaatggtcaggtactggagcagaatcatcataaggtgtccgccattaccctggtctctgctacatccaccaccgctaacatgacagtaggacccgaagggaagtggatcatttcgtcgcttactcccaaacaccttcaggccggtatgcaggcctacatcgatattaaaaattgtccaaagaaaacgcgtaacctcaaaaagataacaagggagcagcgcagacacatgaagcgatgggagtactttattgctgccgaggaagtcatctgggactatgcacctgttattcccgccaatatggacaaaaaatacaggtcccaacatctcgacaatttcagtaatcaaatcggaaagcattacaagaaggtcatgtatacccagtacgaggacgaatctttcacgaaacacaccgtgaaccccaacatgaaggaggacggaatcttaggccccatcatccgggcacaggtgcgtgacactcttaagatcgtttttaagaatatggcttcgcggccgtactccatatacccccacggcgttacatttagtccttacgaagatgaagtaaactcttcatttacttcgggtcgtaacaataccatgatccgtgcagtgcaaccgggagagacctacacgtacaaatggaatatcttagaatttgatgagcccacggaaaacgacgcacaatgcctcaccaggccatactactccgatgtcgatatcatgagagatattgcttctggtctgatcgggcttctgttgatatgcaaatctcggagcttggaccgccgtggcatccaacgggcagctgatatcgagcagcaggccgtgtttgccgtctttgacgagaacaaatcatggtacctcgaagacaatataaataagttttgcgagaatcccgatgaggtgaagcgggatgatccaaagttctatgaatcgaatatcatgtctacgatcaacgggtatgttcctgaatccatcaccacgctaggcttttgttttgacgacaccgttcagtggcacttttgcagcgtgggcacccaaaacgaaattctgacaatacatttcaccggacatagcttcatctatggtaagcgacacgaggacactctgacgctgtttcccatgagaggggagtcagtgacagtcacaatggacaatgtagggacatggatgttaacttcaatgaattccagcccccgttcaaagaaactgagattgaagtttagagacgttaaatgcattccagacgatgatgaagactcttatgagatcttcgagccacccgagtcaacggttatggcaaccagaaaaatgcatgatcgtcttgaacccgaggatgaggagtccgacgcggattacgattaccagaatcgcctagcggctgctctcggaattcggtcatttaggaactccagcctgaaccaggaagaggaggagttcaacctgactgctttggcactggaaaacggaactgagtttgtgagcagcaatactgatattatcgtagggagtaactattctagcccttcaaatatcagtaaattcactgtgaacaatctagctgagcctcagaaagcccctagccatcagcaggccaccactgcgggcagcccactgaggcatttgattggaaaaaactctgtgctcaacagcagtacagcggaacacagttccccctactccgaggatcccatcgaagacccactgcagcctgacgtcactggcattaggctgctaagtctgggcgcaggcgagtttaagtctcaagagcacgctaaacacaaaggtcccaaggtggagagggaccaggcagccaaacatcgcttctcttggatgaaattgctggcgcataaggtcggccgccaccttagccaagacacaggatctccgagtgggatgcgcccgtgggaagacctgccatctcaggatacaggcagcccaagccgaatgcgtccttggaaggatccaccatctgatcttctgttgcttaagcaaagtaattcatcgaaaatcctggttggccggtggcacctggcctctgagaaaggatcgtatgagattatccaggacaccgatgaggatacagcagtcaacaactggctgataagcccacagaacgcatcacgcgcttggggcgagtctaccccactcgctaataaaccaggaaaacagagtggccaccctaagtttccccgagtgcgtcataagagcctccaggtgaggcaggatggaggcaagtcacgacttaaaaagtctcaattcctgatcaagacccggaaaaagaagaaagaaaaacacactcaccatgctcccctttccccacggacctttcacccacttcgctctgaagcctacaacaccttcagcgagcggagattgaaacattccctcgttctccataaaagtaatgagaccagcctgcccacggacctgaatcaaactctgccctcaatggattttggctggatcgcctcccttcccgaccataatcagaattcaagtaatgataccggccaagcctcttgccctcccgggttgtatcagacagtcccccctgaagagcactatcagacctttccaatacaggaccccgaccagatgcattccactagcgacccgtcacataggagctcgtctcctgagctttcagagatgcttgagtacgatagaagccacaaatcttttcccactgacatcagccagatgtcaccatcctccgaacatgaggtgtggcagacagttatatccccagatttgagccaagtgacgttgtctcctgagctgtcacaaacgaatctgtccccagatctgtcccacactaccttgtcaccagagctgatacagcgcaatttgtcaccagccctggggcagatgccaatctcccccgacctttctcacactacgttgtctcctgacctgtctcatacaaccttatcgctggatctgagccagaccaatctgagccccgagctatctcagacaaacttgtccccagctctgggacagatgcctctctcccctgatcttagccatactaccctgtctctggacttctcccagaccaacctctccccagaactctcccatatgaccctatcccccgaattgtcccaaaccaatctgagtccagcactggggcaaatgccaatatcccccgacttgtcccatacaactctctcgttggacttctcccaaacaaacctgtccccagagctcagccagactaatttaagccctgccctgggacagatgcccctctcccccgatccatcacacacaaccctaagtttggacttgtcccaaaccaacctctccccggaactgagtcagacgaatctgagtcccgacctgagcgagatgcccttgttcgctgatttgtcccagatcccactgacccccgacctggatcaaatgaccctttcccccgacttgggcgagacagatctgtcccccaactttgggcaaatgtcactatctcctgacctcagtcaggtaactctcagccccgacatatccgataccaccctcttacctgacctcagccaaatctcaccaccgcccgatctggaccagatcttttacccttccgagagctcccaaagtctcctgctgcaggaattcaatgagtcgttcccctatcccgatctggggcaaatgcccagcccttcaagcccaacactaaatgacacatttctctctaaggagttcaaccctctagtcattgtggggctctccaaggatggtactgactacattgaaattatcccgaaggaagaggtgcaatcatccgaagacgattatgccgagattgactacgtcccatacgacgacccgtacaagaccgacgtcagaactaatatcaacagttcacgggaccccgataacatcgccgcctggtacttaaggagtaacaatggcaacagacggaattactacattgctgcagaggaaatctcctgggactatagcgaattcgtgcagagggaaacagatattgaagattcggatgacatccccgaagatacaacttataaaaaggtggtttttagaaagtacttggatagcaccttcactaagcgcgacccccgcggggaatatgaggagcatctgggaattctgggtcccattattcgcgcggaggtagatgatgtaatacaggtgaggttcaagaacttagcctctcggccttacagccttcatgcccatgggctctcatatgagaagagcagcgagggcaaaacttacgaagatgacagccccgagtggtttaaggaggacaacgccgtgcaacctaattctagctacacttacgtgtggcatgccacagaaagaagtggcccagagagccccggctcagcctgccgtgcgtgggcctactacagcgctgtgaacccggagaaggacatccattctgggttaattggcccattgcttatttgccaaaaaggaatcctgcacaaggactcaaatatgccaatggacatgcgcgaatttgtcctcctttttatgacttttgatgagaaaaagtcttggtactatgagaagaagagtcggtcttcctggagactcactagttccgagatgaagaaatcccacgaatttcacgccataaacggaatgatatactcactcccagggctaaagatgtatgaacaggagtgggtcaggctgcacctgctgaatattggcggatcccaagatattcacgtcgtgcacttccatggacagaccttgctcgagaatggtaataaacaacatcagttgggtgtctggccactgttgcccggtagcttcaagactctcgagatgaaggcaagcaaaccaggctggtggctgcttaatacggaggtcggtgagaatcagcgggctggcatgcagactcccttcctgattatggatagagactgccgtatgccgatggggctgtctacagggattattagtgacagccagatcaaagcaagtgagttcttgggctattgggagcccagactagctcgacttaacaatgggggcagctataatgcatggtctgtcgagaagctggcggctgaattcgcctcgaaaccatggatccaggtcgacatgcagaaggaggtgataattaccgggatccaaacacagggggcaaaacattacctgaagagctgttataccacggagttttatgtggcttactcctctaatcaaataaactggcagatcttcaagggaaattctaccaggaatgtgatgtacttcaatggcaattctgatgcctccaccataaaagaaaatcaattcgacccccccatcgtggccagatatattcggatctcccctactagggcctataacaggccaaccctcaggctggagctgcagggctgtgaagtcaatgggtgctcaacaccacttggcatggaaaatggtaaaatcgagaataaacaaattacagctagcagttttaagaaaagttggtggggcgattactgggagcccttccgggcacgcttgaatgcccaaggccgtgtgaacgcctggcaggcaaaagctaacaacaacaagcagtggctggagatcgacctgcttaaaatcaagaaaatcaccgctattatcactcagggttgtaagagcttaagctccgaaatgtacgtgaagtcatacactatccattattctgaacagggtgttgaatggaaaccctaccgactgaaatccagcatggtggacaagatatttgaaggaaacactaacactaaaggtcacgttaagaatttttttaacccaccaatcatttcaagattcattagagtcatccccaagacttggaaccaaagtatcgcactgcgacttgagctgtttggctgcgacatatat

SEQ ID NO: 9070 - DNA, 6672 bp, synthetic construct
  misc_feature 1..6672: note = source = /note="Description of Artificial Sequence: Synthetic coding sequence"
  source 1..6672: mol_type = other DNA
atgtttccaggatgccctcgtctgtgggtgcttgtggtcctcggcacttcgtgggtgggctggggctcccagggcactgaagccgctcagctgcggcaattctacgtggctgctcagggtatctcttggtcctataggcccgagcccaccaatagctcactgaacctgtccgtaacgagttttaaaaaaattgtttaccgggagtatgaaccctactttaaaaaggaaaaaccacagtctacaatcagtggattgctgggcccgactctttacgcagaggtgggtgacatcatcaaagtgcacttcaagaacaaggccgacaaacccctgtccatccatccccaaggtattcggtattcaaaactctccgagggagccagctacttagaccatacgtttcccgccgagaagatggatgatgcagttgctcctggcagagagtatacttacgagtggagcatctctgaggactcaggacctactcacgatgaccccccttgcttgactcacatctattacagccacgagaatctcatcgaggactttaattccggcctgatcgggccactgctcatctgcaagaagggtacattaacggaaggcgggacacaaaaaacattcgataagcaaattgtgttactgttcgctgtattcgacgaatccaaatcctggtcccagtcttccagccttatgtataccgtaaacggctatgttaatgggactatgcccgacattacagtgtgcgcacacgatcatatttcctggcacctgcttggcatgagcagtggccccgaactcttctctatacacttcaacgggcaagtgttagagcagaaccatcacaaagtgagtgctatcaccctggtgtctgctacaagcacaaccgctaacatgactgtagggccggaaggtaaatggatcatctcgagcctgactcctaaacacctgcaagccggaatgcaggcatacattgatatcaagaattgtccaaaaaaaacaaggaacttaaagaagatcacgcgtgagcaacggcggcacatgaagcgatgggagtactttatcgccgcagaagaggtcatctgggactatgcgcccgtaatccccgccaacatggataagaagtatcgcagtcaacatctcgacaacttctctaaccagatcggaaagcactacaagaaggtgatgtatacgcagtacgaagacgaaagttttaccaaacacacagtgaatcctaacatgaaggaggatggaattctggggcccatcataagggcccaggtgagggacaccctgaagattgtctttaaaaatatggccagccgtccatattcgatctacccccatggcgtcacttttagtccgtacgaggacgaagttaatagttcattcacgagtggccgtaacaacacaatgatcagggccgtacagcccggtgagacctacacatataagtggaatatcttagaattcgatgagcccacagagaatgatgcccaatgcctgacccggccgtactactcagacgtggacattatgagggacatagcctccggccttatcgggcttcttctgatctgcaaatcaagaagcctggacagacgtggaatccaaagggcggcagacattgagcagcaggcagtctttgctgtgttcgatgaaaacaagagttggtacctggaagacaatattaacaaattctgtgaaaaccctgatgaggtgaaacgggacgatcctaaattctatgagtctaacattatgtccacaatcaatggctacgtgcctgaatctataacaaccctgggattctgtttcgatgacactgttcagtggcacttttgtagtgtaggtacccagaacgaaatcctgacgatccacttcacaggtcacagctttatctatggcaagcgccacgaggatacgctgaccctgttccctatgagaggggaaagcgttacggtgactatggacaatgttggcacatggatgctcacatccatgaatagctctcctagaagcaaaaaactgaggttaaaattcagagacgtcaagtgtatcccagatgatgacgaggatagctatgagatctttgaaccacctgaaagcactgtgatggccacgagaaagatgcacgatagattagagccagaggacgaggaatctgacgcagactatgattatcagaacaggctggcggccgctctgggcatacgatcatttcgcaacagcagtctgaaccaagaggaagaggagttcaacctcactgcacttgctcttgagaatggcacagagtttgtgagctccaatactgacatcattgtcgggagtaattactcttcacccagcaacatatcaaaattcactgtgaataatctggctgagccgcagaaggccccatcacatcagcaggccacaaccgcagggagtcccctgcgtcatcttattggtaaaaactccgtcttaaattctagcacagctgaacactcaagcccctatagcgaagatcccatcgaggaccctctacagccagacgtgacagggatcagactgctgtcattgggcgcgggcgagttcaagtcacaggagcacgccaaacataagggacctaaagtcgaaagagaccaggctgccaagcaccgtttctcctggatgaaactgctagcgcataaggtcggaaggcatctgagccaggatacgggctccccatcgggaatgagaccctgggaggatctaccctctcaggatactggcagcccaagtagaatgagaccctggaaggaccctccttctgatcttttactgcttaaacagagcaattcatcgaagatcctggtgggtcgctggcatctggcgtcagaaaaaggttcttatgagattattcaagacaccgatgaggacacagcggtgaacaactggctcatctcaccccagaacgcttcccgcgcctggggagaaagcacacctttggcaaacaaacccggcaaacagtctggtcacccgaaatttccccgggtgaggcataagtcgctacaagtgcgtcaagacgggggcaagtcaagactcaagaaatctcagttcctgattaaaactcgaaaaaagaagaaggaaaagcacacccatcacgctcctctgtcaccaaggacattccaccctctgagatctgaagcatataacactttttctgagcggagactaaagcatagcctggtgctgcacaaaagcaatgagaccagcctgccaacggacttaaaccaaaccctgcctagcatggacttcgggtggattgcgtcactgccagaccataatcaaaattcatcaaacgacactggccaggcctcatgcccgcccggattgtaccagactgtcccccctgaggagcattaccaaacgtttcccatccaggatcccgaccagatgcatagtacctccgacccgtcccacagatcaagttctcctgagctctccgaaatgctcgagtacgaccggagccacaaatcctttccaacagacattagtcagatgtccccatcgtctgagcacgaagtgtggcagaccgtgatcagccccgacctgagccaggtcacattgtctcccgagctgtctcagacaaatctctctccggacctcagccacaccacactgtcacctgaactgatccagagaaacctctcacctgctctaggccaaatgcccatctcccctgacctaagccacaccaccctgtcacctgatctctctcatactaccctgtcactggatctcagccagaccaacttgagccctgagctttcccagaccaatctcagtccagcactgggccagatgcccttgtccccggatctgtcccataccacactgtcactggacttcagccagactaatttgagccccgagttgtcccacatgacgctgtcccctgaactgagccagaccaaccttagtcccgctcttggtcagatgccaatttctcccgatctgagtcatactaccttgtctctggatttctcgcagactaacttatctcccgaactctcacagaccaacctgtcaccagcactggggcagatgccacttagtcctgatccgagtcatactaccctatctctcgacctaagtcagaccaacctctcgccggaactgagccagactaacctgtcccctgacctgtccgagatgcctctgttcgcagacctctcacagattccccttactcctgatctggaccagatgacactgtcaccagacttgggtgagactgatctgtctcccaattttggacagatgtctctgtctcctgatctcagtcaggtcacattgtccccagacatcagcgacaccactttgctaccagatctgtcacagatctcgccccccccggacctcgaccaaattttttacccgtcggagtccagccagtcattactccttcaggagtttaatgaatcattcccttatccggacctgggtcagatgcctagcccaagctcaccaaccctaaatgatacgttcctgtccaaagagtttaatcctctggtcatcgtcggtctcagcaaggatggcaccgactacattgagatcattccaaaggaggaggtgcagtcatccgaggatgattatgcagagattgactacgttccttacgacgacccctataagacggatgtcagaacaaacatcaattctagtagggacccagacaatatcgcggcctggtacttgcgatctaataacgggaatcggcggaattattacatagcggcagaagaaatttcttgggattactcagaattcgttcagagggaaacagacattgaggacagcgatgatatccccgaagatactacttataagaaagttgttttcagaaaatacctcgatagcacctttactaaaagagatccgagaggcgagtacgaggagcacctcggcattctgggaccgattatcagagctgaagtcgacgacgtcatacaggtcagatttaaaaaccttgccagccggccctatagcctgcacgcgcacggactgagctatgagaagtctagcgaagggaaaacatacgaagatgattcacccgaatggttcaaagaggacaacgccgtccagcccaatagctcctatacctacgtctggcatgccactgagagatcaggacccgagtcacccggatctgcttgtcgggcctgggcctactacagtgcagttaacccagagaaggacatccactctgggcttatcgggcccctgctaatctgccagaaaggcattcttcataaagactctaatatgccgatggacatgagagaattcgtgctcttgttcatgactttcgacgaaaaaaaaagttggtactacgagaaaaagtctcgatctagttggagattgaccagtagcgagatgaaaaaaagccatgagtttcatgctatcaacggaatgatttacagtctgcccggccttaaaatgtatgaacaggaatgggtgaggctacatctacttaatattggcggatcccaggacattcacgtggtgcactttcatgggcagaccctcctcgaaaacgggaacaaacagcaccagcttggcgtgtggcctttactgcctggtagttttaagacactggaaatgaaggcgagcaaaccggggtggtggctgctgaacactgaggtgggggaaaaccagcgtgccggcatgcagacaccctttctgatcatggaccgggactgtagaatgcccatgggactgagcacaggaattatttctgactcgcaaatcaaggcaagcgaattccttgggtactgggaaccccgactggcacggctgaataacggcggatcttataatgcttggtcagtggagaagctggccgccgaatttgcgagcaagccatggatccaggtggatatgcagaaagaggtgattattacaggtatccagacacagggcgccaagcattacctcaagagttgctatactactgagttttatgtggcatattcatccaatcagattaattggcagatctttaagggtaactctacacggaatgtgatgtactttaacggaaactctgatgcatctacgatcaaggaaaaccagttcgacccccctatcgtggcgcggtatattcgcatttctcccacaagggcttataataggccgaccttgcgcctggagctccaagggtgcgaagtaaatggctgcagtacaccgctgggaatggagaacggtaagattgagaacaaacagatcacagccagctcattcaaaaagtcttggtggggggactactgggaaccattcagagcaaggctgaacgcccagggaagagtcaatgcctggcaggctaaggcaaataacaacaaacagtggctagaaattgacctgctgaagattaagaaaattaccgccattataactcaggggtgtaagtccctttcctccgaaatgtacgttaagagttacaccatccattattccgagcagggggtcgaatggaagccttacagacttaagagcagtatggtagacaaaatcttcgaaggcaatacaaacacaaaagggcacgtaaaaaatttcttcaaccctcctattatctctaggttcattcgtgtgattccgaagacttggaatcagagtatcgctttgcggctggaactgttcgggtgcgatatctat

SEQ ID NO: 9071 - DNA, 6672 bp, synthetic construct
  misc_feature 1..6672: note = source = /note="Description of Artificial Sequence: Synthetic coding sequence"
  source 1..6672: mol_type = other DNA
atgttcccgggatgccccaggctgtgggtactcgtggtgctgggcacgtcttgggtcggatggggtagccagggaacggaggccgctcagttgcgtcagttctacgttgccgcccagggtatcagctggtcttaccgtccagagcccacaaacagctctctgaatctttccgtaacgtccttcaagaaaatagtttatcgcgaatacgagccttacttcaagaaggagaagcctcagagcaccattagtggcctcctggggcccactttgtatgccgaagtcggtgatatcattaaagtgcatttcaagaataaggccgataagccgttgtctatccatccgcagggcatccggtacagtaagctttccgagggcgctagctacctcgaccacaccttccccgcggaaaagatggatgatgcggtcgccccgggtcgggagtacacgtacgagtggtcaatttctgaggactccgggcctacccatgacgacccgccctgcctcacccatatctattacagccatgagaatctcatcgaggatttcaactccggccttattggtcccctgctcatctgcaagaagggcaccctgactgagggaggcacacaaaagaccttcgataaacagatcgtcttgctgttcgccgtcttcgacgagagcaagtcctggtcccagagctcgtctctgatgtacactgtcaacggatacgtgaatggaactatgcctgacatcactgtctgcgcccacgaccacatctcctggcacctcctcggtatgtcttccggccctgaacttttctccatccactttaacggccaggtgttagagcagaaccatcataaagtcagcgccatcactcttgtgtctgctacaagtaccactgctaacatgacggtgggccctgagggcaagtggatcatatcttcgcttaccccgaagcatctccaggcgggtatgcaagcctacatcgacatcaagaattgccctaagaagactcggaaccttaagaagatcacccgcgagcagcgccggcacatgaagcgctgggagtattttatcgcggcagaggaggtcatctgggattacgctcccgttatcccggctaatatggacaagaagtacaggtctcagcacctcgacaacttttctaaccaaatcggtaagcattacaagaaagttatgtacacccagtacgaggacgaatctttcactaagcacaccgtcaacccgaacatgaaggaggacggcatcttgggccccatcatccgagcccaggtacgcgacacgttaaagattgtgttcaagaacatggcatctcgtccttactccatctatcctcacggcgtaacgttctccccctatgaggacgaggtcaattcctcctttacgagtggccgcaacaatacgatgattcgggccgtccagccgggcgagacttacacctacaagtggaacatcctcgagttcgacgagccgacggagaatgatgctcaatgcctgacccgcccatactactccgacgtcgacatcatgcgcgacatcgcaagcggcctgatcggactcctgctgatctgtaagagccgctctcttgaccgacgtggtatccaacgtgccgcagacatcgaacagcaggctgtctttgctgtctttgacgagaataaatcctggtacctggaggacaacataaacaagttttgcgaaaacccagacgaagtgaagcgggacgacccgaagttctacgaatcaaacatcatgtccactatcaacggctatgtccccgaaagcatcactactttgggtttctgcttcgatgacacggtacagtggcatttttgctcggtcggcacccagaacgaaatcctgaccattcactttaccggccactccttcatatacggaaagcgtcatgaggataccctcaccctctttcccatgcggggtgagtcagtaaccgtcaccatggataatgttggaacttggatgctcacgtcaatgaactcctcgcctcggtctaaaaagctcagactcaagttccgcgacgtgaagtgcatccccgacgacgacgaagactcttacgagatattcgagcctcctgagtccactgtcatggcaacccggaagatgcacgaccgtctggagcccgaggacgaggagagcgacgcagattatgactatcaaaaccgtctcgcagctgcactgggtatccgttcgtttcgcaacagcagtttgaaccaggaggaggaggagttcaacctgacggccttggccctggagaacggtacggagttcgtctccagtaacactgacattatcgtgggatccaactactcctctccgtcgaacatctctaaattcacagtcaacaacctggctgaaccccaaaaggcgccttcacaccagcaagctaccactgcaggctctcccctgcgccaccttatcggcaagaactctgtcttgaacagttccactgccgagcactcctctccatatagcgaggacccgatcgaggaccccctgcagccagatgtcactggtatccggctgctgtcgctgggagccggcgagtttaagtctcaggagcacgccaagcacaagggtcccaaggtggagcgtgaccaggcggccaagcaccgtttcagttggatgaagttgcttgcgcacaaggttggtaggcacctgtcgcaggatactggttcaccttctggcatgcgtccctgggaagacttgccgtcgcaggacacaggtagcccctcgcgcatgcgcccctggaaggatcctcccagtgatctgctgctcctcaagcagagcaacagctccaaaattctggtcggtcgctggcacctcgcttccgaaaagggctcctacgaaattattcaagacacggatgaagataccgctgtcaacaactggcttatctccccccagaacgcctcgcgtgcatggggcgagtcgacgcctctagccaacaaacctggtaagcagagcggacacccgaagttccccagagtccgtcacaagagcttgcaggttcgccaggacggtggaaaatccagactcaagaagtctcagtttctgattaagacccgcaagaagaagaaggagaagcatacgcaccatgctcccctctcgccgcgcaccttccacccgctgcgcagcgaggcctacaataccttctctgagcgtcggctcaagcacagcctcgtgctccacaagtccaacgagacctccctgcctaccgatcttaaccaaaccctcccctctatggacttcggctggatcgccagcctccccgaccacaaccaaaatagctctaacgataccggccaagcttcctgccccccaggcctgtatcagactgtcccccccgaggaacattaccagacgtttccaattcaggaccctgaccaaatgcatagtacgtccgaccccagccaccgatcctcgtctccggagttgtccgaaatgctggaatacgatcgttcccacaaaagcttccccaccgatatctctcagatgtcgcccagctccgagcacgaggtctggcaaactgttatcagcccggatttgtcccaggttacgttgagtccggagctctctcagacgaacctctcgccagacctcagccataccaccctctctcccgagctcatccagcgaaatctttctccggctctcggtcaaatgcctattagccccgatctgtctcacaccactctctctccggacctttcccataccactctctcgctagacctcagccagaccaacctctctcccgagttgtcacagacgaacctctcaccagcgctcggacaaatgcccctctctcctgatttgtcacataccaccctgtccctcgacttctcccagacgaacctgagccctgagttatcccacatgaccttgagccccgaactgtcacaaaccaacctatctcctgctttgggtcaaatgcccattagcccggacctctcccacaccactttgtctctggatttctcgcagactaacttgtcccccgaattgagccagaccaacctaagtccggccctgggtcagatgcctctgtctccagacccttcacacaccaccctctccctcgaccttagccagaccaacctgtcccccgaattgtctcagaccaacctttcaccagacctgtcagagatgccgctcttcgctgacctctcccagatccccctcacacctgacctcgaccagatgacactgtcgccagacctgggtgaaaccgatctctctcccaacttcggtcagatgtccctcagcccggacctctcccaggtcactctctccccggacatcagcgatactactttgctgcccgatctctctcaaatctcccctccccctgatctggatcaaatcttctatccctccgagagctcccagagcttgctgttgcaggaattcaatgagagttttccctaccccgacttgggtcaaatgccgtcccccagctcaccgacactgaatgatacattcctaagcaaggagttcaacccacttgtgatcgtcggtttgtctaaggacggcacagattacattgaaatcatcccgaaggaggaggtccaatcctccgaggacgactatgccgagatcgactacgtcccctatgacgatccctataagaccgatgttaggaccaacataaattcctcccgtgacccagacaacatagccgcctggtacttgcggagcaacaatggtaaccggcggaattactatatcgccgctgaggagatctcgtgggactactcagagttcgttcagagagagacggacatcgaagatagcgacgacatacctgaagacaccacctacaagaaagtcgtattccggaagtacctggattcgacatttactaagcgggatccacggggcgagtacgaggagcatctgggtatcctcggcccgattatacgggccgaagtcgacgatgtgattcaggtgcgatttaagaacctggcctcccgtccctactccttacacgcacacggtctctcttatgagaagtccagcgaggggaagacctacgaggatgacagcccggaatggttcaaagaggacaacgctgtccagcccaactcgagctacacctacgtgtggcatgccaccgagagatccggcccggaatccccgggttcagcgtgtcgcgcctgggcttactactcggcggtgaaccccgagaaggacatccacagtggtctcattggcccgctactgatttgccagaagggtattttgcacaaggactcaaatatgccgatggacatgcgcgagtttgtcctcttgttcatgacgtttgatgagaaaaaatcctggtattacgagaagaagagcagatcgtcctggcgtcttacttcttcggagatgaagaagtcacacgagttccatgccattaatggcatgatctacagcctgcccggtctgaagatgtacgagcaagagtgggtgcgtctgcacctgctcaacattggtggatcccaggacattcacgtagtccacttccacggacaaaccctgttggaaaatggcaataagcagcaccagctgggtgtctggcctttactccctggtagcttcaagactttggagatgaaggcgagcaagccaggttggtggttgctgaacaccgaggtcggtgaaaaccagcgagccggtatgcaaacccctttccttatcatggaccgtgactgtcgcatgccaatgggcctcagtactggtatcatcagcgattcccagataaaggccagcgagttcctgggttactgggagcctcgtctggcccggctgaataacggtgggtcctataacgcctggtctgtggaaaaattggctgccgaatttgcctctaagccttggatccaggttgacatgcagaaggaggtcatcattaccggtatccagacccagggcgccaagcactatctcaagtcatgttacacgacggagttttacgtggcctactcttccaaccagatcaactggcagattttcaagggtaatagcaccaggaacgtcatgtacttcaatggaaatagcgatgcctccaccataaaggagaaccagttcgatccaccgatcgtggctaggtatattcgcatctcgcccactcgagcctataaccgaccgaccctccgtctcgaacttcagggctgtgaggttaacggctgtagcacccctttgggcatggagaacggcaagattgagaacaagcagattactgccagttccttcaagaagtcatggtggggtgactactgggagcccttccgcgctcggttgaatgcgcagggtcgcgtcaacgcttggcaggctaaggctaacaacaacaagcagtggctggagattgatttgctgaagatcaaaaagatcacggctattatcacccagggttgtaagtctctctcatcggaaatgtatgtcaagtcctacactatccactacagcgaacagggtgtcgagtggaagccctaccgtttgaagtccagtatggtcgataagatcttcgagggaaacactaacaccaaaggtcatgtaaagaacttcttcaaccccccgatcatctcccgatttattcgagttatccctaagacatggaatcagagcatcgcactccgcctcgagctctttggctgcgatatctac

SEQ ID NO: 9072 - DNA, 6672 bp, synthetic construct
  misc_feature 1..6672: note = source = /note="Description of Artificial Sequence: Synthetic coding sequence"
  source 1..6672: mol_type = other DNA
atgtttcccggttgtcctagactgtgggtcctggtggtgttgggtacttcttgggttggctggggcagtcagggtaccgaggccgctcaactccgccagttctatgtcgcggcccagggtatctcttggagttatcgccccgaacccaccaattcatcccttaatttgtcagtaacatccttcaaaaaaatagtatatcgcgaatatgaaccatacttcaaaaaagagaagccgcagtctacaatatccggtcttctgggaccgacactgtacgcagaggtcggcgacattatcaaggtacattttaaaaataaggccgataagccactgagcatccacccgcaaggtatcagatacagtaagctgtccgagggcgctagctacctggaccacactttccccgctgagaaaatggatgacgctgtggctccaggcagggagtatacatatgaatggtctattagcgaagactctggtcccacccacgacgacccaccttgtcttacacatatttactactcacacgagaatcttatcgaagacttcaactccggactcatcggacccctcctcatttgtaaaaaaggcactctgaccgagggtggcactcagaaaacgttcgacaagcaaatagtcctcctgtttgccgttttcgacgagtccaagtcatggtcccagagcagcagtcttatgtacaccgtgaacggctatgtcaacggaacaatgcctgatataactgtctgcgcgcacgatcacatttcatggcacctcctcggtatgagcagcggcccagagctcttctccattcactttaatggccaggtacttgagcagaaccaccacaaagtatctgctatcactctggtttcagctaccagcaccactgcaaacatgactgtgggtccggaaggtaagtggatcattagcagtctgacacctaaacacctgcaagccggcatgcaagcctacatcgacatcaagaactgtccgaagaaaactaggaatttgaaaaaaatcacacgcgaacagagaagacacatgaaacgctgggagtacttcatagccgccgaggaagtgatttgggattacgcaccagttatcccagctaacatggataagaagtacagatcacaacatctggacaatttctccaaccagatcggaaaacattacaaaaaggttatgtacacacaatacgaggacgagagctttactaagcacactgtcaaccctaacatgaaggaggatggaattttgggaccgattatcagggcccaggtcagagacactctgaaaatcgtatttaagaatatggctagcaggccctactccatatatcctcacggagtcacatttagcccgtacgaggacgaggtcaatagtagcttcacaagcggtagaaacaatacaatgatccgcgctgttcagcctggagaaacttacacatacaagtggaacattctggagttcgatgagcccaccgaaaatgacgctcaatgcttgaccaggccgtactacagtgacgtggacataatgagggatatcgcatcaggtctgatcggactcctcctcatttgcaaatcccgcagcttggatagaaggggaatccaaagagccgccgatatcgaacagcaagcagttttcgctgtgttcgatgagaataagtcctggtacctggaggataacataaataagttctgcgagaaccctgatgaggtcaagagggacgatccgaagttttacgaatccaacatcatgagcacgatcaatggctatgtgccagagtcaataactaccttgggtttctgtttcgatgacacggtgcagtggcacttttgctccgtgggaactcaaaacgagattcttacaatccatttcacaggacactcctttatctacggcaaaagacacgaagataccctcactctgttccctatgaggggcgagagcgtgactgtgaccatggataatgtcggcacatggatgctcactagtatgaacagctccccccgctccaagaagctccgcctcaagttcagagatgtcaagtgcatccccgatgatgacgaagattcatacgagatcttcgagccaccagagtcaacagtgatggccacacgcaaaatgcatgaccgcctggagcctgaggatgaggagagcgatgccgattacgactatcagaacagattggccgccgcactcggaattagatccttcaggaactcatccctgaaccaggaggaagaagaattcaatttgaccgctctggctctcgaaaacggaaccgaatttgtgagttccaatactgacatcattgtgggctccaactacagttccccctctaacatttccaagttcactgtcaataatctcgctgagccgcaaaaggccccctctcatcaacaggcgaccacggccggtagcccgctgcgccacctcatcggaaagaattctgtgcttaacagttctaccgccgagcattcctctccttattccgaagatcccatcgaagacccgctgcagcccgatgtaaccggcatcagactgctgtccctgggtgctggcgagtttaagtcacaggagcatgccaaacataagggccctaaagtggaaagggaccaagccgccaagcatagattctcctggatgaagctcctcgcccacaaggtaggcaggcacctttctcaggacacaggtagcccttccggaatgaggccttgggaggatctgccttcccaggatacaggaagccccagtaggatgagaccctggaaggatcctccttcagaccttctcctcctcaaacagagcaactcttctaagattctggttggcaggtggcatctcgcttctgagaaaggctcatacgagatcatccaggatacagatgaggacacagcagtaaataactggctcatctctccgcagaacgcaagtagggcatggggtgagtcaacgcccctcgccaacaagcccggtaaacaaagtggtcatcccaagttccccagggtgcgccacaaaagtctccaagtgcgccaagacggcggaaagagccgcctcaagaagagccagtttctgattaagacaaggaaaaagaagaaggagaagcatacccaccacgcccccctgagcccgaggactttccatccactgcgctctgaggcatataacaccttttctgaaagaaggctcaaacacagccttgtattgcacaagtcaaatgagaccagtctgccaacggatcttaatcagacattgccttctatggactttggctggattgctagcctcccagatcataatcaaaactcatcaaatgacactggacaggcttcctgcccgccaggcctttatcagaccgtgccgccagaagaacactaccaaacatttccaatccaggaccccgaccaaatgcattctacctctgacccgagccacagaagctcatctccggaactgtctgagatgctggagtacgatagatctcataagagtttcccaactgatataagtcaaatgagtccctctagcgaacacgaggtatggcagacagtgatatcacccgacttgagtcaggtgaccttgagccctgagctgtcacagactaacctgtcacctgacctgtctcacacgaccctgagcccggaattgatccagcgcaacctgtccccggcactgggccaaatgcctatctccccggacctgtcccatacgacattgtctccagatctgagccatacgacactcagcctggacctgtcccagacgaatctctctcccgagttgtcacagacaaacctgtctcctgctctgggccagatgcccctgagtcccgatctgtctcacacaactctgtctctggacttttcccaaactaatctgtcacccgagctcagccacatgaccctgtcaccggagctgtctcagactaacctttcaccagccctgggacagatgccaatttctcccgacctgtcccacaccacgcttagcctcgacttctcacaaacaaacctttctcctgagctgtctcagactaatctttctcccgctttgggccagatgcctctgagcccagatcccagccacaccactttgagcctggacctgtctcagaccaatctctctcccgaactttcacagaccaacctgtcaccagatctcagcgagatgcccctgttcgctgatctgtcccagatacccctcactccggacttggatcagatgaccctttccccagatctgggcgagactgacctgagccccaacttcggtcaaatgtccttgagccccgatctgtcccaggttacattgagccctgacatctccgacaccacgctcctgcctgatctgagccagatcagcccgccacccgacctggatcagatcttttacccctctgagagcagccagtctcttttgttgcaagagttcaatgaaagctttccctacccagacctcggacagatgccaagtccgtccagtcccactctgaacgacactttccttagtaaggaattcaaccctctggtgattgtaggcctgagtaaggacggtaccgactacatcgaaattattccgaaggaagaggttcaatcatccgaggacgattacgccgagattgactacgtaccttacgatgacccttacaagacggacgtaaggaccaacataaacagctccagagatcctgacaacatagcggcctggtacctgcgcagtaacaacggtaataggcgcaattactacatcgcagcagaggaaatttcttgggattacagcgaattcgtacagcgcgagacggacattgaggacagcgacgatattccggaggacacgacctataaaaaagtcgtgtttcgcaagtatctcgacagtacgttcacaaagagggatccgaggggcgagtacgaggagcacctcggtatcctcggtcccatcatcagggctgaggtggatgatgttatccaggttaggttcaagaaccttgccagcagaccctatagcctccacgcgcacggactgtcctacgaaaagagttcagaaggcaaaacctatgaagatgattctcccgaatggttcaaggaggacaatgcggtccagcctaactcctcttacacgtacgtatggcatgccacagaacgctctggccccgagagtccaggcagcgcttgcagagcctgggcttattactctgcagttaatcccgagaaagatattcattccggattgatcggtcccttgctgatctgtcagaaaggcatcctccacaaagattcaaacatgccaatggacatgagggagttcgtgctgttgttcatgactttcgatgaaaaaaaatcatggtattacgaaaaaaaatctagatcatcctggagactgacctcaagcgagatgaagaagtcccacgaattccatgccatcaatggaatgatctatagtttgcccggcctcaagatgtacgaacaggagtgggtgagacttcacctgctgaacatcggcggctcccaggacatccatgttgtgcactttcatggccagaccttgttggaaaacggtaataaacagcatcagctcggtgtctggcctctgctgcccggcagcttcaagacactggagatgaaagcatcaaaaccgggatggtggctgcttaacaccgaggtaggagagaaccaaagagccggcatgcagaccccattcctcattatggacagggactgtagaatgcccatgggcctcagcacaggaatcatcagcgactctcaaatcaaggccagtgagttcctgggatactgggagccccgcctggcacgcctgaataacggcggcagctacaacgcttggagcgtcgagaagttggcagccgaatttgcgtccaaaccttggatccaagtggacatgcagaaggaagtcattattaccggcatccagacacagggtgccaagcactatctgaagtcttgctacaccactgagttttacgtcgcctactccagcaatcagatcaactggcaaatcttcaaaggaaatagtacccgcaatgttatgtatttcaatggaaactccgatgccagcactatcaaggagaatcagttcgaccctcccatcgtggcccgctatattcgcatttccccaacaagggcttacaaccgccctaccctcagactggaacttcagggatgcgaagtgaacggatgcagtactccccttggtatggaaaatggcaagatcgaaaataagcagattacagccagttctttcaagaaatcttggtggggtgattattgggaaccttttagagctaggctcaacgctcagggaagagttaacgcttggcaagccaaagcgaataacaataagcaatggctggaaattgaccttctcaagatcaaaaaaattaccgctataatcacacagggatgtaaaagcctcagttctgagatgtacgtgaaatcttatactattcattacagtgagcaaggcgtggaatggaagccttataggctgaagtcatccatggtggataagatttttgagggcaataccaacaccaaaggacatgtgaagaactttttcaaccccccaattatcagtaggtttattagagtgatcccaaagacctggaaccagtccattgccctgagacttgagctgtttggttgcgacatctat

SEQ ID NO: 9073 - DNA, 6672 bp, synthetic construct
  misc_feature 1..6672: note = source = /note="Description of Artificial Sequence: Synthetic coding sequence"
  source 1..6672: mol_type = other DNA
atgttccccgggtgtccgcggttgtgggtgcttgtcgtgctagggactagctgggtaggatggggttcacagggtaccgaggctgcacaacttcggcaattttacgtggctgcccaagggatatcctggtcctaccgacccgaaccaacgaactccagcttgaatttgagcgttacttctttcaaaaagatcgtataccgcgaatacgagccgtattttaagaaggaaaagccgcagagcaccattagtggcttgttaggacccacactctatgctgaagtgggagacattattaaagtccatttcaaaaacaaggcagacaagcccctgtctatccatccacagggaattcgatattcaaagctttccgagggcgccagctatctggatcacaccttcccagcggaaaagatggacgatgctgtggcaccgggccgggaatacacctacgagtggagcatttcagaggactctgggcccacccacgatgatccaccttgtctgacgcacatctactatagtcatgagaatcttattgaagattttaactccggactgatcggacctcttctgatttgcaagaagggaacattaacagagggaggaacgcagaaaacgtttgacaagcagatcgtgctcctattcgcagtatttgacgagagtaagtcttggagtcagtctagttctctgatgtacacagtcaacggttatgttaatggcaccatgccagatatcaccgtctgcgcccacgatcacatctcatggcacctgctaggaatgtcttccggacccgagctcttctccattcattttaacgggcaagtgctcgagcagaatcaccataaggtatctgccattacactggtgtctgcaaccagtaccacagccaacatgacagttggacctgaaggaaaatggatcatatcttccctcacaccaaagcacctacaggccgggatgcaggcatacatcgacattaaaaactgccctaagaagacccgtaacttgaagaaaataacgagggaacaacgcagacatatgaagcgctgggagtattttatcgcagcggaggaagtcatatgggactatgcaccagtgattccagctaacatggacaagaagtatcgatctcagcacctggataacttctcgaatcagatcggcaaacactacaaaaaggtcatgtacactcagtacgaggatgaatcattcaccaaacataccgtgaaccccaatatgaaggaggatggaatcttggggcccataatccgggcccaggtacgggacacactgaagatcgtgtttaagaacatggcatcaaggccgtactctatttacccccatggtgtgactttctccccttacgaagacgaggtgaattcttccttcacgtcgggccgcaacaacactatgatccgcgccgtccagccgggtgagacctatacgtacaaatggaatatcctggagtttgacgagcctactgaaaatgatgcccagtgcttgactagaccatactattcagacgtggacattatgcgcgacatagcgagcggcttgataggactgctcctgatctgtaagtctcgctccttggataggcgtggcatccagagagctgcagacatagaacaacaagccgttttcgctgtgttcgatgagaataagagctggtacctcgaggacaacatcaacaagttttgtgagaatccagatgaggtgaaacgtgacgatcctaaattctacgagtccaacatcatgagtacaattaatggctatgtgcctgagagcatcacaacattagggttctgcttcgacgacacagtgcagtggcacttctgttcagtgggaactcagaacgaaatattaacgatccactttaccggccattccttcatttatggaaaacgccacgaggatacactgacattgttcccaatgaggggggaaagtgtgacggtgaccatggacaatgtgggcacttggatgcttacttccatgaatagttcaccgcggagcaagaagctccgactaaaatttcgggacgtgaagtgtattcctgacgatgacgaagattcctatgagattttcgaacctcccgagtctacggtgatggccacacggaaaatgcatgatagacttgaacctgaggatgaagagtctgatgctgactatgactaccagaatcgcttggccgccgcactggggatccgctcttttcgcaactcttctctgaaccaggaggaagaagaatttaacctaactgctcttgcccttgaaaacggtacggaattcgtgagctcgaacaccgacataatcgtgggtagcaattactcctctccctccaacatttccaaatttactgttaataacctggctgaaccgcagaaggccccgagccatcagcaggccacaactgcaggctcacccctccgccatctgatcgggaagaactctgtacttaattcctctaccgccgagcatagttcaccctatagtgaggatcctattgaggatccactgcagcccgatgtcaccggcatcagactgctgagcctgggcgccggggaattcaagtctcaggagcatgctaagcataagggccccaaggttgagagagaccaggccgccaagcatagattctcgtggatgaaactgctggcacacaaggtaggaagacatctgtctcaggataccggcagcccaagtggcatgcggccctgggaagacctgccatcccaagatactggttcccctagtcggatgaggccttggaaagatccgccaagcgacttgctcttgctgaagcagtccaacagcagcaagatcctcgtggggcggtggcacttggccagtgagaagggttcctacgagattatccaggacacggatgaggatacggccgttaacaattggctgataagtccccagaacgcttctcgggcctggggggagtcaactccgttggcgaataaaccagggaagcaatcgggacacccgaagtttccaagagtccggcataaaagcctccaggtcaggcaggatggtggtaagtcaaggctgaagaagagtcagttcctcatcaaaacaagaaaaaagaaaaaagaaaagcacacacatcatgctccactgagtccaaggacattccaccccctgcggtctgaggcatacaacactttttccgagagaaggctgaagcattctctggtcctccataagagtaacgagacctctttacctactgatctgaatcagacgttgcccagcatggacttcggatggattgcatcactccctgatcataatcagaacagctccaacgacactggccaagcatcttgtcccccggggctctaccaaacagtgccccctgaggagcactatcaaaccttccctattcaagacccggaccagatgcactcaacatccgacccaagtcatcggtcatccagccccgagctcagcgaaatgctggagtatgatcggtctcataaatctttcccaaccgacatatcccagatgtccccctcatctgaacacgaagtatggcagacagtgatctctccagatctgagccaggtgaccctgtctccagagctgagccagaccaacctgtccccggatctgtcccacactacactcagccctgaactgattcagcgaaacctgagccccgcgttgggacaaatgccaatctccccagacctcagccacaccacactgtccccggatttatcccacacgacgttgtctcttgacctgagccagaccaatctcagcccagaactgagtcaaacaaacctgtcccccgcattgggtcagatgcccctcagtccagacttaagccacacgaccttgagtctcgacttctcccagaccaatctcagcccggaactctctcacatgacattgtcccctgaactcagccagacaaacctctcccctgcactgggccagatgcccattagccctgacttaagccataccacactgtcattagatttctctcagacgaatctctccccagaattgtcccagaccaacctgtccccagccttgggccagatgccactgtctcccgacccgagtcatacaacgctgtccttagacctgagccagactaacttatctcccgaactgagtcagaccaaccttagtccggacctgtctgagatgcccctgttcgccgacctgtctcaaatccctctcacccccgatcttgatcaaatgacactcagtcccgatctgggcgaaactgacttgagcccaaactttgggcagatgagcctgtccccagacctttctcaggtcactctatctccagacatcagcgataccacgctcctgccagatctgagtcagattagtccacctccggacttggatcaaattttttatccctccgaatccagccagtcattgttgttgcaagagtttaacgagagttttccataccccgacctgggtcagatgccgagcccatcaagccccacactaaatgatacttttctttcaaaagaattcaatccccttgttatagtcggactgtcaaaagacggaacggactatattgagatcatcccaaaggaggaagtccaatctagcgaagatgactacgcggagatcgactacgtgccctatgacgatccctataagacagatgtacgcactaacatcaattcttcccgcgaccccgataatatcgctgcttggtacctgcgctccaataatgggaaccggcgcaactactatattgctgctgaagaaatctcatgggactactcagaattcgttcagcgggagaccgatatcgaagacagcgacgacataccagaggacactacctacaagaaggttgtcttcagaaagtacctagacagcacattcactaaaagagatcctcgaggggagtatgaagagcacttagggatactgggcccaatcatccgggcagaagtggatgatgtgatacaggtgcgatttaaaaatctggcctctcggccttattcccttcacgcccacggcctttcatacgagaagtcttcagaagggaaaacctatgaggatgactccccagagtggtttaaggaggataacgcggtccaacctaatagctcctacacgtatgtctggcacgcaaccgaacggtcaggtccagaaagccctgggtcagcctgccgcgcctgggcatactacagcgcagtgaaccctgagaaggatattcattctggccttatcgggcccctgctcatttgtcagaaggggattctgcacaaggactctaatatgcccatggacatgagggagttcgtcctcctgtttatgacatttgatgagaagaaatcttggtattacgaaaaaaagagcaggtcaagttggcgacttacttcctccgagatgaagaagtctcacgagttccatgccattaacggtatgatatatagcctgcccggccttaaaatgtatgagcaggagtgggtgcgtctgcaccttcttaatataggtggatctcaggacatccatgtggtacacttccatgggcagacactgcttgaaaacggcaataagcagcatcagctgggggtctggcctctgctgccaggctccttcaagactttggagatgaaggcctcaaagcctggttggtggctccttaacaccgaggtgggggagaaccaacgcgcggggatgcagaccccattcctcataatggaccgtgactgccggatgccgatgggactcagcactggcattatctccgattcccaaatcaaggcctctgagtttctgggatactgggagccaagactcgcacgcctgaataacggcggttcgtacaacgcctggagcgtggagaaactcgcagccgaattcgcctctaagccttggattcaagttgacatgcagaaggaggtgataatcacggggatccaaactcagggagctaagcattatcttaaaagttgttacacaaccgagttctacgttgcctatagttccaaccaaattaactggcagatcttcaagggcaattccacccggaatgttatgtacttcaacggcaactctgatgcatccaccatcaaggaaaaccaattcgacccaccaattgtggcaagatatatccggatcagtcctacacgggcctataacagaccgactctccgattggagctgcagggatgcgaggtgaacggatgctccacaccgcttgggatggaaaacgggaaaattgagaacaaacagattacagcctcgtcctttaagaagtcatggtggggcgactactgggagcccttcagggccaggctcaacgcccagggcagggtaaacgcatggcaggcaaaggccaataacaacaagcaatggctggaaatcgacctcctgaaaatcaagaagataactgcaatcataacgcagggctgcaaatccctctctagtgagatgtacgtgaagtcctacacaattcactacagtgaacaaggcgtggaatggaagccatatagactgaagagctccatggttgataagattttcgaaggaaataccaacactaaaggtcacgtcaaaaatttctttaatccacccattatctccagatttataagggtgatcccaaaaacctggaaccaatctatagcccttaggctcgaactattcgggtgcgatatctac

SEQ ID NO: 9074 - DNA, 6672 bp, synthetic construct
  misc_feature 1..6672: note = source = /note="Description of Artificial Sequence: Synthetic coding sequence"
  source 1..6672: mol_type = other DNA
atgttccctggctgcccgcgcctttgggtgctggttgtgctcggaacttcgtgggtgggttggggttcacaaggcactgaggccgcccaactgcgccagttttacgtcgcggctcagggtatctcgtggtcgtaccgccctgagccgactaattcctcgctgaatctctcggtgacttcgttcaaaaagattgtgtatcgggaatacgaaccatacttcaagaaagaaaagccgcagtccactatctccggattgctgggcccgaccctgtacgcagaggtgggggacatcatcaaggtgcactttaagaataaggccgacaagccactttcaatccacccacaaggaattaggtactctaaactgtctgaaggagcttcatacctcgaccacactttccctgcggaaaagatggacgacgccgtcgccccgggaagggagtacacgtacgagtggtcaatctcggaagattcaggacctacccatgatgatccaccttgcctgactcacatctactactcgcatgaaaatctcatcgaagatttcaattctgggctgatcggcccacttcttatctgcaagaaggggactttgactgagggagggacccaaaaaaccttcgataagcagatcgtgctgctcttcgcggtttttgatgaatcgaagtcgtggtcgcagagctcgtcactgatgtacacggtgaatggatacgtcaacggcactatgccggacatcaccgtgtgcgcgcacgaccacattagttggcatttgctcggcatgagcagcggaccggaacttttcagcatccatttcaacggccaagtcctggaacaaaaccaccataaggtcagcgccatcaccctcgtcagcgcgacctcgactactgcgaacatgaccgtcggaccggaaggaaagtggatcatcagcagcctgacccccaaacacctccaggccggaatgcaggcctacatagatatcaaaaactgccctaaaaagaccagaaatctgaagaagattacgagagaacaaaggcgtcatatgaagcgctgggaatacttcatagcagccgaagaagtgatctgggactacgcgccagtcattcctgcaaacatggacaaaaagtatcggagccaacacctcgacaacttctcaaaccaaatcggaaagcattacaaaaaggtgatgtacactcagtacgaggatgaatccttcaccaaacataccgtcaatcccaatatgaaggaagatggtatcctggggccgattattcgcgcgcaggtcagagacactctgaagatcgtgttcaaaaacatggcctccagaccttactcgatttacccacatggggtgactttctccccgtacgaggacgaagtgaatagctcatttacttcgggacggaacaatactatgatcagggcagtgcagccaggagaaacctacacctacaagtggaatatcctcgagttcgacgaaccgaccgagaacgatgcgcaatgcctgacccggccttactactccgatgtggatatcatgcgggacatcgcgagcgggttgatcggcctcttgctcatctgtaagtccagatccctggaccgccgcggcatccagcgcgcagctgacatcgagcagcaggcggtgtttgccgtgtttgatgaaaacaagagctggtatctcgaggacaacattaacaagttctgcgagaatcctgacgaggtcaagcgagatgatccgaaattctacgagtcgaacatcatgtccaccattaacggctacgtgccggaatccatcaccactcttggtttctgcttcgatgacactgtccaatggcacttctgctccgtgggcacccagaatgaaatcctcaccatccactttactggccattcgtttatctacggcaagcgccacgaagatactctcactctgttcccgatgcgcggagagtccgtgacggtcaccatggacaacgtcgggacctggatgctgactagtatgaacagtagcccgcggtccaagaagttgcgccttaagtttagggatgtcaaatgcatcccggatgatgatgaagattcctacgagatttttgagccgccggagagcacggtgatggcaacgagaaaaatgcacgaccggctcgaacctgaggacgaagaaagcgacgccgactacgactaccagaaccggctggccgctgcgctgggaatccggtctttcagaaattcctccctgaatcaggaggaagaggagttcaacttgactgccctggccctggaaaatggcaccgaatttgtgtcctcaaacaccgatatcattgtggggagcaactactcgagcccaagcaatatctccaagtttactgtgaacaatctggcagaaccgcagaaggctccaagccatcaacaggcaaccactgctggctcgcctctgcggcacctgattggcaagaactcggtgctgaactcctctacggctgaacattcgtcaccgtactcagaagatccgatcgaggacccactgcagcccgacgtcaccgggattcgcctgttgtcgctgggcgcgggcgaattcaaatctcaggaacatgcgaagcacaagggacctaaggtggaaagagatcaagccgccaagcataggttcagctggatgaagctcctggctcacaaggtcggacgccatctctcacaagacactggatcgccaagcgggatgcggccatgggaggatctcccatcccaagacaccggctcgccgtcgcgcatgcgaccgtggaaagaccctccgtcggatctgctgctgctcaagcagtccaactcatcaaaaatcttggtcggtcgatggcacctcgcctcggagaaaggctcctatgagatcattcaggataccgatgaagataccgccgtgaacaactggttgatctcgccacagaatgcctcgcgggcatggggagaatccacccccctggccaacaaaccggggaagcagtcgggacaccctaagttcccgcgcgtccggcataagtcgctgcaagttcgtcaggacggtggaaagtcccgcctgaagaagagccagtttctgatcaagactcggaaaaagaaaaaagaaaagcacactcaccatgcccccctttccccaaggaccttccaccccctgcggtcagaagcgtacaacactttctccgagcggcggctcaagcactcactcgtgctccacaagtcaaatgaaacctccctgccgaccgacctcaatcagaccctcccaagcatggattttggctggattgcctccctccctgaccataatcagaactcctcgaatgatactggccaggccagctgcccgcctggactgtaccagaccgtgcctccagaggagcactatcaaaccttccctatccaagacccggaccagatgcactcgacgtccgatccaagccacagatcgtcatccccggaactgtcggaaatgctggaatacgaccgctcgcacaaatcattcccaaccgacatctcccagatgtcccctagctcggaacatgaggtctggcagaccgttatctcgccagatctgagccaggtcactctttcaccggaactttcccagaccaatctttcaccagacctctcccacaccactttgagcccagaactgatccagagaaacctctcgcctgcgctgggtcaaatgccgatatctcctgacctgagtcataccaccctgtcgcctgaccttagtcataccactctctccctggatttgtcacagacgaacctttcccctgagctcagtcagactaatctctcgccggcattgggccaaatgcctttgtcccctgacttgagtcatactactctgtctctggacttctcccaaactaatctgagtcctgagctttcccacatgactctgtcaccagagctctcacagacgaatttgtcgcccgctcttggtcagatgccgatctcccccgatctgtcacacacgaccctgagccttgatttctcccaaacgaacctgtctcccgaactgtcccagacgaacctgtccccggcgctggggcaaatgccgctgagtccggatccttcgcacactacccttagcctcgacctgtcgcagaccaacctgtctccggaactctcacagactaacttgagtccggacctctcagaaatgccactcttcgccgacctgtcccaaatcccactcactccagatctcgatcagatgactctctcaccagatctcggtgaaactgatctgtcccccaacttcggacaaatgtcattgtctcccgatctctcgcaggtgaccctgtctccagacatctcggacaccacgctcctgccggatctttcacaaatctcaccacctccggacctggaccaaatcttctaccccagcgaatccagccagtccctgcttctccaggaattcaacgagtcatttccgtacccggacctcgggcagatgccttcgccttcgtcgcccaccctcaacgatactttcctgtcaaaggagtttaacccattggtgatcgtcggactttcaaaggacggtaccgactacattgaaatcatcccgaaggaagaagtgcaatcgtcggaggacgactatgcagaaatcgactatgtgccttacgatgacccgtacaagaccgatgtccgcactaacatcaactcgtcccgggaccctgacaatattgccgcatggtacctgaggagcaacaacggcaacagaagaaattactacatcgcggctgaggaaatcagctgggactacagcgagttcgtccagcgcgagacggacatcgaggatagcgatgacatcccagaagataccacctacaagaaagttgtattccgcaaatacctggattccaccttcactaaacgggacccgagaggcgagtatgaggaacacctgggaatccttggaccgattatcagagccgaggtggacgatgttatccaagtgagattcaagaacctggcgtcgcggccgtactccctgcacgcgcatggactctcctatgaaaaatcgtccgagggaaagacctacgaagatgactccccagagtggttcaaggaggacaacgctgtgcaaccgaactcgagctatacttatgtgtggcacgccacggagcgatcaggacccgaaagccctggaagcgcctgtagggcatgggcctactactcggctgtaaacccagagaaggatatccactcgggactgatcggaccgctgctcatctgtcaaaaaggcattctccacaaggacagcaatatgccgatggacatgcgggagttcgtcctcttgttcatgacgttcgatgagaaaaagtcgtggtactatgaaaagaagagccgctcgtcatggagactgacttcatcagagatgaagaaatcgcacgaattccatgctatcaatggtatgatctactccctcccgggactgaagatgtacgaacaagaatgggtgcgcctgcatttgctgaacatcggaggatcacaggatatccacgtggtgcactttcacggacaaacccttctggaaaacggcaataagcagcatcaactcggtgtgtggccactcctgcccggatcattcaagactctggagatgaaggcttcgaaacctggctggtggctgttgaacactgaggtcggagagaaccagcgcgcaggtatgcaaaccccgtttctcatcatggatcgagactgtcgcatgccaatgggattgagcaccgggatcatctccgattcgcaaatcaaggcctcagaattccttggatactgggagccccggttggcgcggcttaacaatggtggaagctacaacgcttggagcgtggagaaactcgccgccgaatttgcgtctaagccgtggattcaggtggatatgcagaaggaagtgatcattaccggaatccagactcagggcgccaagcactaccttaagtcctgctacactaccgagttttacgtggcgtactcaagcaatcaaatcaattggcagatcttcaaaggtaattcaacccggaatgtgatgtacttcaacgggaacagcgacgcgtcgaccatcaaagaaaaccagttcgacccgccgatcgtggctcgttacatccgcatctcccctactcgcgcgtacaacaggccaaccttgagacttgaactgcaaggatgtgaggtgaacggatgttctactccgctgggaatggaaaacggaaagatagagaacaagcagatcaccgcgagctcttttaagaagtcatggtggggagactactgggagccgttccgcgcgaggttgaacgcacagggacgcgtaaacgcctggcaggcaaaggccaacaacaataaacagtggctggaaattgacctgttgaagatcaagaaaatcaccgctatcatcactcagggctgcaagagcctgtcgtcagaaatgtacgtgaagtcatacactatccactactctgagcaaggtgtggagtggaagccgtaccgtctgaaatcgtcgatggtggacaaaatcttcgaaggaaatactaacaccaaggggcatgtgaagaacttcttcaatcctccgattatctcccgcttcattcgcgtgattccaaagacctggaatcagtcaatcgccctgcggcttgagctttttggatgcgacatctac

SEQ ID NO: 9075 - DNA, 6672 bp, synthetic construct
  misc_feature 1..6672: note = source = /note="Description of Artificial Sequence: Synthetic coding sequence"
  source 1..6672: mol_type = other DNA
atgttccccggctgtcctcggctgtgggtgttggttgtactcggcaccagctgggtaggctggggcagccaaggaactgaagctgctcagctgcggcagttttacgttgcagcccaaggtattagttggagctatagaccagagcctaccaacagcagtctgaacctctccgtgaccagctttaaaaagattgtatatcgggagtatgagccttactttaagaaggaaaagcctcagtctacaatctcaggtcttttgggcccgactctgtacgctgaggtgggagacattattaaggtccactttaagaacaaggctgacaagccactgtccatacaccctcaaggcattcggtattctaagctctccgaaggtgcaagctacttggaccacacctttcccgccgaaaagatggacgatgcagtggcgccagggagggagtacacctacgagtggtccatctccgaagactcaggaccaacccacgacgaccccccctgcctgactcacatctattatagccacgagaacctcatcgaagattttaacagcggcctcatcggacctcttctcatctgcaagaagggcactctcacagagggcgggactcaaaaaaccttcgacaagcagattgttctgctcttcgcagtcttcgatgagtccaagtcttggtcccaaagcagtagcctgatgtacactgtgaatgggtatgtgaacggaaccatgccagacatcacagtgtgcgcacacgaccacatatcatggcatctgctgggaatgagttcagggccagaactgtttagcatccacttcaacggccaggtgctcgagcagaatcatcataaggtgtctgccatcaccttggtgtctgccacgtccaccacagcgaatatgacggtcggcccggaaggaaagtggatcatctccagtctgacaccaaaacacttgcaggccgggatgcaggcctacatcgacattaaaaactgcccaaagaagacccgcaacctcaaaaaaataaccagggagcaaaggagacatatgaaaagatgggaatatttcatcgcagcagaggaagttatctgggattacgcccctgtcatacccgctaacatggataaaaaataccgatcacagcacttggataatttctctaaccaaattgggaagcattacaagaaagtcatgtatacgcaatacgaggatgaatcttttaccaaacatactgtgaaccccaacatgaaagaggatggcatactcggccccattatcagagcccaagtcagggataccctgaagatcgtctttaaaaacatggctagcagaccttactctatctacccacacggcgtaacatttagcccatacgaagatgaggtgaatagctccttcaccagcggaagaaacaacacaatgattagagccgttcagccgggggagacatatacatacaaatggaatatcctcgaattcgacgagccaacagagaatgacgctcagtgtcttacacgcccttactacagcgacgtggatattatgagagacatcgctagtgggctcattggcctgctgctgatttgcaagtctcggagcctggataggcggggtatccagagggcagcagacatcgagcagcaggccgtcttcgcagtctttgacgagaacaagtcatggtatctcgaagacaatatcaacaagttctgcgaaaacccggatgaggtcaaacgcgacgaccctaagttctacgagtcaaacatcatgtctaccattaacgggtacgtccctgagagcatcaccaccctcggcttctgcttcgacgatacagtgcaatggcacttctgttctgtgggcacccaaaatgaaattctcacaatccacttcaccggacacagtttcatctatggtaaacggcacgaagacactctcacgctcttcccaatgcggggcgagtcagttaccgtgactatggacaacgtgggcacgtggatgctgacaagtatgaacagcagcccacgctccaaaaaacttagattgaaattccgcgacgtcaagtgtattcccgatgacgacgaggattcctacgagatttttgaaccaccagagtccacagtaatggctacacgcaagatgcacgataggctggagcctgaggacgaggaaagtgatgccgattacgactaccagaatcgcctggcggctgctctcgggatacggtcattcaggaactcatctcttaaccaggaggaggaggagttcaatttgacggcccttgcattggagaatggcacagagtttgtgtcaagcaacacagacatcatagtcgggtccaattattcaagcccaagtaacatttctaagtttacggtgaacaacctggcggagcctcaaaaggctccctcccaccaacaggctaccacagctggcagtccccttagacatctcatcggaaagaactcagtgttgaactcttcaacagctgagcatagtagcccttacagcgaagacccaatcgaggacccactccaaccagacgtgaccggtatcaggctgctgtccctgggggctggagaattcaaatcacaagaacacgccaagcataagggtccgaaggtggagcgcgatcaggccgctaagcatcggttctcctggatgaaactcttggcccacaaagtcggacggcacttgagtcaggacacgggctctccatcaggaatgagaccatgggaagatctgccctcccaagacactggttctcccagtaggatgagaccttggaaggatcccccatctgatctcctgctccttaagcagtctaattcctctaagatcctggtcgggagatggcatctggcgagcgagaagggcagttatgaaattatacaagatactgacgaggataccgccgttaataattggctgatttctccccaaaacgccagcagagcatggggagagtcaacccctctcgccaacaagcctggcaagcagtcaggccatcctaaattccctcgggtgcgccacaagagccttcaagtgcgccaagacggaggaaagtcacgactgaaaaaatcccaatttctgataaagactcgaaagaagaagaaagagaagcacactcatcacgcgcctctgtcacctagaacattccaccctctgaggtctgaagcctacaacacttttagcgagcggagattgaaacacagcctggtgcttcacaagtccaatgagacttcccttcccactgatctcaaccagactctgccatcaatggacttcggatggatcgcctctttgcccgaccataaccagaacagctctaacgatacgggacaggccagttgtcccccgggcctgtatcagacagtgcctcctgaggagcattatcagactttcccaattcaagaccctgatcagatgcacagcactagcgacccatcacatagatcttcttctcccgagttgtcagaaatgctcgaatacgacaggtcccacaaaagctttcctactgacatcagccaaatgtccccctccagcgagcatgaggtctggcagacagttatcagccccgatttgtcccaggtgaccttgagtcctgagctgtcacaaacgaacctttctcccgacctctcacacacaaccctttctcccgagctcatccagagaaaccttagtccagccctgggccagatgccaatttcccctgatctgagtcacactacactgagcccagaccttagtcacaccacgctgagcctggatcttagccagacaaatctgtcacccgagctgtcccagaccaatctgtctcccgctttgggccagatgcccttgagtcctgatctgagccacactacattgagtttggactttagtcagaccaacttgtcaccggagctgtcacacatgactttgagcccagaacttagtcagaccaatctcagtcctgcccttgggcagatgccaatctccccggatttgtcccatactacactgagcctggatttctcacaaactaacctgagtcctgagctttcacaaaccaatctgagtccagcactgggacaaatgcctctgtcacccgatccgtcccacaccactctgtctcttgatctgagccaaacaaacttgtcacctgaactctctcaaactaacctcagtcccgacctgtctgagatgccacttttcgctgatctgtctcagatccctctcactccggacctggatcaaatgacactcagcccggaccttggggaaactgatctttcaccgaattttggacaaatgtccttgtcccctgatctttcccaggtcaccctctctcctgatatctcagacacaacgctgttgcctgacctctcccagatctccccgcccccagatctcgatcagattttctatccgtctgaatcatcccagagcctgctgctgcaggagtttaatgaaagttttccatacccagaccttgggcagatgccatctcctagtagccccacccttaatgacacttttctgtccaaagagttcaaccctctggttatagtaggactgagcaaggacggcaccgactatatagaaataatccccaaagaggaagtgcagtctagcgaagatgactacgcagaaatcgactatgtgccgtatgatgacccgtacaagaccgacgtacgcaccaatataaactcatcaagagaccccgataatattgcagcatggtatctcaggagtaataatggcaacaggcgaaactactacattgcggctgaagaaataagttgggactatagtgagtttgtgcaacgagaaacagacatagaggattctgatgatattcccgaggatacaacttacaaaaaggtcgtctttcggaaatatctcgactccactttcacaaagcgggacccacgcggcgagtacgaggagcatctgggaatcctcggaccaattatccgggccgaggtggatgatgtgatccaagttcggttcaagaaccttgccagccggccctactccctgcatgctcacggattgtcttacgagaaaagcagtgagggaaagacatacgaggatgactctcccgaatggttcaaagaggacaacgccgtccagcctaacagctcctacacttatgtttggcacgcaaccgagcggtctggcccggaaagtcccgggagcgcttgcagggcctgggcctactactctgctgtgaaccccgagaaagacattcactcaggactgatcgggccactgctcatttgccagaagggcatacttcataaggattctaatatgcctatggatatgcgcgaatttgtgttgttgttcatgacgtttgatgagaaaaaatcctggtattatgaaaaaaagagcagatcctcttggcgcctgacctccagcgagatgaaaaagagtcacgagtttcacgccattaatggcatgatctacagtttgccagggcttaaaatgtatgagcaggagtgggttaggctgcacctcctgaatatcggtggctcccaggatatccatgtggttcatttccacggtcaaacccttctcgaaaatggcaataaacagcaccagctcggggtctggccccttcttcctgggagttttaaaacactggagatgaaggcttcaaagccaggatggtggctccttaacacggaggtgggtgagaaccagcgcgccggcatgcagacaccttttctgatcatggatcgggactgtcgaatgcctatgggactcagtaccggcattattagcgacagtcagattaaagcttctgagttcctgggatactgggaacccaggctcgccaggctgaacaatgggggcagctataatgcctggagcgtcgagaaactggcagctgaatttgctagtaagccgtggatccaggtcgatatgcagaaggaagtgatcatcacgggcatccagacacagggggccaagcactacctcaaaagctgctataccacggaattttacgtggcctactcatccaaccagatcaactggcagattttcaagggtaatagcacaaggaacgttatgtacttcaacggaaactctgacgcgtctacgatcaaggagaatcagtttgaccctcccatagtcgcacgctacatcaggatcagccctacacgagcttacaatcggccaacgctcaggctggagctgcaaggttgtgaggtgaacggctgctctacccctctgggtatggagaacggtaagattgaaaacaaacagatcacagcctcctcattcaaaaaatcttggtggggcgattactgggagccattcagggctcgactgaacgcccagggacgagtgaacgcctggcaggcaaaagctaataacaataaacagtggcttgagatcgacttgcttaagattaaaaagattacagctatcataacccaggggtgtaagagcctcagctctgagatgtacgtcaagtcctatactatccactactccgagcagggtgtcgagtggaaaccatacaggctgaaatccagcatggtggataaaatctttgagggtaatacgaacacaaaaggtcatgttaaaaatttttttaatcctccgattattagtaggtttatcagagttatccctaagacatggaaccagagcatcgccttgcggctcgagctctttgggtgcgatatctac

SEQ ID NO: 9076 - DNA, 6672 bp, synthetic construct
  misc_feature 1..6672: note = source = /note="Description of Artificial Sequence: Synthetic coding sequence"
  source 1..6672: mol_type = other DNA
atgtttcctgggtgtcctcggttatgggttctggtggtcctcggcacctcttgggtgggctggggtagccagggtaccgaagctgcacaacttcgccagttttatgttgccgctcaaggtatctcctggtcatacagacctgaaccaacaaattcatcacttaacctgtctgtcacaagcttcaaaaagatcgtgtatcgagagtacgaaccgtactttaaaaaagagaagcctcagtctaccatctcagggttattgggccctaccctgtacgcggaggtaggggatatcatcaaagtccactttaagaacaaggctgataaacctctcagtatccatccccaaggtatcagatacagcaagttatctgaaggcgcaagttatttagaccacacattccccgccgagaaaatggatgacgccgtggcccctggtagggagtacacctacgagtggagcatttctgaagacagtggcccaacacatgacgatcccccatgcttgacccatatctattactcccatgaaaacttgatcgaagactttaacagtggattgatcgggcccctgctgatctgcaagaagggcaccctgactgagggtggcactcaaaaaactttcgacaaacaaatagtgctgctcttcgctgtgttcgacgagagtaagagctggagtcagtcaagcagccttatgtacacagtgaacggatacgtgaacggcaccatgcccgacattacagtgtgcgcacacgatcatatatcatggcatcttctgggtatgtcgtcaggccctgaactgtttagtattcactttaatggacaggttttagagcaaaaccaccataaagtgtctgccattaccctggtttctgctacttcaactacagctaacatgaccgtagggcctgaggggaagtggatcataagcagtctgacccccaagcacctgcaggctggaatgcaggcttacatagatattaaaaactgtcctaagaaaacaagaaacctgaagaagatcacccgcgagcagcggagacacatgaagagatgggagtacttcattgcggcagaagaggtgatctgggactatgcccctgtgattccggcgaacatggacaagaagtacagaagccaacaccttgacaattttagcaaccagatcggcaaacattataaaaaggtgatgtatacccagtacgaagatgagagtttcacaaaacacactgtcaatcccaacatgaaagaggatggcatcctgggaccaatcatccgtgcacaggttagagacacactgaagattgtctttaaaaacatggctagccgcccatacagcatctaccctcacggcgtcacatttagcccatacgaggacgaggtgaactcttcctttaccagcgggaggaataacacaatgatccgcgctgttcaaccaggtgagacctacacctataagtggaacattctggagttcgacgaaccaacagagaacgacgctcagtgtttgacaaggccatactacagcgacgttgatataatgagggacattgcaagtggcttgattgggctcctgctgatctgtaaatccagaagcctcgacaggaggggcatccagagagccgcggatatcgaacagcaggctgtcttcgccgtctttgatgaaaataagtcatggtaccttgaagataacataaacaaattttgtgaaaaccctgacgaagtgaaacgcgatgatcccaagttctacgaatcaaacattatgagcaccattaatggttacgttccagaaagcattactacactgggcttttgtttcgacgataccgtgcaatggcacttctgctccgtgggtacccagaatgaaatcttgacaatacattttactgggcacagcttcatttatggaaaaaggcatgaagataccctgaccctttttcccatgaggggagagtcagttacagtcaccatggataacgttggaacctggatgttgacatctatgaacagctcgccgcgatcgaagaagcttcgcctcaaatttagggacgttaagtgtatcccagacgacgatgaagattcttacgaaatcttcgagccacctgagtccacagtgatggctaccagaaagatgcatgatcggcttgagccggaggatgaagagtccgatgccgattatgactatcagaacaggctggccgccgccttgggaatccgctcatttcggaactcaagccttaaccaagaggaggaggagtttaacttgaccgctttggctctggagaatggcaccgaattcgtctctagcaataccgatattatagtcggatctaactacagctctccctccaatataagtaagtttaccgtgaacaacttggccgagcctcagaaggcccccagccatcagcaagccaccaccgccggttcaccactgcgacacctgataggtaagaacagtgtgcttaatagctcgacggccgaacacagcagcccctactcagaagatccaatcgaagatcccctccaaccagacgtgaccggcatacgccttcttagcctgggagctggcgaattcaagtcgcaagagcacgctaagcataagggacccaaggtggagagggatcaggccgcaaagcataggttcagctggatgaagctgctggcacataaggtcggaaggcacctgagtcaagatacaggcagcccgagcggaatgagaccctgggaagatttgcccagccaggacaccggatctccatcacggatgagaccctggaaagaccccccatcagatctgcttctgctgaagcagagcaactcctctaaaatcctcgttggccgctggcacttggccagtgagaagggaagctacgaaatcatccaagacacagatgaggacaccgcagtcaacaattggctgatctctcctcagaacgcttcacgcgcctggggagagtctacccccctggctaacaagcccggcaagcaatccggacatccgaaattcccccgagtgaggcataaaagcttgcaggtgaggcaagatggcggcaaaagcaggttgaaaaagagtcaattcctcatcaaaacccggaagaagaaaaaggaaaaacatacccatcacgcaccactgtctccgagaactttccatcctttgagatctgaggcttacaacacattcagcgaacgcaggttgaaacactctttggtgctgcataagtcaaatgagaccagtctgcccaccgaccttaaccagacgctcccctctatggattttggctggatagcaagcctgccagatcataaccaaaactccagcaacgatacaggacaggcaagttgcccgcctggcctctatcaaacagtgcctccagaggaacactaccaaacttttcccatccaggaccctgaccaaatgcacagcacaagtgacccatcccacaggagcagcagtcctgagctttccgagatgctcgagtacgatagatcgcataagagctttcccactgacatcagtcagatgtccccatcttctgaacatgaagtttggcagacagtgatatctcctgatttgagtcaggtcacactgtctcccgaactgagtcaaaccaatttgagtcccgatctttcccacaccactctgtctcccgagttgattcaaaggaacctcagcccagcactgggacagatgcctatcagtccagacctgagtcacacaacactcagccctgacctcagccacaccaccctttcacttgatctgtcacagacaaacctgagtccggagttgtctcagactaacctgtctcccgctctgggacaaatgcccctgtctcctgacctgtcacacaccacactgagtctcgacttcagccaaaccaacctttctcctgagctgtcacatatgaccttgtcccccgaattgtctcagaccaacctgtctcctgctctgggtcagatgcccatctctccagatctgtcccacacaacactgagcctggatttctcacaaactaacctgagccccgaattgtcacagacaaacctaagcccggccctgggacagatgcctcttagccctgatcctagccacactacattgtcacttgacctgagccaaacaaacctttcccccgagctctcacaaacaaacctgagtcctgatctgtctgagatgccccttttcgctgacctttctcaaattccacttacaccagacctggaccagatgactctgtcccccgacctcggcgagactgacctgtcaccaaacttcggccagatgagcctgagccccgatttaagtcaggttacgctctctccagatattagtgacacaacacttctgccagacctgagccagatctctccccctccagatctggatcaaatattctacccatcagagagctcccaatctttgctgctccaagagtttaacgaaagctttccgtaccctgatctgggacagatgccatctccttcaagtcctactctgaatgacacttttctctctaaggagtttaacccacttgtgatagtcggcctttccaaggatggtacagattacatcgaaattatccctaaagaagaagtgcaaagttctgaggacgactacgctgagattgactacgtcccttacgacgatccttataaaaccgacgtgcgcactaacataaactcatcaagagacccagataacatagctgcatggtaccttaggtctaacaatggcaacagacgcaactattacattgctgcagaagagattagttgggactatagtgaattcgttcaaagagaaactgacatcgaagactccgacgatatacctgaggacactacctacaaaaaggtcgtcttcaggaaatacctggactcaacatttaccaagagagaccctagaggggaatacgaagaacacctggggatcctggggcccatcatcagagccgaggtggacgatgtcatacaggtgagatttaaaaacctggcttctaggccttacagcctgcatgcccacggcctgagctatgaaaagagctcagagggaaagacatacgaggacgacagccctgagtggttcaaagaagacaacgccgtccagcctaactcaagttacacttatgtctggcatgctacagaaaggtcgggtcccgaaagcccagggagtgcatgtcgggcatgggcatactattctgccgtgaatccggagaaggacattcactctggcctgataggacctctgttaatatgtcagaagggaattcttcataaggattcaaatatgccaatggatatgcgcgaattcgtacttctctttatgaccttcgacgaaaagaaatcttggtactacgagaaaaaaagccgatctagctggaggctgacatcaagcgaaatgaaaaaaagccatgaattccatgcgatcaatggcatgatctacagcctgccaggtctgaagatgtacgaacaggaatgggttaggttgcatctcctcaacatcgggggctcgcaggatattcacgtcgtacactttcatggccagaccctcctggaaaacggtaacaaacaacaccaattgggcgtgtggccactgcttcccggctctttcaagactcttgaaatgaaagcaagcaagccagggtggtggcttcttaacaccgaggtgggagaaaaccaaagagcaggcatgcagacacctttccttattatggaccgcgactgcaggatgcctatgggactgtccactgggatcatttcagactctcagattaaggccagcgaatttctggggtactgggaaccccgtttggccagattgaataatggcggcagctacaacgcttggtctgtcgagaaactcgcagctgaatttgcatcgaagccctggatccaagttgacatgcaaaaggaagtcataatcacaggcatccagacacagggtgccaagcactacctgaaaagctgctataccaccgaattctacgtggcctacagtagcaaccaaatcaactggcaaatttttaaaggaaattcaaccaggaacgtcatgtattttaacggcaacagcgacgctagtacaatcaaggagaaccagtttgatcctcccatcgtagcccggtacatcaggatctcaccgactcgagcatacaacaggccaacccttagattagaattgcaggggtgtgaagtgaacggctgcagcacaccccttggtatggagaacggcaagatcgaaaacaagcagattaccgcatcctcttttaaaaagagctggtggggcgactactgggaaccttttcgggcacgtttgaacgcgcagggaagggtaaatgcttggcaggccaaggctaacaataataaacaatggcttgaaatcgatctgctaaagatcaagaaaattacagcaatcatcacgcagggctgcaagagccttagctccgaaatgtacgtgaaaagctacaccatacactacagcgagcagggtgttgagtggaaaccctatcggctgaagagcagcatggtggataaaattttcgaggggaacaccaatacaaagggacacgttaaaaatttttttaatcctccgatcatatcacgtttcatcagggtcatcccaaaaacttggaaccagagcattgctctgagacttgaactgttcggatgcgacatttat

SEQ ID NO: 9077 - DNA, 6672 bp, synthetic construct
  misc_feature 1..6672: note = source = /note="Description of Artificial Sequence: Synthetic coding sequence"
  source 1..6672: mol_type = other DNA
atgtttcccggctgcccaaggctgtgggtgctggtggtccttgggacttcttgggtcggctgggggagtcagggcacggaggcagcgcagctgcgacagttttacgtcgccgcacagggtataagttggtcttaccggccagagcccacgaactcctcacttaatctttccgtgactagcttcaagaaaattgtatatagagagtacgagccatacttcaagaaagagaaaccccagtcaaccatttctggtttgctgggaccaactctctatgcagaggtgggggacattatcaaagtccactttaaaaacaaggcagacaaaccattgagcatccacccacaggggattcggtattccaaactttccgagggagcctcctatcttgaccacaccttcccggccgagaaaatggacgacgcagtggcacccgggcgcgagtatacatacgagtggtcgataagtgaggattccggacctactcatgacgaccccccttgtctcacgcacatctactactcccacgaaaatctgattgaggacttcaacagcggcctcatcggtcctctgctgatctgtaagaagggaaccctcacagagggcgggacacagaagacctttgataagcagatcgtcctgctttttgcggttttcgatgagtccaagagctggtctcagagttcctctctgatgtacacagttaacgggtacgtgaacggtactatgccggatatcacagtctgcgcccatgatcacatttcttggcatcttcttggaatgtctagcgggcctgagctatttagtatccatttcaacgggcaggttcttgagcagaatcaccataaggtgtccgcaataaccctggtgtccgctaccagtaccacggctaacatgacagtggggccagaaggtaaatggatcatttcttccctgacgcccaagcaccttcaagccgggatgcaggcatacatcgatattaagaactgccctaagaaaactcgtaatttaaagaagattaccagggaacagcgacggcacatgaaacggtgggagtactttatagcagcagaagaggtgatatgggattacgctccagttatacccgctaatatggacaagaagtacagatctcagcacctcgacaatttctccaaccaaatagggaaacattataaaaaagtaatgtatacacaatacgaagatgagtcctttacaaagcacaccgtcaatcccaatatgaaggaagacggcatactgggtccaataattcgggcacaagtgagagatacccttaagattgtcttcaagaatatggcctcccggccctatagcatatacccacatggagtgacctttagtccttatgaggatgaggttaatagctccttcaccagcgggcgaaacaacaccatgatccgggcagtacagcccggggaaacgtacacgtacaaatggaacatattagagttcgatgaacccaccgaaaatgacgcccagtgtttgaccaggccttactactccgatgtagacatcatgcgtgacatcgcaagcggcctcattgggctccttcttatctgcaaatcacgaagcttagaccgtcgagggattcaaagagccgctgacattgagcagcaagcagttttcgctgtttttgatgaaaataaaagttggtacctggaggacaatattaacaaattctgcgaaaatcccgacgaagtcaagcgcgacgatccaaagttttatgaatctaatatcatgtccacgattaatggctatgttccggaatctataacaactctgggattctgctttgatgacacagtacagtggcatttctgttctgtggggacccagaacgagatcttgactattcatttcacgggccactcttttatctatggcaaaaggcatgaagacacattgactctgtttccaatgaggggcgagagcgtgacagtgaccatggataacgtgggtacctggatgctaactagtatgaattcgtcaccgcggagtaagaagctacggctgaaatttagagacgttaaatgcatccctgacgacgacgaggattcatacgaaatcttcgagccacctgagtccactgtaatggcaacccggaagatgcacgacaggctcgagcccgaggatgaggaatctgacgcagattacgattaccagaacagactggctgccgcactgggtattcgtagctttaggaactcttcgttgaatcaggaggaagaggagttcaacctcactgctcttgctttggaaaatggcactgaatttgtgtcatccaacaccgatataatcgttggatcaaactacagttcaccctctaacatctccaaatttaccgtcaataacctggccgagccacagaaggcacctagccaccagcaggccaccaccgcggggtctcctctccggcatctgattggaaagaattccgttctgaactcctccactgccgaacactcatcaccgtacagcgaagatccaattgaagaccctctgcaaccggatgttacaggaattagacttctgtctcttggcgctggtgagttcaagtcacaggagcatgccaagcacaagggccctaaagtggagcgagaccaggcggccaaacatcgattttcatggatgaagttgctcgcccacaaggtcggtcgacacctgagtcaagacacaggttctccctctgggatgaggccctgggaagatttgccatcacaagacaccggcagcccttcaaggatgcgaccctggaaagacccaccttcggacctgctcctcctgaaacagtcaaattctagcaagattctagtaggtcggtggcacctagctagtgagaagggtagctatgagataatccaggatacagacgaagacaccgctgtgaataactggcttatctccccacaaaatgcctcacgcgcatggggggaaagtactcctttagcaaacaagcctggaaaacagagcggacaccccaagttcccacgggtaagacataaatctttgcaagtgagacaggatggggggaaatcccgactgaagaagtctcaatttctgattaagacaagaaagaaaaaaaaggagaagcacactcatcacgcaccattgtcaccaaggaccttccatcctcttagaagcgaggcatacaacaccttcagtgagagacgtctgaagcattcactggtgctgcataagtctaatgagacatccctccccaccgatctcaaccaaaccctgcctagtatggattttgggtggatcgcgagcctgcccgaccataatcaaaactcatcaaacgacacgggccaggcctcatgcccacctgggctctaccagaccgtgcctccggaggagcactaccagacgtttcctatccaggacccggaccagatgcacagcacaagcgatccatctcaccgatcctcctcccccgaattgtcggaaatgctggagtacgatagaagtcacaagtcatttccaacagatatttcacagatgtcaccttcctccgagcacgaagtgtggcagaccgtgatctctcccgatctttctcaagtgaccctcagcccggagctctcacagacaaacttgtcacctgacctatctcacactaccctcagcccagagctaattcagagaaatctttcccccgccctcggtcagatgccgatcagccctgatctgagtcacacaaccctatcacccgatctctcacataccaccctttcactcgatctgagtcagaccaatttgtcccccgaacttagccaaaccaacttgtcccctgcgctgggccaaatgcccctgtcacctgatctcagtcacacaacgctctcgctggacttctcccagaccaacttgtctccggagttatcgcacatgacactgtcccccgaactttcccaaactaatttgagcccagccctagggcagatgcctatatcccctgacttgtcccacactactctgtccctggacttctctcagaccaacctgtctccagaactatcccagactaacctgtccccggcactgggccagatgccattatcccccgacccaagtcacaccactctctccctggatctgtctcaaaccaacctcagccccgagctgagtcagacaaacctgagccccgacctgagtgagatgcctttgttcgccgacctgtcccagatccccctgacaccagatttggaccagatgaccctcagcccggacctgggggaaactgatctgtctccaaatttcgggcagatgtcacttagtccggacctgtcacaggttacattatcgcccgacatctctgataccactctgctgcctgacttatcacagatctcccccccccctgatctggatcagatcttttatccatcagagtcgagccagtcattgttgcttcaggagtttaacgagtcctttccttatccagacctggggcagatgcccagcccgagctccccaaccttaaacgatacattcctttctaaagaattcaatccactagtaatcgttggcctttccaaagatggtactgattacatcgaaatcattcctaaggaggaagtccagagttctgaggacgactatgcagaaatcgactatgtcccttatgatgacccgtacaaaactgatgtccgcaccaacatcaacagttccagagatccagacaacatcgctgcttggtacctccggtcaaacaacggaaaccgtaggaactactacatcgcggcggaagagatcagttgggattatagtgagttcgtgcagcgagaaacagacatcgaggattccgacgacatacctgaggatactacatacaaaaaggtcgtgtttaggaagtacctcgattcaaccttcacaaaaagggacccccggggtgagtacgaggaacacctgggcatattaggccctatcatccgggctgaagtagacgatgtgatccaggttcgattcaaaaatctagcgtctaggccttatagtcttcacgctcacgggttgagttacgagaagtctagcgaaggcaaaacgtacgaggatgacagccccgagtggttcaaggaagacaatgccgtgcagcccaattcgtcatacacgtacgtctggcatgctactgagcgatccggccctgaaagccccggtagtgcctgtagggcctgggcgtattacagcgcagtaaaccctgagaaagatatacattcaggcctcattggcccactgttaatttgccaaaagggaatcctgcataaagatagtaacatgcccatggatatgagggaattcgtcttgctgttcatgacctttgatgagaagaaaagttggtactacgagaaaaaaagccgatctagctggcgactcacatcgagcgagatgaaaaagtcgcacgagttccacgctatcaacggcatgatctactctttgcccggactgaagatgtacgaacaagagtgggtcaggctgcacctgctcaacattgggggttcccaggatattcatgtggtgcacttccacggccagacattacttgagaatggcaacaaacagcaccagctcggggtatggccattacttcccggtagcttcaagaccttggagatgaaggcctccaaacctggatggtggctgctgaacacagaggtgggagaaaaccagcgcgccggtatgcagactccctttctgattatggaccgagattgtcgcatgcccatgggactcagcacaggcatcatcagcgattcccaaatcaaggccagtgagtttctcgggtactgggagccccgcttggctcgtttaaacaatggcgggtcttacaacgcttggagcgttgagaagcttgctgccgagttcgccagtaaaccttggatacaggtagacatgcagaaggaagtaatcatcactggtatccagacgcagggagccaagcactatctcaaaagttgctacactaccgaattttatgtggcctactcaagtaaccaaatcaattggcagatcttcaaaggtaacagcacccgtaatgtgatgtatttcaacggcaattctgatgcatcaactatcaaggaaaatcagttcgacccaccaattgtcgcacggtatattagaatttcacctacaagagcttacaaccggcccacgctgcgactggagctccaaggttgcgaagtgaacggctgttctacaccactgggaatggaaaatggtaagattgaaaataaacagattacagctagcagctttaaaaagagctggtggggcgattattgggagcccttccgggccaggcttaacgcccaagggcgggtcaatgcctggcaagccaaggctaataacaataagcagtggttggagatcgacctactcaaaattaaaaaaattaccgccatcatcacccagggttgtaaatcactgagttcggagatgtacgtgaaatcttacacaatccactattccgagcagggagtcgagtggaaaccctacagactgaagtcatcgatggtggacaagatatttgagggcaacactaataccaaaggacatgtgaagaacttctttaaccctccaattatttcacggttcatacgggtaatccccaagacctggaaccaatccatcgcgcttagacttgaactttttgggtgcgacatttat

SEQ ID NO: 9078 - DNA, 6672 bp, synthetic construct
  misc_feature 1..6672: note = source = /note="Description of Artificial Sequence: Synthetic coding sequence"
  source 1..6672: mol_type = other DNA
atgtttcctggatgcccccggctgtgggtgttggtcgtcctcggaacctcatgggtcggctggggatcacaaggtactgaggcagcccaacttagacaattctatgtcgcagcccaagggatctcgtggagctatagacctgagcctactaattcatccctcaacctgtcggtgacctcctttaagaagatagtataccgcgaatacgagccgtacttcaagaaagaaaagccgcaatcgacgatctccggactgctgggcccgactctctacgcggaggtgggagacatcattaaggttcatttcaagaacaaggccgataaaccgctgtctatccatccgcagggaatccgctactccaaactcagcgagggtgcatcttacctcgaccatactttccctgcagagaaaatggacgacgcagtggccccgggacgcgaatacacttacgaatggtccatcagcgaagattcaggaccgacgcatgacgaccctccctgcctgactcacatctactacagccatgagaacctgatcgaggacttcaactcaggactcatcgggccgctgttgatctgcaagaagggtaccttgactgagggagggacccaaaagacctttgataaacaaatcgtgttgctgttcgcggtgtttgatgagtccaagagctggtcgcagagcagcagcctgatgtacaccgtgaacggatacgtcaacggaactatgcctgacattactgtgtgcgcccacgaccacatctcctggcacctcttgggaatgagctccgggcccgagttgttctcgatccatttcaacggacaagtcctcgagcagaaccaccataaagtgtccgccattaccctggtgtccgccacgtcgactaccgcaaacatgacggtcggaccagagggcaaatggatcatcagctcacttaccccgaaacatctccaggcgggcatgcaggcttatatcgatatcaaaaactgccccaagaaaacccgcaatctcaaaaagatcacccgggaacagcggcggcacatgaagagatgggaatactttatcgcggccgaggaagtcatctgggactacgcgccagtcattccagccaacatggataagaagtaccggtcgcaacatctggataacttctcgaatcagatcggcaagcactataagaaggtcatgtacacccaatatgaggatgagagctttaccaaacacactgtgaatcccaatatgaaagaggacggaatcctgggcccgatcatccgggcccaggtgcgggatactctgaagattgtgttcaagaacatggcatccagaccctattccatttacccacacggagtgactttttccccgtacgaagatgaggtcaattcgtccttcacctcagggcgcaataacaccatgatccgggccgtgcagccgggggagacttatacttacaagtggaacattcttgagttcgacgaacctactgagaatgacgctcaatgcctcacccggccgtactacagcgatgtggacattatgagagacatcgcgagcggactcatcggactgctgctgatctgcaagtcacgctcactggatcgccgcggaatccagcgcgcagccgatatcgagcaacaggcggtgttcgccgtattcgatgaaaacaagtcatggtacctggaggacaatatcaacaaattctgtgagaacccggacgaagtgaagagggacgacccaaagttctacgagtcgaacattatgagcaccatcaatgggtacgtgccggagtcgatcacgaccctcggcttctgcttcgacgacactgttcaatggcatttctgtagcgttggaacccagaatgagatcctgactatccacttcactggccactcgttcatctacggaaagcgccatgaagatacgctgaccctgttcccaatgcggggagaatccgtgaccgtgaccatggataatgtgggaacctggatgctgacctcaatgaattcctcgccgcggtcgaaaaagctgcgcctgaagttcagggatgtgaagtgtatcccggacgatgatgaagattcttacgagatcttcgaaccgccggagtcgaccgtgatggccacccgtaagatgcacgaccggctggaaccggaagatgaggagtcagacgccgactacgactaccagaataggctggcagccgctctggggatcagatccttccgtaactcctcgttgaaccaggaagaggaggaattcaacctgaccgcgctcgcgcttgaaaatggaaccgaattcgtgtcctccaacactgatatcatcgtgggctccaactactcctcaccctccaacatctcaaagtttaccgtgaacaatcttgcagaacctcaaaaagcgccgtcgcatcaacaggcgaccactgccggatcaccgctgcgacacctgattggcaaaaactcagtcttgaacagcagcaccgccgaacactcgtccccgtacagcgaagatccgatcgaggaccctctgcaaccagatgtgactggcatccgcctgctgtcgctgggcgccggggaattcaaatcccaggagcacgccaaacacaagggcccaaaagtcgagagggaccaggctgcaaagcaccggttctcctggatgaagctccttgcacataaggtcggacgccacctgtcccaggacactggatccccctccggaatgaggccttgggaggatctgccgtcccaagatactggttcaccgtctcgcatgcgcccatggaaagaccccccgtcagacctgctgcttctcaagcagagcaatagcagtaagatcctggtcggacggtggcacctggcctctgagaagggatcctatgaaatcatccaggatactgacgaggacaccgccgtgaacaattggctgatctcgccgcagaacgcatcacgcgcctggggcgaatcaacgccgcttgcgaataagccgggaaagcagtccgggcacccgaagttcccgcgcgtgcgccacaagtcgctccaggttaggcaggacggcggcaagagccgtctcaagaagtcccaattcctgatcaagaccaggaagaaaaagaaggagaagcatactcaccacgctccgctgtcgcctcggactttccaccccctgaggtcagaggcgtacaatactttttctgaacggcgcttgaagcacagcctggtcctgcacaaatcgaacgagacttcgcttccgaccgacctcaatcagaccctgccaagcatggatttcgggtggatcgcctcactcccagaccataaccagaattcctccaatgacaccggccaggcctcgtgtcccccgggattgtaccagaccgtcccgccggaagagcattaccaaaccttcccaattcaggacccagaccagatgcattcgacctcggacccgagccacaggtcctcatcgccggaactgtcagagatgctggagtacgaccggtcgcataagtcattcccgaccgatatctcgcagatgtcgccgtcatcggaacatgaagtgtggcagacggtgatcagtcccgacttgtcacaagtgaccctttcgccagagctttcacagacgaatcttagcccagatttgtcacacactacgctgagccctgaattgattcagcggaacctttctccggccctcggacagatgccgatctccccggatcttagccatactactctctcccctgacctcagccacactaccttgtctctggatttgagccagaccaacctgagcccagaactctcgcagactaacctttcccccgcgcttggtcaaatgcccctgagtccggacctttcgcacaccaccctctcgctggacttctcccagaccaacttgtcacctgagctctcgcacatgactctctcacccgagctgagtcagacgaatttgtctcccgcccttggacagatgcccatctcgccggacttgagccacaccaccctttcgttggatttctctcagacgaacttgtcgcctgaactctctcaaaccaatctgagccccgcactgggccaaatgccgctgtccccagatccctcgcataccactctgtcgctcgacctctcccagacgaacctgtcacctgaactgtcccagactaacctctcgccggacctgagcgagatgccgctgttcgcagacctcagccagattccactgacccccgacttggatcaaatgacgctgtctcctgacctgggagaaaccgatctgtccccgaactttggacagatgtccctgtccccggacctgtcacaggtcaccctgtcgccggacatctctgataccactctgctgcctgacctgtcacaaatctcgcctccaccggatctcgaccagatcttttacccatccgaatcctcacagagtctgcttctccaagaattcaacgaatcatttccgtacccagatctcggccagatgccttcgccatcgagcccaacgctgaatgacactttcctgagcaaggagttcaacccactcgtcatcgtgggactgtcgaaggatggaactgactacatcgagatcattcctaaggaggaagtccagagctcggaggacgactacgcagagattgattacgtcccttatgacgacccatacaagactgatgtccgcaccaacatcaactcgagccgcgacccggataacatcgctgcgtggtacctgcggtcgaacaacggcaaccgccgcaactactacatcgccgctgaagaaatctcctgggactactcagaattcgtgcaacgggaaactgatatcgaagatagcgatgacataccggaggacaccacctacaaaaaagttgtgttcaggaagtacctggattcgactttcaccaagcgggatccgcggggtgagtacgaggagcacctgggaatcttgggaccgatcatcagggctgaagtcgacgacgtgatccaggtccgctttaagaacctggctagccgaccgtactccctccatgcccacggactgagctacgaaaaaagctccgaaggaaaaacttacgaggacgattcgccagagtggttcaaagaggacaacgcggtgcagccgaactcgtcctacacttacgtctggcacgccactgaacgctcgggcccagaatcgccaggctctgcatgccgggcgtgggcttactactcagccgtcaatcctgaaaaggacattcactccggattgatcggcccgcttctcatttgccagaaaggcattctgcacaaagattcgaacatgccaatggacatgagagaattcgtgcttctcttcatgaccttcgatgagaagaagtcgtggtactacgaaaagaaatcgcggtcaagctggagactgacgtcctccgaaatgaagaagagccatgagttccatgcgattaatggaatgatctacagcttgccgggccttaagatgtacgaacaggaatgggtgagactgcacctgctcaacatcggtggatcccaggacatccacgtggtccacttccatggacagactctgctggagaatggaaacaagcagcaccagctgggagtctggccgctgctgccgggctcattcaagactctggaaatgaaggcgtccaagccaggatggtggctgctgaacactgaagtgggagagaaccagcgcgcgggtatgcaaactccgttcctgatcatggacagagattgccgcatgccgatgggactcagcactgggatcatctctgattcacaaatcaaggcgtcggaattcctgggctattgggagccgaggctggcgcggctgaataacggaggatcgtacaatgcatggtccgtggaaaagctggcagcggaattcgcttcgaagccgtggatccaggtcgacatgcaaaaagaagtcattatcactggaatccagacccagggcgcaaagcattacctgaaatcctgctacaccaccgaattctacgtggcatactcctcgaaccagatcaactggcaaatcttcaaagggaactcgactcggaatgtgatgtactttaacgggaactcggacgcgtccactatcaaggaaaaccagtttgacccgcctatcgtggcgaggtacatccgcatctcacctaccagagcgtacaaccggcccactctgcgactcgaactgcaaggatgcgaggtgaacggatgctccacccctctgggaatggaaaacggtaagattgagaacaaacaaatcactgcaagctccttcaagaaaagctggtggggagattactgggaaccgttcagggcccgacttaacgcgcaggggcgcgttaatgcgtggcaggcaaaggcaaataacaacaaacaatggttggagatcgacctgctgaagatcaagaaaatcaccgccatcatcactcaaggatgcaaaagcctgtcctcggagatgtacgtgaaatcgtacaccatccattattccgaacagggagtggagtggaagccgtaccgcctcaagagctcgatggttgacaaaatcttcgagggcaatactaacaccaagggccatgtcaagaactttttcaacccgccgatcatcagcaggttcatccgcgtgatccctaaaacttggaaccagtcgattgctctgcggctcgaactgttcggatgtgacatctat

SEQ ID NO: 9079 - DNA, 6672 bp, synthetic construct
  misc_feature 1..6672: note = source = /note="Description of Artificial Sequence: Synthetic coding sequence"
  source 1..6672: mol_type = other DNA
atgtttccaggatgtccaagactctgggtgcttgtcgtgcttgggacctcatgggtgggctggggctcgcaggggaccgaggccgcccagcttcggcagttttacgtggcggcacagggaatttcatggtcgtacagaccggaaccaaccaacagctcgctgaacctctcggtgacctcgtttaagaaaattgtgtaccgtgaatacgaaccgtacttcaaaaaggagaaacctcaatcaaccattagcggcctgctgggacccaccctctacgcagaggtgggagatatcattaaagtgcatttcaagaataaggccgataaacctctcagcatccaccctcaaggcattcgctactccaagctgtccgaaggagcatcgtacctggatcatactttcccagcggaaaagatggacgacgccgtggccccgggccgcgaatacacctacgaatggtcgattagcgaagatagcggtcctacgcatgacgatccaccttgtctgacccatatctactactcacatgagaatttgatagaggacttcaattccggactgattggtcctctgctcatctgtaagaagggaactctgactgagggaggaacccaaaagacttttgataaacaaatcgtgctgctttttgccgtgtttgatgagtcgaaaagctggtcccaatcctcctcccttatgtacaccgtgaacggctacgtcaacggcaccatgccggatattactgtctgcgcacatgaccatataagctggcatctgctgggtatgtcatcgggacctgaactgttctctattcatttcaatggtcaggtgctcgaacaaaaccaccacaaggtttccgccattactctcgtgtcggcaacctcgactactgcaaatatgacggtgggacctgaagggaagtggattatctcgtcacttacgcccaagcacctgcaagccggtatgcaggcgtacattgacattaagaattgcccaaagaaaactagaaacctgaagaaaatcacgagagaacagagaaggcacatgaagagatgggaatacttcatagcagcggaagaagtgatttgggattacgcacctgtgataccagcaaacatggataagaagtatagatcccagcacttggacaacttttcgaatcaaattgggaagcactacaagaaggttatgtacacgcagtacgaagatgaatcatttacgaagcacaccgtgaacccaaatatgaaggaggacggaattcttggacctattatcagagcacaggtccgtgatactctgaaaatcgtctttaagaatatggcttcccgtccatacagcatttaccctcacggcgtgaccttttcaccatacgaagatgaggtcaattcatcgtttaccagcggtcgcaataacacgatgattagggccgtgcagcctggtgaaacctacacttacaagtggaacattctcgaatttgacgaaccaaccgaaaatgatgcacagtgtctgacccgtccatactacagcgacgtggatatcatgcgcgatatagcatcaggtttgattggacttcttcttatctgtaaatcacgctcgctggatagacggggaatccaaagggcagcagatatcgagcagcaagcagttttcgcagtattcgatgaaaacaagagctggtatttggaagataacatcaacaagttttgtgagaatcctgacgaggtcaagagagacgatccaaagttttacgaatcaaacattatgagtacgataaatggttacgtgccggaaagcattaccaccctgggtttctgcttcgatgacactgttcagtggcatttttgctccgtcggcacccaaaatgaaatccttaccattcactttactggccattcgtttatctacgggaagcgccatgaggataccctcaccctctttccgatgagaggtgaatcggtcactgtgaccatggacaacgtggggacttggatgctgacttcgatgaactcttcgccaagatcaaagaaactcagactgaaattcagagacgtgaagtgcatcccagacgatgatgaagatagctacgagatattcgaacccccagaatccacggtgatggcgactaggaagatgcacgacagacttgaacctgaagatgaggagtccgacgctgactacgactaccagaatagactggcagcagcactgggcatccggagcttccggaactcctcgctgaatcaggaagaagaagaattcaatctcacggcccttgcgttggaaaacgggacggaattcgtctcctcgaataccgacattattgtcgggtccaattacagcagcccatcgaacattagcaaattcactgtgaacaacctggcagaacctcagaaagcaccctcacatcagcaggccactaccgcggggtcccctcttagacacctcatcggaaaaaactccgtgctgaactcgtccactgccgagcatagctccccatactccgaggatcctatagaagatccccttcagccagatgtgactggtatccgacttttgtccttgggggcaggcgaattcaaatcccaagaacatgcaaagcataagggtccaaaggtggaaagggaccaggctgcaaagcatcgtttctcgtggatgaagttgctcgcccataaggtgggtcggcatctgtcccaagatactggctccccttccggaatgcggccatgggaggacctcccatcccaagacactggatccccgtcccggatgcgaccctggaaggacccaccttctgacttgctgcttcttaagcaatccaattcctccaaaatcctcgtgggtagatggcaccttgcatcagaaaagggaagctacgagatcatccaggatactgacgaagatacggcagtcaacaactggcttatttctccccaaaatgcgtcgcgtgcttggggggaaagcactccgctggcaaacaagccaggcaagcagtcgggacaccctaagtttccgagggtgaggcacaagagcctgcaagtgcgtcaggatggaggtaaaagcaggttgaagaaatcgcagttcctgatcaagactagaaaaaagaagaaggaaaagcatacccaccacgcaccattgagtcctcggacctttcatccactgaggtcggaagcatacaacacctttagtgaacggcgactgaagcactcactggttctgcacaaatcaaatgaaacctcgctgcctaccgatctcaatcaaaccttgccttccatggacttcggctggatcgcatcactgcctgatcacaatcaaaattcgagcaatgatactggtcaagcctcgtgcccacctggcctctaccagactgtcccacctgaagaacattaccagacttttcctattcaagacccagaccaaatgcatagcactagcgatccatcgcaccgttcctcttcacctgagctgtccgaaatgcttgaatacgaccgaagccataagagctttcctactgatatctcgcaaatgtcgccctcctccgaacatgaagtgtggcaaactgtgatttcccctgacctgtcacaagtgactcttagcccggaactctcgcaaaccaacctttcgccggatctgtcccacactaccctgtcaccagagctcattcagcgcaaccttagccctgcacttggtcaaatgcctatttccccagatctctcgcacaccaccctgtctcctgatctcagccacactacgctgtccctcgatctttctcaaactaacctgtcgcccgaactgtcccagactaacctgtcccctgcactgggtcaaatgcccctgtcgccagatcttagccataccactctttctcttgatttttcacaaaccaatctttcccctgaactctctcacatgactttgtcaccagaactctctcagacgaacttgtcgcctgctctcggccagatgccaatttccccagacctttcacataccaccctctcgctggatttttcgcagacgaatctgagtcctgaacttagtcaaacgaatctgtcgcccgctcttgggcagatgccgcttagccccgatccctcgcatactactctgtccctcgacctgagccagactaatctctcaccagaacttagccaaactaacttgtcaccggatctttccgagatgcctctgtttgcagatctgtcccaaatacccctcacgccagatctcgaccagatgactctgtcgcctgacctgggagaaactgaccttagcccaaacttcggtcaaatgtcactgtcgccggatctcagccaagtcaccttgtcgcccgacatatccgataccactcttcttccagatctttcgcagatttcccctccgcccgatcttgatcagatattctacccttccgaaagctcccagtcgctcctgcttcaggagtttaacgaatcattcccatatcccgatttgggtcagatgccctcgccaagcagccccaccctcaacgacacttttctgagcaaggagttcaatccactggtgatcgtgggcctttccaaggacggtaccgactacattgagattatccctaaggaagaagtgcagtcgtcagaggacgattacgcggaaatcgactacgtcccttacgatgatccttacaagacggatgtcagaactaacattaactcgtcgcgcgatcctgataacattgccgcatggtacctccggtcaaacaatggaaacagaagaaattactacatcgcagccgaggaaatctcctgggattactcggaatttgtgcaaagggaaaccgacattgaggatagcgatgatataccagaggataccacctacaaaaaggtcgtgtttcgaaagtacctggatagcacctttactaaacgggacccacggggtgaatacgaagaacacctgggtatactgggaccaatcatccgagcagaagtcgacgatgtgattcaagtgcggtttaagaacttggcctcacgaccatactccctgcacgcacatggactgtcgtacgagaaaagcagcgagggcaagacctacgaagatgatagccctgaatggtttaaggaggataacgcagtgcagccaaacagctcatacacctacgtctggcatgccactgagcgaagcggccccgaatccccaggatccgcatgccgcgcgtgggcctactacagcgcagtgaaccctgagaaggacattcattcgggacttattggcccattgcttatttgtcaaaagggtatcttgcataaggactctaacatgcccatggatatgcgagaatttgtgctcctgtttatgaccttcgacgaaaagaaatcctggtactacgagaaaaagtcgcggagttcgtggcgcctgaccagcagcgagatgaagaaaagccacgagtttcacgccatcaacggtatgatctacagtctgcccggtctgaagatgtacgaacaagaatgggtgcgtctgcatttgctgaatattggtggcagccaggacattcatgtggttcatttccacggacagaccctgcttgaaaacggtaataagcaacatcagctgggtgtgtggccacttctgcctggatcattcaagacgctggaaatgaaggcctcgaagcctggctggtggctgctgaataccgaagtcggggaaaatcaaagagccggcatgcaaactccttttctgatcatggatcgggattgtcggatgccaatgggattgagcactgggatcatttcagatagccaaatcaaggcatcagagtttttgggctattgggaaccaagactggcaaggctgaacaacggcggtagctacaatgcatggtcggtcgagaagctcgcagccgagtttgcttcgaaaccttggattcaagtggatatgcaaaaggaggtgatcataaccggaatccagacgcaaggtgcaaagcattacctcaagagctgttatacgactgagttttacgtcgcatactcgagcaatcagataaactggcagatcttcaagggaaactcaactaggaacgtgatgtactttaacggtaattccgatgccagcaccatcaaagagaaccagttcgaccctcctatcgtggccagatacattcgcatttcaccaaccagggcgtataatcggcccaccttgcgccttgagcttcaagggtgcgaagtcaacggatgcagcactcccctgggaatggaaaacggcaagattgagaacaagcagatcacggcatcgtcgtttaagaagagctggtggggtgactattgggagccgtttagagcgcgccttaacgcccaaggtcgggtcaacgcgtggcaggccaaggcaaacaacaacaagcaatggctggagattgatcttttgaaaatcaaaaagatcactgccattatcactcaggggtgtaagagcctttcctccgagatgtacgtcaaatcctacactatacattactcggaacaaggtgtcgagtggaagccatacagacttaagtcctccatggtggataagatctttgaaggcaacaccaataccaagggacatgtgaagaacttctttaacccaccaataatctcccgctttatcagagtgattcctaaaacttggaatcaatcgattgcgctgagactggaactctttggttgcgatatctac

SEQ ID NO: 9080 - DNA, 6672 bp, synthetic construct
  misc_feature 1..6672: note = source = /note="Description of Artificial Sequence: Synthetic coding sequence"
  source 1..6672: mol_type = other DNA
atgtttccgggttgtccgcgtttatgggttttagttgtattaggtacgtcgtgggtaggttggggttcgcaaggtacggaagcggcgcaactacgtcaattttatgttgcggcgcaaggtatatcgtggtcgtatcgtccggaaccgacgaattcgtcgttaaatctatcggtaacgtcgtttaaaaaaatagtttatcgtgaatatgaaccgtattttaaaaaagaaaaaccgcaatcgacgatatcgggtttactaggtccgacgctatatgcggaagtaggtgatataataaaagtacattttaaaaataaagcggataaaccgctatcgatacatccgcaaggtatacgttattcgaaattatcggaaggtgcgtcgtatttagatcatacgtttccggcggaaaaaatggatgatgcggtagcgccgggtcgtgaatatacgtatgaatggtcgatatcggaagattcgggtccgacgcatgatgatccgccgtgtctaacgcatatatattattcgcatgaaaatctaatagaagattttaattcgggtttaataggtccgttactaatatgtaaaaaaggtacgttaacggaaggtggtacgcaaaaaacgtttgataaacaaatagtattattatttgcggtttttgatgaatcgaaatcgtggtcgcaatcgtcgtcgctaatgtatacggttaatggttatgtaaatggtacgatgccggatataacggtttgtgcgcatgatcatatatcgtggcatttactaggtatgtcgtcgggtccggaattattttcgatacattttaatggtcaagttctagaacaaaatcatcataaagtatcggcgataacgttagtttcggcgacgtcgacgacggcgaatatgacggttggtccggaaggtaaatggataatatcgtcgctaacgccgaaacatttacaagcgggtatgcaagcgtatatagatataaaaaattgtccgaaaaaaacgcgaaatttaaaaaaaataacgcgtgaacaacgacgtcatatgaaacgttgggaatattttatagcggcggaagaagttatatgggattatgcgccggtaataccggcgaatatggataaaaaatatcgttcgcaacatttagataatttttcgaatcaaataggtaaacattataaaaaagttatgtatacgcaatatgaagatgaatcgtttacgaaacatacggtaaatccgaatatgaaagaagatggtatactaggtccgataatacgtgcgcaagtacgtgatacgctaaaaatagtatttaaaaatatggcgtcgcgaccgtattcgatatatccgcatggtgtaacgttttcgccgtatgaagatgaagtaaattcgtcgtttacgtcgggtcgtaataatacgatgatacgagcggtacaaccgggtgaaacgtatacgtataaatggaatatattagaatttgatgaaccgacggaaaatgatgcgcaatgtctaacgcgaccgtattattcggatgttgatataatgcgagatatagcgtcgggtctaataggtctattactaatatgtaaatcgcgttcgttagatcgtcgaggtatacaacgagcggcggatatagaacaacaagcggtttttgcggtttttgatgaaaataaatcgtggtatttagaagataatataaataaattttgtgaaaatccggatgaagttaaacgtgatgatccgaaattttatgaatcgaatataatgtcgacgataaatggttatgtaccggaatcgataacgacgctaggtttttgttttgatgatacggtacaatggcatttttgttcggtaggtacgcaaaatgaaatactaacgatacattttacgggtcattcgtttatatatggtaaacgacatgaagatacgctaacgttatttccgatgcgtggtgaatcggttacggtaacgatggataatgtaggtacgtggatgctaacgtcgatgaattcgtcgccgcgttcgaaaaaattacgtctaaaatttcgtgatgtaaaatgtataccggatgatgatgaagattcgtatgaaatatttgaaccgccggaatcgacggtaatggcgacgcgaaaaatgcatgatcgactagaaccggaagatgaagaatcggatgcggattatgattatcaaaatcgtttagcggcggcgttaggtatacgttcgtttcgaaattcgtcgctaaatcaagaagaagaagaatttaatttaacggcgttagcgttagaaaatggtacggaatttgtatcgtcgaatacggatataatagtaggttcgaattattcgtcgccgtcgaatatatcgaaatttacggtaaataatttagcggaaccgcaaaaagcgccgtcgcatcaacaagcgacgacggcgggttcgccgctacgtcatctaataggtaaaaattcggtattaaattcgtcgacggcggaacattcgtcgccgtattcggaagatccgatagaagatccgctacaaccggatgtaacgggtatacgtctactatcgttaggtgcgggtgaatttaaatcgcaagaacatgcgaaacataaaggtccgaaagtagaacgagatcaagcggcgaaacatcgattttcgtggatgaaattattagcgcataaagtaggtcgtcatttatcgcaagatacgggttcgccgtcgggtatgcgtccgtgggaagatttaccgtcgcaagatacgggttcgccgtcgcgaatgcgaccgtggaaagatccgccgtcggatctactattactaaaacaatcgaattcgtcgaaaatattagtaggtcgatggcatctagcgtcggaaaaaggttcgtatgaaataatacaagatacggatgaagatacggcggtaaataattggctaatatcgccgcaaaatgcgtcgcgtgcgtggggtgaatcgacgccgctagcgaataaaccgggtaaacaatcgggtcatccgaaatttccgcgtgtacgacataaatcgttacaagttcgacaagatggtggtaaatcgcgattaaaaaaatcgcaatttttaataaaaacgcgaaaaaaaaaaaaagaaaaacatacgcatcatgcgccgttatcgccgcgaacgtttcatccgttacgttcggaagcgtataatacgttttcggaacgacgtctaaaacattcgctagttttacataaatcgaatgaaacgtcgctaccgacggatttaaatcaaacgctaccgtcgatggattttggttggatagcgtcgttaccggatcataatcaaaattcgtcgaatgatacgggtcaagcgtcgtgtccgccgggtttatatcaaacggttccgccggaagaacattatcaaacgtttccgatacaagatccggatcaaatgcattcgacgtcggatccgtcgcatcgatcgtcgtcgccggaattatcggaaatgctagaatatgatcgttcgcataaatcgtttccgacggatatatcgcaaatgtcgccgtcgtcggaacatgaagtatggcaaacggttatatcgccggatttatcgcaagttacgctatcgccggaactatcgcaaacgaatttatcgccggatctatcgcatacgacgctatcgccggaattaatacaacgaaatctatcgccggcgttaggtcaaatgccgatatcgccggatttatcgcatacgacgttatcgccggatctatcgcatacgacgttatcgctagatttatcgcaaacgaatttatcgccggaattatcgcaaacgaatctatcgccggcgttaggtcaaatgccgctatcgccggatttatcgcatacgacgttatcgctagatttttcgcaaacgaatttatcgccggaactatcgcatatgacgttatcgccggaactatcgcaaacgaatttatcgccggcgttaggtcaaatgccgatatcgccggatttatcgcatacgacgttatcgctagatttttcgcaaacgaatttatcgccggaactatcgcaaacgaatttatcgccggcgctaggtcaaatgccgttatcgccggatccgtcgcatacgacgttatcgctagatttatcgcaaacgaatctatcgccggaattatcgcaaacgaatttatcgccggatctatcggaaatgccgctatttgcggatctatcgcaaataccgttaacgccggatctagatcaaatgacgctatcgccggatttaggtgaaacggatttatcgccgaattttggtcaaatgtcgctatcgccggatttatcgcaagttacgttatcgccggatatatcggatacgacgctattaccggatttatcgcaaatatcgccgccgccggatttagatcaaatattttatccgtcggaatcgtcgcaatcgttactactacaagaatttaatgaatcgtttccgtatccggatttaggtcaaatgccgtcgccgtcgtcgccgacgttaaatgatacgtttctatcgaaagaatttaatccgttagttatagttggtctatcgaaagatggtacggattatatagaaataataccgaaagaagaagtacaatcgtcggaagatgattatgcggaaatagattatgttccgtatgatgatccgtataaaacggatgtacgaacgaatataaattcgtcgcgagatccggataatatagcggcgtggtatttacgttcgaataatggtaatcgacgtaattattatatagcggcggaagaaatatcgtgggattattcggaatttgttcaacgtgaaacggatatagaagattcggatgatataccggaagatacgacgtataaaaaagtagtttttcgaaaatatttagattcgacgtttacgaaacgtgatccgcgtggtgaatatgaagaacatttaggtatattaggtccgataatacgagcggaagtagatgatgttatacaagtacgttttaaaaatctagcgtcgcgaccgtattcgctacatgcgcatggtctatcgtatgaaaaatcgtcggaaggtaaaacgtatgaagatgattcgccggaatggtttaaagaagataatgcggtacaaccgaattcgtcgtatacgtatgtatggcatgcgacggaacgatcgggtccggaatcgccgggttcggcgtgtcgagcgtgggcgtattattcggcggtaaatccggaaaaagatatacattcgggtctaataggtccgttattaatatgtcaaaaaggtatattacataaagattcgaatatgccgatggatatgcgtgaatttgttctattatttatgacgtttgatgaaaaaaaatcgtggtattatgaaaaaaaatcgcgatcgtcgtggcgtttaacgtcgtcggaaatgaaaaaatcgcatgaatttcatgcgataaatggtatgatatattcgttaccgggtttaaaaatgtatgaacaagaatgggtacgtttacatctattaaatataggtggttcgcaagatatacatgtagttcattttcatggtcaaacgctactagaaaatggtaataaacaacatcaactaggtgtatggccgttactaccgggttcgtttaaaacgctagaaatgaaagcgtcgaaaccgggttggtggttattaaatacggaagtaggtgaaaatcaacgtgcgggtatgcaaacgccgtttctaataatggatcgagattgtcgtatgccgatgggtttatcgacgggtataatatcggattcgcaaataaaagcgtcggaatttctaggttattgggaaccgcgtctagcgcgtttaaataatggtggttcgtataatgcgtggtcggtagaaaaattagcggcggaatttgcgtcgaaaccgtggatacaagtagatatgcaaaaagaagtaataataacgggtatacaaacgcaaggtgcgaaacattatctaaaatcgtgttatacgacggaattttatgttgcgtattcgtcgaatcaaataaattggcaaatatttaaaggtaattcgacgcgtaatgtaatgtattttaatggtaattcggatgcgtcgacgataaaagaaaatcaatttgatccgccgatagtagcgcgatatatacgaatatcgccgacgcgagcgtataatcgtccgacgttacgtttagaactacaaggttgtgaagtaaatggttgttcgacgccgttaggtatggaaaatggtaaaatagaaaataaacaaataacggcgtcgtcgtttaaaaaatcgtggtggggtgattattgggaaccgtttcgtgcgcgtctaaatgcgcaaggtcgtgtaaatgcgtggcaagcgaaagcgaataataataaacaatggctagaaatagatctattaaaaataaaaaaaataacggcgataataacgcaaggttgtaaatcgttatcgtcggaaatgtatgttaaatcgtatacgatacattattcggaacaaggtgtagaatggaaaccgtatcgtttaaaatcgtcgatggtagataaaatatttgaaggtaatacgaatacgaaaggtcatgtaaaaaatttttttaatccgccgataatatcgcgttttatacgtgtaataccgaaaacgtggaatcaatcgatagcgttacgtttagaattatttggttgtgatatatat

SEQ ID NO: 9081 - DNA, 6672 bp, synthetic construct
  misc_feature 1..6672: note = source = /note="Description of Artificial Sequence: Synthetic coding sequence"
  source 1..6672: mol_type = other DNA
atgtttcccggttgccccagactctgggttctagtggtgttgggaaccagctgggtgggatggggatcacagggaaccgaggccgcacagctgcgacaattctatgttgctgcccagggtatcagctggtcttaccgccccgagccaactaattcctcactcaacctttccgttacttcgttcaaaaagattgtgtatcgggagtatgagccgtacttcaaaaaggaaaaaccccaaagcaccataagcggccttctgggacccaccctgtacgccgaggtaggggacatcatcaaggtgcattttaaaaacaaagccgataaaccgttgtctatccatccccaggggatcagatacagtaagctctccgagggagctagttatcttgatcacacctttccagccgagaagatggatgatgccgtggcacccggccgcgagtacacatacgaatggtctatcagtgaggatagcggtccaacacatgacgatccaccttgcctaacacacatatactacagccacgagaacctcatcgaagactttaatagtgggctcatcgggcccctgctgatttgcaagaaaggaaccttaaccgagggggggacgcagaagactttcgacaaacagatcgtcctgctgtttgcagtctttgatgaatccaaaagttggtcacaatcaagtagtctgatgtatactgttaatggctatgtgaatgggacgatgccggatatcaccgtctgcgcccacgaccacatctcctggcacctgctgggaatgtccagcggccccgaactcttcagcatccattttaacggccaggtgctcgaacagaatcaccacaaggtgtccgccattaccttggtgagtgccactagcaccaccgctaatatgacggtgggccctgaggggaagtggattatttcttccttgacacccaagcaccttcaggcaggaatgcaggcctatattgacatcaagaactgcccaaaaaagaccaggaatttgaagaaaataacgagggaacaacgccgccacatgaagcggtgggaatacttcatcgcggctgaagaggtgatttgggactacgcccctgtcattcccgccaacatggacaagaaatatcgctctcagcatcttgacaacttttctaaccagattggcaagcactataaaaaggtaatgtacacccagtacgaggacgagtctttcactaaacacacagttaacccaaacatgaaggaggacggtatactcggccctatcatacgggcccaggttagggacactttaaaaatagtgtttaagaatatggcttcgcgcccatacagcatctacccgcacggggttaccttttctccctacgaggacgaggttaacagctcttttacctcagggcggaataacactatgattagggctgttcaacctggcgagacttacacctacaaatggaacattttggaatttgacgaaccaactgaaaatgacgcgcagtgccttacacgcccgtattacagtgacgtggatattatgcgggatatcgcgtccggcttgatcggcttgctgctgatttgtaaaagcaggagcctggataggcgcggaatccagagagccgccgacatcgaacagcaggctgtcttcgctgttttcgatgaaaataaatcctggtacttggaggacaacatcaataagttctgcgaaaaccctgacgaggtcaagcgggacgatcccaaattctatgagtcaaatattatgagcacaattaacggatacgttccagagtccattaccactcttggattctgtttcgatgacaccgtccagtggcatttctgctcagtgggtacacaaaacgaaatcctgaccattcactttacaggccacagctttatatatggtaaaaggcatgaagataccttgacgctctttcccatgcgaggggagtctgtgaccgttacaatggacaacgtcggtacatggatgctgacaagtatgaattcctctccacgcagcaagaagctgcgcttaaaatttcgggatgtcaagtgcattcctgatgacgacgaagactcttacgagatcttcgaaccgccagaatctactgtgatggcaacaagaaagatgcatgaccgcctcgaaccagaggatgaggagtccgatgctgactatgactaccaaaatcgactcgccgccgctctgggtattaggtccttccgtaattcttctcttaatcaggaggaggaagagttcaacctaacagctctcgcattagagaatgggacagaatttgtttcatctaacaccgacatcatagtggggtcaaactactcttcccccagcaatataagcaagttcacagtcaacaatctagcagagccacaaaaggctcccagccatcagcaggctactacggccggctcccctctacgccacctcatcggcaaaaatagcgtactgaattcctctacagccgaacattcctctccttactcagaggatccaatcgaagatcctttgcagcctgacgtaacaggcatcaggctactgtctctgggcgcaggagagtttaagtctcaggagcacgccaagcataaggggcccaaagtcgaaagggaccaagccgcaaaacacagattttcctggatgaagctgttagctcataaggtaggccgtcatttgtcccaggataccggatcccccagtggcatgaggccgtgggaagatctcccaagccaggataccggcagtccaagcaggatgcgcccctggaaggatccacctagtgacctccttttactcaagcaatccaattcatctaagatactggtcggtcgttggcacctggcctccgagaagggatcgtacgaaattatccaagatacagacgaggacaccgccgtcaataactggctgatatcaccccagaatgccagccgagcatggggggagtcaactcccttggccaataaacctggcaagcagtcaggtcacccgaagttccccagggtgaggcataagagcctacaggtacgacaggatggcggtaaaagccgcctcaagaagagccagtttctgatcaagacgaggaagaagaaaaaagaaaaacacacccatcacgcccctctgagcccaaggacctttcatcctctaagaagcgaggcctacaatacctttagtgaaagacggctgaagcattccctggtgttgcataaatctaatgagactagtttaccgacagatcttaatcagaccctaccaagcatggattttggttggatcgcgtctctccccgatcataatcaaaatagctcaaacgatacagggcaggcctcctgtcctccaggcttgtaccagactgtcccgccagaggagcattatcagactttccctatccaagacccagaccagatgcacagtacatcagacccctcccacaggtcaagctctcctgagctgtcagagatgctcgaatatgatagatcccacaaatcttttcctaccgacattagccagatgtcgccgagcagtgaacacgaagtatggcagacagttatttcacctgatctctctcaggtaaccctttcgccagaattgagtcagactaacctctcccccgatctgtcacacacaaccttgtcgcccgagttgatccagcgcaatctcagtcccgccctaggccaaatgcctattagccccgacttgtctcacactaccctttccccagatctgtcccacactacactgagtctagacctaagtcagactaacctgtctccggagctgagtcagactaatctgtctcctgctttggggcaaatgcctttaagtcccgatttatctcacaccacactgagcctggatttttcacagactaacctgtcccctgaactgtctcatatgactctcagcccggagctatcccagacaaacttgtcccccgctcttggtcagatgcccatctcccctgacctttcccataccacattgtccttggacttttcccagaccaatttaagtcccgagttgtcccagacaaatctctcacccgcattgggacagatgcctttgtcccccgacccaagtcacacaactttgagtctggacctgtcgcaaaccaacctgagtcccgagttgtcccagacaaatctttcacctgatctgtcagagatgcccttattcgctgatctgtctcagattccattaactccagatttggaccagatgacactttctcccgacctgggcgagactgacctttctcccaacttcggccagatgagtctgagcccggacctgtcccaagttaccttaagtccagacatttctgatacaacacttctgcctgatctgtcccagatttctcccccaccagacttagaccagattttctacccttcagagtcaagccagtccctgttgcttcaggaattcaatgagtcattcccttatccggatctgggccagatgccaagcccgtccagtcctaccttgaacgatacatttctgagcaaggagtttaaccccttagtaattgttggcctctccaaggacgggaccgactatatcgaaattataccaaaggaggaagtgcaatctagcgaggatgactacgcagaaatcgattacgttccatacgacgacccttacaagacggatgtgaggacaaacattaactctagccgcgaccctgacaatatcgcagcttggtacctgagatccaacaatgggaatcggagaaactactatattgcagcagaagaaatctcgtgggactattctgagttcgtccaaagagagactgacatcgaggattcggacgatattcctgaggacaccacctataagaaggtcgtgtttaggaagtacctggatagcacatttactaagagagaccctagaggagaatatgaagagcatcttggcattttaggacccatcatccgtgctgaggtcgacgatgtgatccaggtccgattcaagaacctagcaagtcgaccctattctctacacgcacatggcctgagctacgaaaagagtagcgagggcaaaacgtatgaggatgattcgcccgagtggttcaaagaggataatgcagtccagccaaactcgtcctacacatacgtatggcacgcaacggaacgctctggacccgagtctccagggagtgcgtgccgggcctgggcatactactcagcagtgaaccctgagaaggacatccacagcggactcattggtccactactcatctgccagaagggcatcctacataaggattccaacatgcccatggatatgagggagttcgtgctgctgttcatgaccttcgatgaaaagaagtcatggtattacgagaaaaaaagcagaagcagctggagactgaccagtagcgaaatgaagaagtcacacgagtttcacgcaatcaacgggatgatttattccctgcccggcctgaagatgtatgaacaggagtgggttcgtctgcacttgcttaatattggcggatctcaggacatccacgttgttcatttccacggccagactctcttggagaatggcaacaaacagcatcaattgggggtgtggccactgctccctggctcattcaaaacacttgagatgaaagcttccaagcccggctggtggttgctgaataccgaggtgggagagaatcagagggccggcatgcaaactcccttcctgatcatggatcgagactgtcgaatgcccatgggcctgtctacagggatcatctctgacagtcagatcaaggcctcagagttcttaggatactgggaaccccgcttagctcgactgaataacggaggctcatataatgcctggagtgtcgagaaactggctgccgaattcgcctccaagccatggattcaggtggacatgcagaaagaggtcattatcaccgggatacaaacgcagggcgccaagcactatctgaagtcttgttatacaacagagttctacgttgcctactctagtaaccaaataaattggcagatttttaaggggaacagcaccaggaacgtgatgtattttaatggaaatagtgacgcttccaccatcaaggagaaccagtttgatccccccattgtcgcacggtacatccgcatcagccctactcgggcctataaccgccctactttgaggctcgaattacagggctgtgaggttaacggttgttctacccccttaggaatggaaaatggaaagatcgaaaacaagcagatcactgcctccagtttcaaaaagtcctggtggggcgattattgggagcctttcagagccagacttaacgcccagggccgcgtgaatgcatggcaggccaaagctaacaataacaaacagtggctcgaaatagatttattaaaaatcaaaaaaattacagccataatcactcaggggtgcaaaagtctcagtagcgagatgtatgtgaagtcgtataccatacactacagtgaacaaggggttgagtggaagccctatcggcttaaaagctcaatggtagataaaattttcgaagggaataccaacaccaagggtcacgtcaagaatttttttaaccctcccatcatctcacgctttattagagttatccctaagacctggaatcagtcaatcgccctgaggctggagttattcggttgcgacatctac

SEQ ID NO: 9082 - DNA, 6672 bp, synthetic construct
  misc_feature 1..6672: note = source = /note="Description of Artificial Sequence: Synthetic coding sequence"
  source 1..6672: mol_type = other DNA
atgtttccagggtgccctaggctctgggtgttggtggtgttgggtacgtcgtgggtgggctggggctcccaaggcaccgaggccgcacagctgaggcagttctatgtggccgcgcaaggtatttcctggtcataccgccctgagcctacgaattcgtcccttaacttgtccgtcactagcttcaagaagatcgtgtaccgcgaatacgaaccctacttcaaaaaggaaaaaccccagtcgaccatttccggactcctgggacccaccctttacgctgaagtcggagacatcattaaagtgcatttcaagaataaggcagataagccgctgtcgattcatccgcagggtatccggtactcaaaactttccgaaggtgcctcgtatctcgatcacacctttccggctgaaaagatggatgatgccgtggcacctggacgggaatacacttacgaatggagcattagcgaggattcgggtcctacgcatgatgacccaccctgtctcactcatatctactacagccatgagaacctgatcgaggacttcaactccggcctgattggccctctccttatttgtaagaagggaacccttaccgagggtggaacccaaaagactttcgataagcagatcgtcctgctgttcgcagttttcgacgaatcaaagtcatggtcgcagtcatccagcttgatgtacacggttaatggttacgtcaacggcaccatgccagatattactgtgtgtgcccacgatcatatctcctggcatctgctgggtatgtccagtggtccagagttgttttcgattcactttaacggccaggtcctcgagcaaaatcatcataaagtctcggcaatcaccctggtcagcgcaacctcgaccaccgccaacatgaccgtcggacccgagggcaagtggatcatctctagcctgactccgaagcatctgcaagcaggaatgcaagcctacattgacatcaaaaactgtccaaaaaagacccgaaatcttaagaaaatcacccgtgaacagagacgacacatgaagagatgggaatactttattgccgcggaagaagttatttgggattacgcgcctgtgataccagctaatatggacaagaaataccgctcccaacatcttgacaacttctcgaaccagatcggtaagcattacaagaaagtgatgtacactcagtacgaagatgagtcgtttactaagcacactgttaaccccaacatgaaggaagatggaatcttgggtcctatcattcgcgcgcaagtgagagatactctgaagattgtctttaagaacatggcgtcacgcccttactcgatttacccacacggcgtcaccttttccccctatgaagatgaagtcaattcctcgttcacgtcgggaagaaacaacaccatgatccgagcagtgcaaccaggcgagacttacacgtacaagtggaacattcttgagtttgatgaaccgactgaaaatgatgcacaatgtctcacccgcccttactacagcgatgtcgatatcatgagagatattgcaagcggactgattggactgctcttgatctgcaagtcgcggtcgctcgaccgcaggggaatccagcgggcagcagacattgagcagcaggcagtgtttgcagtctttgacgagaataagagctggtacctggaggacaatatcaacaaattctgtgaaaaccctgatgaggtgaagagggacgaccctaagttttacgaatccaacattatgagcacgataaacggatacgtcccggaatcgattacgaccctgggattttgctttgacgataccgtgcaatggcacttctgctcggtgggaacccaaaacgagatccttacgatccactttactggtcactcctttatctacggtaagcgccatgaggatactcttacccttttccctatgcggggtgaatccgtgaccgtcactatggataacgtgggaacttggatgctgacctccatgaattcctcaccacggagcaaaaaactgagactgaaatttcgagatgtgaagtgcattccagatgacgatgaagattcctacgagatctttgaacctccagagtcaactgtcatggcaacgagaaagatgcatgatcggctggaacctgaagatgaagaatcggacgccgactacgattaccagaacagactcgccgccgcgcttgggattaggagctttcgcaattcctcgctgaaccaagaagaggaggagtttaaccttactgccctcgcacttgagaacggaaccgaatttgtgtcgtccaacaccgatatcattgtcggatccaactactccagcccatcgaacatctcaaagtttactgtgaacaaccttgcggagccgcagaaggccccaagccaccaacaggctaccaccgctgggtcacccctccggcatcttatcggaaagaactctgttcttaattcgtcaaccgcggaacatagcagcccctacagcgaggatccgattgaagatccactgcagccggatgtgactggtattcggcttctgtcgctgggagccggggaattcaaatcccaagaacacgcaaaacacaaaggacctaaggtggagcgggaccaggcggcgaagcatagattctcatggatgaaacttctcgcacacaaagtcggtcgtcaccttagccaggatactggttcgccttccggaatgcggccttgggaggacttgccatcacaggacaccggcagcccttcaagaatgcggccgtggaaggatcctcctagtgacctcctgcttctgaagcaaagcaattcgtcgaagatccttgtgggtcgctggcaccttgcatcggaaaagggaagctatgagattattcaagacaccgatgaggacactgcagtgaataactggttgatttccccacaaaacgcctcgagggcctggggagagagcacccctcttgccaacaaaccaggcaagcaatctggccacccgaaatttcccagggtgagacacaagtcactccaagtgcgccaggatggtggtaagtcgcgcctcaagaagtcgcagtttctgattaagaccagaaaaaagaagaaggaaaagcacacgcatcacgcgcctctcagccccaggacttttcatcctctgcgcagcgaagcgtacaatacctttagcgagagacgtcttaagcattctcttgtgcttcataagagcaatgaaacctcacttccaactgatctgaaccagactctgccttccatggatttcggttggattgcgtcgcttcctgatcataaccaaaactcctcgaatgacactggacaagcatcctgtccacccggcctctaccaaaccgtgccaccagaggaacattaccagacctttcctatacaggatcctgatcaaatgcattccacttccgaccctagccaccggagctcgtcccccgaactctcagagatgctcgaatatgatcgctctcacaaatcgttcccaaccgacatctcgcaaatgtccccaagctcggaacacgaagtgtggcaaactgtcatcagcccggacctttcacaagtgactctttcgccggagctgtcgcagacgaacctcagccccgacctctcccatactaccctgagcccagaattgatccaacgtaacctctcgcctgccctgggacagatgccaatttcacccgatctgtcccatactacgctctcgcccgatctgtcacacaccaccctgagccttgacctgtcgcagaccaatctctctccagaactctcccaaactaacctttcccccgcactcggccagatgccgctttcaccagatctgagccataccaccctttcgctcgatttttcacagactaatcttagtccagagctgtcgcacatgactctgtcgcctgagctttcacagaccaacctgagcccagcactgggacaaatgcctatatcgcccgatctttcgcataccactctgtcgctggacttctcgcaaaccaatctttcccctgaactctcccagaccaatctttcgccagcacttggccaaatgccgctcagcccagacccttcgcacactaccttgtcacttgacctgagccaaaccaatctgtcaccagaactttcgcaaaccaacttgtctcccgatctcagtgaaatgcctctgtttgctgatctgagccagattcctctcacgcctgacttggatcagatgactcttagccctgacctgggagaaaccgacctgtcccctaatttcggacagatgtccctgtcgcctgacttgtcccaagtcacccttagcccagatatcagcgatactacccttcttccggatctctcccagattagcccaccacccgacctggatcagattttctacccatcggaatcctcgcagtcgttgcttcttcaggagttcaacgagagctttccttaccctgatctcggtcagatgcctagccctagctcacctactctgaacgacacttttctcagcaaagagttcaaccctctggtgattgtgggtctgtccaaagacgggaccgactacatagagattattcccaaggaggaagtgcaatcctccgaggacgattacgccgagatcgattacgtcccatacgatgatccctacaagactgacgtgagaactaacattaactcctcacgcgacccagacaacatagcggcctggtacctgcgttcgaacaacggaaacaggaggaactactacatagcagctgaggagatctcatgggattactccgagtttgtccagagggaaactgatattgaagattccgatgacatccctgaagatactacctataagaaggtggtgtttaggaaatacctggattcgactttcactaagagagatcctagaggagaatacgaagagcatctcggtatcctgggaccaattatccgagctgaggtggacgacgtcatacaggtcagattcaaaaacctcgcatcacgcccatactccttgcacgcacatggactctcctacgaaaagtcctcggagggtaaaacttacgaggatgactcgccagagtggtttaaggaggataacgcagtgcaacccaattcgtcgtatacttacgtgtggcacgctaccgagcgctccggaccagaaagtcccggatccgcatgtagagcctgggcgtactactcggcagtgaatcctgagaaggatatacattccggacttatcggacctctgctgatctgccaaaagggcattctgcacaaggattccaacatgccaatggatatgagagaattcgtgctgcttttcatgaccttcgacgaaaagaaatcctggtactacgaaaagaagtcacggagctcctggcggttgacctcatcggaaatgaagaaaagccacgaattccatgcgattaacggtatgatctacagccttccaggactgaagatgtatgaacaagagtgggtgcgccttcaccttctcaacataggaggatcgcaggatatccacgtggtgcattttcatgggcagaccctgctcgagaacggtaataagcagcatcaactgggcgtgtggcctctgcttccgggatccttcaaaaccctggaaatgaaagcatccaagcctggatggtggctgcttaataccgaggtgggcgagaaccagcgggccgggatgcagacgccttttctcataatggatagagattgtcggatgccgatggggctgagtactggcattatctcggattctcagattaaggcgtccgaatttcttgggtactgggaacctcgacttgcaagactgaataacggaggttcgtacaacgcctggtccgtggagaagctggcagcagaattcgcctccaagccgtggattcaagtggacatgcaaaaggaagtcattatcactggcattcaaacccaaggggcaaagcattacctgaagagctgttataccaccgagttttacgtggcctactcgtctaaccagatcaactggcaaatcttcaagggaaacagcaccagaaacgtgatgtacttcaacggaaactcggatgcgtcgactattaaggagaaccaatttgatccacctattgtggcacggtacatccgcatctcccctaccagagcatacaatcggccaaccctgcgccttgagctgcaagggtgtgaagtgaacgggtgttcgacccccctgggcatggaaaatggtaagattgaaaacaagcaaattaccgcctcgtcatttaagaaatcgtggtggggagattactgggagcccttccgtgctcggcttaatgcccagggtcgcgtcaatgcttggcaagcaaaggccaacaacaacaagcagtggcttgaaatcgacttgcttaagatcaaaaagataaccgccataatcactcaaggttgtaaatctctttcatccgagatgtacgtgaaaagctacactattcattactcagagcagggcgtggaatggaagccgtaccggctcaagtcctcgatggtcgacaagattttcgaaggtaacaccaatactaagggacatgtcaagaactttttcaatcctccgatcatttccaggttcatccgggtcattcctaaaacctggaaccaatcaatcgctctgagactggaactctttgggtgtgatatctac

SEQ ID NO: 9083 - DNA, 6672 bp, synthetic construct
  misc_feature 1..6672: note = source = /note="Description of Artificial Sequence: Synthetic coding sequence"
  source 1..6672: mol_type = other DNA
atgtttcctggttgcccgagactttgggtcctggtggtcctgggcacttcatgggtgggttggggatcgcaaggaacggaggcggcccaacttaggcaattctacgtcgcagcccaaggtatttcctggtcataccgcccggagccaaccaattcaagcctgaatctgtcggtgaccagctttaagaaaattgtgtaccgcgagtacgaaccctactttaagaaagagaagccacaatcgactatctccggacttcttggacctaccctttacgcagaagtgggggatatcatcaaggtccactttaagaataaggcagacaagcctctttcgattcatccacagggaatccgctactcgaaactgtccgagggcgcatcgtaccttgatcatacctttcccgccgagaagatggatgacgcagttgcacctggtagagaatacacctacgaatggtcgattagcgaagattcgggaccaacgcatgacgatccaccatgtctgacccacatctactactcacacgaaaatctgatcgaggacttcaattcaggactgatcggccctcttttgatttgtaagaagggaactctgactgaaggaggaactcaaaagacctttgataagcagattgtcctgcttttcgccgtgtttgatgaaagcaagagctggtcgcaaagctcatcgctcatgtacaccgtgaacggatacgtgaatggaaccatgcccgatatcacggtctgcgcccacgatcatatttcctggcatttgctcggcatgtcatcgggtcctgaactcttctcaatccactttaacggtcaagttctggagcaaaatcatcataaagtgtcagccattactcttgtctcggccaccagcactaccgcaaacatgactgtgggtcctgaaggaaagtggatcatttcctccttgactccaaagcatttgcaggcgggtatgcaagcatacatcgatatcaagaattgcccaaaaaagacgcgtaacctgaaaaagatcaccagagaacagcgcagacatatgaaacggtgggagtactttatagccgcagaagaagtcatttgggattacgcacccgtgatccctgcaaatatggataagaagtaccgtagccagcatctggataacttttccaatcaaattggtaagcactacaagaaggtgatgtacacccagtacgaggatgaatcgttcaccaagcatactgtgaatcctaatatgaaggaggatgggatccttggacccataatccgggcacaagttcgcgatacccttaagatcgtgtttaagaacatggctagccgcccatactcgatttatcctcacggagtgactttctcaccttacgaggacgaggttaattcctcctttacgtcagggagaaacaacaccatgattagagcagtgcaacctggagaaacttacacctacaaatggaatatcctggagttcgacgagccaactgaaaacgatgcccagtgtctcacccgtccgtactacagcgatgtcgacattatgagagacatcgcctccggactgattgggcttctgctgatttgtaagtccagatccctggaccgtaggggaatccaaagggccgccgatattgaacagcaagcggtgttcgcagtctttgacgaaaacaaatcatggtacctggaggataacatcaataagttttgtgaaaaccccgatgaagttaagagagatgatccgaaattctacgaaagcaacattatgtccactattaacgggtacgtgcctgaatccattactactctgggattctgcttcgatgacaccgtccaatggcacttttgctccgtgggtactcaaaacgagattcttacgatccatttcactgggcattcattcatatacgggaagagacacgaggataccctgacccttttccctatgcggggagagtcggtcaccgtgaccatggacaacgtgggaacttggatgctgacttctatgaactcgtcccctaggtcgaagaaacttaggcttaagtttagagacgtgaagtgtattccagacgatgacgaggatagctacgagattttcgaaccccccgagtcgaccgtcatggccactaggaaaatgcatgatagacttgaacctgaagatgaagaatccgacgcagattacgattaccaaaatcgccttgcggctgcacttggaattagatcctttagaaatagctcgctcaaccaggaggaagaagaattcaatctgaccgccctcgcacttgagaacggaaccgagttcgtctcatcgaacactgacattattgtgggatcgaactacagcagcccgagcaacattagcaagtttacggtgaataacctcgccgagcctcaaaaggctccatcccatcaacaggccaccactgccggatcccctcttcgtcatctcattgggaagaactccgtcctgaactcctcaactgcagagcatagctccccttactccgaagatcctattgaagatccactgcagccagatgtgaccggtattagactgctctcgttgggagcaggagagtttaagagccaagagcatgcaaagcataagggacctaaggtcgaaagagatcaagcagccaagcaccgattttcctggatgaagctgcttgcacataaagtcggaaggcacctttcgcaagataccggctccccttcgggaatgcgcccctgggaggaccttcccagccaggacaccggatcaccatcacgcatgcgtccttggaaggatcctccctctgatctgctccttcttaaacaatcaaatagctcgaagattctggtggggcgatggcatctggcatccgagaaggggagctacgaaatcattcaggatacggatgaggacaccgccgtgaacaactggcttatttctccacagaacgcatcaagagcatggggtgaaagcactcctctcgccaacaaacctgggaagcagtcaggccatccaaagtttcctcgcgtcagacacaaatcgctgcaggtgcggcaggatggaggtaagtcgcgcctgaagaagtcgcagtttcttatcaaaactagaaagaagaagaaggagaagcatactcatcatgcgcctctttcaccgcgcacgtttcacccactgcggtcggaggcatacaatacttttagcgaaagacgattgaagcatagcctggtccttcacaagtcaaacgaaacctcgcttcctactgatctgaaccaaactctgccatcgatggacttcggttggattgcaagccttccagatcataaccagaattcgtcgaatgacaccggtcaggcatcgtgccctccaggcctctaccaaactgtgccacccgaagaacactaccaaacctttcctattcaagatccagaccaaatgcattcaacctccgatcctagccaccgtagctcgtcccccgaattgtcggaaatgctggagtacgatcggtcgcacaagagctttccaacggatatctcgcaaatgtccccgtcatcggaacacgaggtgtggcaaactgtgatctctcctgaccttagtcaagtcaccctgagcccagagctgtcacaaactaatctttcgcccgacctctcacacactactttgtcaccagagcttattcagcgcaacctcagcccagcactgggacaaatgccgatttcacccgatctttcccatactacgctctcccccgacctttctcataccactctgtccctggacctcagccagacgaacttgagccccgaactgtcccaaaccaacctttctcctgcgctgggtcagatgccgctttcccctgacctttcacatacgactctctcgctggacttttctcagacgaaccttagcccagagcttagccatatgactctgtccccggaattgagccagaccaacctgagccccgcgctcggccaaatgccaattagcccagacctttcgcacaccactttgagcctcgatttctcgcaaactaacttgtcgcccgaactttcccaaacgaatttgtcgcctgcgcttggccaaatgcccctgagcccggatcctagccataccaccctgtcgctggatctctctcaaactaacctgtccccagagctgagccaaacgaatctgtcgccagacctgtctgaaatgcctctcttcgcagatctcagccaaattcctctcacccctgacctggaccaaatgactctctcacctgatcttggcgaaaccgatctgtcccctaacttcggacagatgagcctttcgcctgatctgagccaggtcactctttcaccggacatatctgacactaccctcctcccggacttgagccagatttcgcccccaccagatctggatcagatcttctacccctccgaatcgtcgcaatcactgctgcttcaggaattcaatgaatcctttccttaccctgatcttggacaaatgccatccccatcctcccctaccctgaatgacacgttcctttccaaggaattcaatcctctggtgattgtgggactttcgaaggatggaaccgattacatcgagattattcccaaggaggaagtgcaatccagcgaagatgactacgcggaaatcgattacgtgccttacgatgacccctacaagaccgacgtccggaccaacataaactcatcgcgggatccagataacattgcagcgtggtatctgcgctcgaataacgggaaccggcggaactactacattgcagctgaggaaatctcgtgggactactcagaatttgtgcagcgggagactgatatagaggacagcgacgacatccctgaggataccacctacaaaaaggtagtctttcgaaagtacctggacagcactttcaccaaacgggatccgagaggggagtacgaagaacacctgggaatactgggtcctatcattcgggctgaagtggatgacgtgatccaagtgcggttcaagaacctggcatcacgcccttattcgctgcatgcacatggtctttcgtatgagaagtcctcggagggtaagacctacgaagatgactcccctgaatggttcaaggaagataacgcagtccaacctaactcctcctacacctacgtctggcatgcaaccgaaagatcgggaccagaatccccaggttccgcgtgtagagcctgggcatattactcggcagtgaacccagagaaggacatccactccggcctgattggtcctttgctcatatgtcaaaagggaatcttgcataaggactcgaacatgcctatggatatgagagaatttgtgcttttgtttatgaccttcgatgagaagaaaagctggtactacgagaaaaagtcgcgatcaagctggcgtcttacgagctcagaaatgaagaagtcccacgaatttcacgcgattaatggaatgatctactccctgccaggtctgaagatgtacgaacaggaatgggtgcggcttcacctcctgaacatcggtggctcccaagatattcatgtggtgcacttccacggacaaacgctgctcgaaaacggtaacaagcaacatcagctcggggtgtggcctctcttgcctggatcgtttaagacccttgaaatgaaggcctcgaagccgggttggtggcttcttaacactgaggttggtgagaaccagagggcaggtatgcaaaccccattcctcatcatggatcgggattgtagaatgcctatgggactcagtaccggaatcatatcggattcgcagatcaaggcttcagagtttcttgggtactgggagccacggctggccagacttaacaacggagggtcctacaacgcatggtcagtcgagaagttggcagcagaattcgcctcgaagccttggatacaggtggatatgcagaaagaagtcatcattaccggaattcaaacccagggagcaaagcattacctcaagagctgttacaccaccgagttttacgtcgcatactcctcgaaccagatcaattggcaaatctttaaaggaaattccactagaaacgtcatgtactttaacggcaactcagatgcctcaacgatcaaggaaaaccaatttgatccgccaattgtggctcgctacatccgtatcagccccaccagagcatacaacaggccaaccctgaggcttgaactgcaggggtgtgaggtcaacggatgctcaactcccctgggtatggaaaacggaaagattgaaaacaagcaaattaccgcatcgtcttttaagaagtcctggtggggggattactgggagccctttagagcccgtcttaacgcacaaggacgagttaatgcatggcaggcaaaggcaaataacaacaagcagtggcttgaaattgatctcttgaaaatcaaaaagatcacggcaatcattactcagggttgtaaatcgctgtcctcagaaatgtacgtgaaatcatacactattcattacagcgagcaaggggtcgagtggaagccgtaccgcctgaaaagcagcatggtcgataagatcttcgagggaaacaccaacaccaagggacacgtcaaaaacttctttaaccctccgatcatcagccgctttatccgagtgattcctaagacttggaatcagagcatagcccttaggctggagcttttcgggtgcgacatatac

SEQ ID NO: 9084 - DNA, 6672 bp, synthetic construct
  misc_feature 1..6672: note = source = /note="Description of Artificial Sequence: Synthetic coding sequence"
  source 1..6672: mol_type = other DNA
atgtttcccggctgcccgaggctgtgggtcctggtggtgctgggcacaagttgggtgggctgggggtcccagggaaccgaggctgctcagctgaggcagttctacgtggcagcccagggcataagctggagttatcgcccggaaccgactaattccagcttgaatcttagcgtgacatccttcaaaaagatcgtgtacagggagtatgagccatactttaaaaaagagaaaccacaatcaaccatcagtggcctcctgggaccaaccctgtatgcagaagtgggtgacataataaaagttcattttaaaaacaaagcggacaagccacttagtattcatccacaggggatccgctactcaaagctcagcgagggggcctcatacttagaccatacatttcccgctgagaaaatggacgacgctgtggctcccgggagggaatacacctacgaatggtctatcagcgaggactcaggtccaactcatgacgaccccccatgtctaacgcatatttattactcacatgaaaatctgatagaggacttcaattcagggctcattggccccctgcttatctgcaagaaaggcactctgaccgaaggcggtacccagaagacctttgataagcaaattgtgctgctgttcgcggtcttcgacgaatctaagtcttggagccagtcatcctcacttatgtacacggtgaatggttacgtgaatggcaccatgccggatattacagtatgcgcccacgaccacatcagttggcatctcctgggaatgagcagcggtccagagcttttctccattcatttcaatggtcaggtgctggagcagaatcatcacaaagtgtctgccattaccctcgtgtcagccacttccaccaccgcgaatatgacagtcggccctgaaggcaagtggataataagcagcttaactcccaaacacttgcaggcaggcatgcaggcgtatatcgacatcaaaaattgtcccaagaaaacgagaaacctgaaaaaaatcacccgtgagcagagaagacacatgaagcgctgggaatattttatagctgctgaggaagtgatctgggactacgctcctgtgatccctgcaaacatggataagaagtatcgttctcagcatttagataacttttctaatcaaatcggtaaacattacaagaaggtcatgtacacgcaatatgaggacgaatcgtttacaaagcacaccgttaacccaaatatgaaagaagatggcattctggggccaattataagagcacaagtgagagacaccctgaaaattgtcttcaagaacatggcttctaggccctactcaatctacccccacggggttaccttctccccttacgaagatgaggttaacagctcttttacgtccggacggaataacactatgattagggctgtgcagccaggagagacttacacttacaagtggaatattctggagttcgatgagccaacagaaaatgacgcgcagtgcttgacccggccatactactccgatgtggacatcatgcgggacatcgcttcagggctgattggcctgttactgatttgtaaatctaggagcctggacaggcgtggcatccagagagcagcagatatagaacagcaggccgttttcgccgtattcgatgaaaacaagtcctggtatctggaagacaatatcaacaaattttgtgagaacccagacgaggttaaaagggacgatccgaaattttacgaatcaaacatcatgtccacaataaatgggtatgttcctgagtcgatcaccaccttgggcttctgttttgacgacacagtccagtggcacttctgttccgtggggacccaaaacgagatcctgactattcactttacggggcatagtttcatctatggtaagagacacgaagacaccctgacactgttcccaatgcgaggagaatccgtgacagtaaccatggataatgtgggcacttggatgctaacgtccatgaatagctctccgaggtccaagaagctccgtttaaagtttcgggacgttaaatgcattcccgatgatgatgaagactcttacgagatcttcgaacctcctgaatcaactgtgatggcgactaggaagatgcacgacagactggaacccgaggacgaggaaagcgacgcggactacgactaccagaacagactagctgccgccctggggatacggtcttttcgaaacagctcactgaatcaagaggaggaggagtttaatctgactgccttagcactcgagaatggaaccgaatttgttagttcgaatacagatataatagtggggtctaactactcaagtccaagcaatattagtaaatttaccgttaacaacctggccgaacctcagaaggctcccagccaccaacaggctacgacggccggatcccccctgcgacacctgattggcaagaattccgtgctgaactcttcaactgccgagcactcttctccttacagcgaggatccgattgaggatccactgcagccagacgtgactggaattagattgttaagtttgggagccggagagttcaaatcccaggaacatgccaagcacaagggccccaaggtcgagcgggatcaagctgccaagcaccggttcagctggatgaagcttctggcccataaagtgggcaggcatctttctcaagatacaggttcgccttccgggatgcggccctgggaggatctgccctcccaggacactggatcaccttctagaatgcggccttggaaggatcccccctctgacttgctgttgcttaaacagagcaattcctctaaaatccttgtggggcgttggcacctggccagtgagaagggctcctacgagataattcaagacacggacgaggatactgccgtgaacaattggcttataagtccacaaaatgcttctcgggcatggggagagagtacccccctcgcaaataagccgggtaaacagagtggacatccgaagttcccacgggttaggcacaagtctttacaggtacgtcaggacggcgggaagtcacggttaaagaagtcacaattcctcatcaagacaagaaaaaaaaaaaaagagaaacatacccaccatgctcctttgagtccacgtaccttccatcccttgcggtcagaggcctataatacgttctccgagcggagactgaaacactctctggtgctgcataaatctaatgaaacgagcttacccaccgatcttaatcagaccctgcctagcatggacttcgggtggatcgccagcctgcccgaccacaaccagaatagttctaatgatactggacaagccagctgcccccccgggctgtaccaaacggtgcctcccgaagaacactaccagaccttccccatccaggaccctgaccaaatgcatagcacaagtgacccaagtcatcggtccagtagccccgagttgtctgagatgctggagtacgaccgatctcacaaatcattccctacagatatatcccaaatgagtccctcctccgaacatgaggtgtggcagacagtgatcagccccgatcttagtcaggtcacactgtccccagagttgtctcagaccaacttgtctcctgatctctctcacaccaccttgtctccagagcttattcagcgaaatctttcccccgcgctcggccagatgcccattagccccgatctttctcatacgactctttcacccgacctatcgcacacaacgctatcgctggacctgtcccagaccaacctgagtccggaactctctcaaaccaatctgtcacctgcactgggacagatgccattgtccccagacttgagtcacacaacactgagcctggactttagtcagactaatttgagccccgaactttctcatatgacgctgtctcctgaactgagccagacaaacctctcgccagcccttggccaaatgccgatcagcccagatctctcccatacgactctgtccctggacttttcccagacaaatctgtcccctgaactgtcccagaccaatttatcccccgccctggggcagatgcctctgtcaccagacccatcccataccaccctgtcccttgacctgagccaaactaacctgagccctgagctgagccagactaaccttagtccagacctgagcgagatgcccttattcgcggacctgtcacagatccccttaacccctgatctcgaccagatgactctatcaccagacctgggggagaccgacctgtcacccaactttggtcagatgtccctaagccccgacctgtcacaggtcacgcttagccccgatatttcggacaccacattgctacccgatcttagtcaaatctccccacctcctgacctggatcagatattttatcctagtgaatcgtctcagagcctacttctgcaagaatttaatgagtcattcccttatcccgatctgggacagatgccatcaccttcatcgcccaccctgaacgacacttttttgtcaaaggagtttaatccccttgttatcgttgggctctctaaggacgggaccgactacattgaaattattcccaaagaagaagttcagagctcagaggatgattacgctgaaattgattacgtcccttacgatgatccctacaaaactgacgtgcgtaccaatataaacagttctcgcgatcctgataacatcgcagcttggtacttgcgttcgaataacggcaataggagaaactactacatcgcagccgaggagattagttgggattactctgaattcgtccagcgggagaccgatatcgaggactccgacgatattcccgaagatacaacatacaagaaggtggtattccgaaaatatctggactccacattcaccaagagagatccaagaggtgagtatgaggaacacttaggaatactagggcccattattagggctgaagtggatgatgtcatccaggttcgcttcaaaaatctggcatcccgcccatactccctgcatgcccacggcctctcatacgagaagagttcggagggaaaaacctatgaagatgacagtccagagtggttcaaggaggacaatgcagtccagccaaactcaagctacacctacgtttggcacgccacggaacgttctggacctgaaagcccaggcagcgcctgtcgagcttgggcctattatagtgcagttaatcccgagaaagacatccactcgggtctaatcgggcccttgttgatctgtcagaaaggcattctccacaaggattccaacatgccaatggatatgagggagtttgtgctcctgtttatgacgttcgacgagaagaaatcttggtactacgagaagaagtcaagatcctcctggaggctcactagttcagaaatgaagaagtcacatgagtttcatgccataaatggcatgatctacagccttcccggactgaagatgtacgaacaggaatgggtgcgactccacttattgaatatcgggggcagccaggacatacatgtggtgcactttcacggtcagacgctgctcgagaacggcaacaaacaacatcagctgggcgtgtggcctctgcttcccgggtcattcaagaccctggaaatgaaggctagtaagcctggttggtggttactcaatactgaggtgggcgagaaccagcgggcagggatgcagacaccttttcttattatggaccgcgactgcaggatgcccatggggctctcaacggggattattagcgatagccagatcaaggccagcgagtttctgggatactgggaacctcgactagcccgactgaacaacggaggaagttacaatgcttggtccgtggagaagcttgccgccgaatttgcctctaagccttggatccaggtggacatgcagaaggaggtcatcatcacaggcatccagactcagggggcaaagcattacttgaaatcctgctataccacagagttctatgtcgcttatagcagcaaccagataaattggcagatattcaagggcaattctactcgcaacgttatgtatttcaatggcaactcagatgccagtacgattaaggagaaccagttcgaccctccaatcgtggctaggtacatccgaatcagtcccacccgggcctataaccggcccacattaaggctcgagctacagggttgcgaagtcaatggctgctccaccccgctgggcatggagaacggaaaaatcgagaacaagcagatcactgcaagctcattcaaaaagagttggtggggggactattgggaaccgttcagagctaggctgaacgctcagggaagagtgaacgcttggcaggccaaggcaaataacaataagcagtggcttgaaatcgatctgttgaagatcaagaagataaccgctattatcacccaggggtgcaagtccctctcctccgaaatgtatgtgaaaagctacaccatccattacagcgaacagggcgtggaatggaagccctacagactgaagtcctcaatggttgacaaaattttcgagggaaacacaaacacaaagggccacgtgaagaattttttcaatcccccgattatatctaggttcatcagagtcatcccgaaaacatggaaccagagcattgccctccgactcgagttgttcggctgcgacatctac

SEQ ID NO: 9085 - DNA, 6672 bp, synthetic construct
  misc_feature 1..6672: note = source = /note="Description of Artificial Sequence: Synthetic coding sequence"
  source 1..6672: mol_type = other DNA
atgttccccggctgtccacgcctttgggtgcttgtggtgctgggtacgtcgtgggtaggatggggttcgcaaggcaccgaagcagctcagctccgccagttttatgtggcggcacaagggattagctggtcatatagacctgaacccactaacagttcgttgaacctcagcgtgacgagctttaagaagattgtgtacagggaatacgaaccttactttaagaaagaaaaaccacaatcgaccatttcaggactgcttggaccaactctttacgctgaagtgggagacattatcaaggtgcactttaagaataaggcggacaaacctctctcgattcatccacaaggcatacgatactccaagctgagcgagggagcctcatacctggaccacactttccctgcagaaaagatggatgacgcagtcgcaccgggcagagaatacacgtacgaatggtcaatatccgaggattctggaccaacgcatgacgatcctccttgtctgacgcacatctactactctcatgaaaatcttattgaagatttcaattcgggtctgataggcccattgcttatttgcaaaaaaggaacccttactgaggggggaacccaaaagacgtttgataagcagatcgtgctcctgttcgcagtctttgatgagtccaaatcctggagccaaagctccagccttatgtacactgtgaatggttatgtgaacggaactatgccagatattactgtttgtgcgcatgatcacatttcttggcaccttcttgggatgtcatcaggccctgaactgttctcgattcacttcaatgggcaggtgctggaacagaaccaccataaggtgtcggccatcactcttgtgtcagccacttcaactaccgcaaacatgaccgtcgggcccgagggtaagtggattatctcgagtctcacgccgaagcatcttcaggcaggtatgcaagcctacatcgacatcaaaaactgtcctaaaaagacgagaaacttgaagaaaatcacgcgtgaacaacggcgccacatgaagcgctgggagtactttattgcagcggaggaagtgatttgggattacgcccctgtcatccccgccaatatggacaaaaagtaccgctcccaacatttggacaactttagcaaccaaattggaaagcactacaagaaggtgatgtacacgcagtacgaagatgaatcgtttactaaacatactgtgaaccctaacatgaaagaggacggtatccttggccctatcattagagctcaagtgagggacaccctgaaaattgtgtttaagaacatggctagccgcccctacagcatctaccctcacggagtgacgtttagcccctacgaggacgaggttaattcctcattcacctcgggacgtaacaacacgatgattagagctgttcaaccaggagaaacttatacctacaagtggaacattctggagtttgatgaaccaaccgagaacgacgcgcagtgtcttactagaccttactactcggatgtggacattatgcgtgacatagcatctggactgataggccttctgctgatctgtaaatcgcgctccctcgaccggagaggaattcaacgcgccgcagatatagagcaacaggcagtgtttgcagtctttgacgaaaacaagtcctggtaccttgaggacaacattaacaagttttgtgaaaacccagatgaagtgaagagagatgatcccaaattctacgaaagcaatatcatgagcactatcaatgggtacgtgccagaatcaattaccactctcggattctgttttgatgatactgtgcaatggcatttttgctcggtgggcactcaaaatgaaatcctgactattcatttcactggacattcgtttatctacggcaaaagacatgaagatactttgaccctctttccaatgcggggtgaatccgtcaccgtcacgatggataacgtcggaacctggatgctgacttccatgaacagcagtcctcgcagcaaaaagctgcggcttaagttcagagacgtgaagtgcattcctgatgatgatgaggactcctacgagatatttgaaccacctgagtcgaccgtgatggcaactagaaagatgcatgatcgtctcgaaccagaggacgaagaaagcgatgcagattacgattaccagaatcggctggcggctgctctcggaataagatctttccgcaactcatcgcttaaccaagaagaagaagaattcaacctgacggcgcttgcactcgagaacgggaccgagtttgtcagcagcaacacggatatcatcgtgggatcgaattactcaagcccatctaacatctcgaagtttaccgtgaataatctggcagaaccccaaaaggcaccatcccatcaacaggcgacgaccgccggatcccctcttcgccatcttatcggaaagaatagcgtgcttaactcatcaaccgcagaacactcctccccgtactcggaagatccaattgaagatccactccagccagatgtgaccggcattcgcctgctgtctcttggcgccggcgaattcaagtcccaagaacacgcaaagcataagggtccaaaggtggaacgagatcaagcagcgaagcatcgatttagctggatgaagctgcttgcacataaggtcgggaggcacttgtcccaagacaccggctctccgtccggtatgcgcccttgggaggaccttccgtcacaagataccggttctccatcgcgaatgaggccttggaaggacccgccgtcagacttgctgcttctcaaacagtcgaattcatcgaagattctcgtgggtagatggcacctggcctccgagaaggggtcatacgaaatcatccaggacactgatgaagatactgcagtcaacaattggcttattagcccacagaatgcatcccgggcatggggcgagtcgacccctttggccaacaaacccggaaagcagagcggacatcctaagtttccaagagtgagacataaatcccttcaagtccggcaagatggggggaagtcgcggctgaagaaaagccagtttctgattaagacgagaaagaagaagaaagaaaagcacacccatcatgcgcctctgtcgccgagaaccttccatcctcttcgttcggaagcctacaacaccttctcggaaaggagactgaaacactcgctggtgctgcataagagcaatgagactagccttcccaccgatctgaatcaaactctgccatcgatggatttcggttggatcgcatcgctcccggatcataaccaaaattcttcaaacgacaccggacaagcctcatgtcctcctggactctaccagactgtccccccggaagagcactaccaaacttttcctattcaagatccagaccaaatgcacagcacctccgacccgtcccatcgttcgagctcacctgaactctcagagatgctggagtacgacaggtcccataagagcttccccactgacatatcgcagatgtccccgagctccgaacatgaagtgtggcagaccgtgatctcgcccgacctgtcgcaagtgacgctgtcgccagaactcagccaaaccaacctctcaccggacctgtcccataccactttgtcaccagaattgatccagcgtaacctgtcgccagcacttggccagatgcccatttcaccagatctgagccataccactctgtctcctgatctcagccataccaccctctccctggatctttctcaaaccaaccttagcccagaactctcacagaccaatctgtcaccggcactggggcaaatgccgctttcgcccgatctctcacacactaccctgagccttgacttttcgcaaaccaacctgtccccagagctgagccatatgaccctcagccctgagctttcacaaaccaatttgtccccagcactcggacagatgccaatatcaccagacctgagtcataccaccctttcgcttgattttagtcaaactaatctctccccggaattgtcgcaaaccaatctctcacctgcactgggccagatgcctctcagccctgatccttctcatactactctgtcgttggatctcagccagaccaacctttcacctgagctgagccagaccaatcttagcccggacttgagcgagatgccgctgtttgctgaccttagccagattccccttacccctgaccttgatcagatgaccttgagccctgatctgggtgaaaccgacctttcccccaactttggacaaatgtccttgtcacctgatctttcgcaggtgaccctgtctccagacattagcgacaccactttgctgcccgatctgtcgcagatttcccctccgccagatctcgatcagatcttttacccttccgaatcttcacaatcgctgcttcttcaggagtttaacgaatcatttccctacccggatcttggccaaatgcctagcccctcgtcgcctactcttaacgacacttttctttcgaaggagttcaacccactcgtcattgtaggactcagcaaggacggaaccgactacattgaaatcattccaaaggaagaagtccaatcctcggaagatgattacgcagaaatagattacgtcccatacgatgatccgtataagactgatgtgcgcactaacattaactcaagcagagatcccgacaacattgccgcatggtaccttcggtccaacaacggaaataggcgaaattactacatagccgccgaggaaataagctgggactactccgagtttgtgcaacgggagacggacatcgaggattcggatgacattcctgaggataccacttacaagaaagtggtgtttcggaagtacctggatagcacgtttaccaaacgggatcccagaggggaatacgaagaacatctgggcatccttggtcctataatcagagcggaagtcgatgacgtgatacaagtgcgctttaagaacctcgcaagccggccctattcgctgcacgcacatggtttgtcgtacgagaagtctagtgaaggaaagacttacgaagatgattcgcctgaatggttcaaagaagataacgcagttcaacccaatagcagctacacttacgtttggcatgcaaccgagaggtctggtcctgagtcacctgggagcgcttgtagggcgtgggcttactactcagcagtcaatcctgagaaggacattcattcgggactgattggtcctcttcttatctgccaaaaaggaatcctccataaggactcgaatatgcctatggatatgagagagttcgttcttctgtttatgacttttgatgaaaagaaatcgtggtactacgagaagaagtcgagatcctcctggcgcctgacttcctccgaaatgaagaagtctcacgagttccacgccattaacgggatgatttactcgcttccaggtctgaaaatgtacgaacaggaatgggtccgtctccaccttctgaatattggtggcagccaggatattcacgtggtccattttcatggacagactctgctggaaaatggaaacaaacaacaccagcttggtgtgtggccacttctcccgggttcattcaagactcttgaaatgaaggcaagcaagcccgggtggtggcttctgaataccgaagtaggtgagaatcagagagcggggatgcagaccccttttctgatcatggatcgtgactgcaggatgccaatgggtctgtccaccgggatcatttccgacagccagattaaagcctctgaattccttggatattgggaaccccgccttgcacgactcaacaatggaggttcatacaacgcctggtcagtggaaaagctcgcagccgaatttgcatctaaaccttggattcaggtcgatatgcaaaaggaggtgattatcactggtatacaaactcagggcgccaaacattatcttaagagctgctataccactgaattctacgttgcgtactcatccaaccagatcaattggcagatattcaaggggaatagcactaggaatgtgatgtatttcaatgggaactccgatgcttcaaccattaaagagaaccagtttgaccctccaattgtggcacgatacattagaatctcaccaacccgggcctataaccgtccaactctgaggctcgagcttcaaggttgtgaggtcaacggatgtagcacccccctgggcatggaaaacgggaagatcgagaacaagcaaattaccgcgtccagcttcaagaaatcatggtggggagattactgggaaccttttagagcacggctcaacgcccagggtcgggtcaatgcatggcaggccaaagcaaataacaacaagcagtggcttgaaatagatcttcttaagataaagaaaatcactgcaatcatcactcaaggttgcaaatcactgtccagcgaaatgtacgtgaagtcttataccattcactactcggagcaaggagtggaatggaagccataccggctgaaatcttcgatggtcgataagatctttgagggaaacaccaacactaaaggacatgttaagaactttttcaaccctcccatcattagcagattcataagagtgattcctaagacttggaaccagtccattgcactgcgtctcgagttgtttggatgcgatatctac

SEQ ID NO: 9086 - DNA, 6672 bp, synthetic construct
  misc_feature 1..6672: note = source = /note="Description of Artificial Sequence: Synthetic coding sequence"
  source 1..6672: mol_type = other DNA
atgtttcctggttgtccaagattatgggtattagttgttttaggtactagttgggttggatggggtagtcaaggaacagaagcagctcaattaagacaattttatgttgcagcacagggaatttcatggtcatatcgaccagaaccaacaaattcatcattaaatttatcagtaacttcatttaaaaaaattgtttatagagaatacgaaccatatttcaaaaaagaaaaaccacaaagtactatttctgggttacttggacctacattatatgctgaagttggtgatattattaaagtccattttaaaaacaaagccgataaaccattatctatacacccacaaggaattagatatagtaaattatctgagggagctagttatttagatcatactttcccagcagaaaaaatggatgatgccgtcgcacctggtcgtgaatatacttatgaatggtcaattagtgaagatagtggacctactcatgatgatccaccatgtttaacacatatatattattcacatgaaaatttaatcgaagattttaattcaggattaatcggaccattacttatttgtaaaaaaggaacgttaacggaaggtggaactcaaaaaacattcgataaacaaattgttttgctttttgcagtttttgacgaatctaaaagttggtctcaatctagtagtttaatgtatactgttaatggttatgttaatggtactatgccagatattactgtttgtgctcacgatcacattagttggcatttattaggaatgtcttcaggtccagaattattctcaatacatttcaatggacaagtattagaacaaaatcatcataaagtttcagctattacattggtatctgcaacatctaccactgcaaacatgactgttggaccagaaggaaaatggattattagttcattaacacctaaacatttacaagctggtatgcaagcttacattgacataaagaattgtccaaaaaaaacaagaaatttgaagaaaattactagagaacaacgtagacatatgaaaagatgggaatactttattgcagctgaagaagttatttgggactatgctcctgtaattccagctaatatggataaaaaatatagaagtcaacatcttgacaattttagtaatcaaattgggaagcattataaaaaagttatgtatacacaatatgaagatgaatcttttactaaacatacagttaatccaaatatgaaagaagatggaattttgggaccaattataagggctcaagttagagatacacttaaaattgttttcaaaaatatggcatcaagaccatactcaatttatccacatggagtaactttttctccatatgaggatgaagtaaattcatcattcacttctggaagaaacaatactatgataagagctgtacaaccaggagaaacttatacatataaatggaatattttagaatttgatgaaccaacagaaaatgatgctcaatgtttaacaagaccatattattcagatgttgacattatgagagatattgcatctggattaattggacttcttttaatttgtaaaagtcgatcattagatagaagaggtattcaaagagctgcagatatcgagcaacaggcagtttttgcagtttttgatgagaacaagagttggtatttagaagataatattaacaaattctgtgaaaatccagatgaagttaaaagagatgatccaaaattttatgaaagtaatattatgtctactattaacggatatgttcctgaaagtattactactttaggattctgttttgatgatactgtgcaatggcatttttgtagtgtaggaactcaaaacgagatacttactattcatttcactggacattcatttatttatggaaaacgtcatgaagatactttgacgcttttcccaatgagaggtgaatctgtaactgttactatggacaatgtaggaacttggatgcttactagtatgaatagttctccaagatcaaaaaagcttagacttaaatttagagatgttaaatgtatccctgacgatgatgaagattcttatgaaattttcgaacctcctgaatctacagttatggctacaaggaaaatgcatgatagactagaaccagaagatgaagaatcagatgcagattatgattatcaaaatagattagcagctgcattaggaattagatcatttagaaattcttcattaaatcaagaagaagaagaatttaatcttactgcactagcacttgaaaatggaacagaatttgtttcttcaaatacagatattattgttggttctaattattcatctccatcaaacatttcaaagttcactgtaaataatttagcagaaccacaaaaagctccaagtcatcaacaagccactacagctggatcaccattaagacacttaattggtaaaaattcagttcttaactcatcaacagctgagcattcatcaccatattcagaggatccaattgaagatcctttacaaccagatgttactggaattcgtttattatctttaggggctggagaattcaaatcacaagaacatgctaaacataaaggtccaaaggtagaaagagatcaagctgctaaacatagattctcatggatgaagttattagcacataaagtcggtagacacttaagtcaagatactggttcaccatcaggaatgagaccttgggaagacttgccaagtcaagatactggatcacctagtcgtatgagaccatggaaagatccaccaagcgatttattattattaaagcaaagtaatagttctaagattctcgttggaagatggcatcttgcaagtgaaaaaggaagttatgaaataattcaggatacagatgaagatacagcagtaaataattggttaatatcaccacaaaatgctagtagagcatggggtgaatctactccattagcaaataaacctggaaaacaatctggacatccaaaatttccaagagttagacataaatctcttcaagttagacaagacggtggaaaaagtagattaaaaaaatctcaatttttaattaaaacaagaaaaaaaaagaaagaaaaacatacacatcatgctccactttcaccaagaacatttcatccattaagatcagaggcatataatacattttctgaaagaagattaaagcattctcttgttctacataaaagcaacgaaacatctcttccaactgatcttaatcaaacattaccttctatggattttgggtggattgcatcacttccagatcataatcaaaattctagtaatgatacaggacaagcttcatgtcctcctggactttatcaaactgttccaccagaagaacattatcaaacttttccaattcaagatcctgatcaaatgcattcgactagtgatccttctcatcgtagttcatcaccagaattgagtgaaatgcttgaatatgatagatcacacaagtcatttccaactgatatttcacaaatgagtccaagctcagaacatgaagtttggcaaactgttatttctccagatttatcacaagttacattatctccagaactctcacaaacaaatttatctccagatttaagtcatacaactctttctccagaacttattcaaagaaatctttcaccagctttaggacaaatgccaatttcaccagacctttctcatacaactttatcaccagatttaagtcatacaactctttctttagatttgtcacaaactaatctttcacctgaattatcacagactaatttatcacctgcacttggacaaatgccattatcgccagatctatctcatacaaccttaagtttagatttctctcaaactaatttatcaccagaactttcacatatgacactttccccagaattatcacaaacaaatctttcaccagcattaggtcaaatgcctataagtccagatctttctcatacaacattaagtttagatttttcacaaacaaatttatccccagaacttagtcaaacaaatcttagtccagctttaggacaaatgcctttatcaccagatccatcacatacaactcttagtcttgatttaagtcaaactaatttatcaccagaacttagtcaaaccaatctttctccagacttatctgaaatgccattatttgctgatcttagtcaaattccattaactccagaccttgatcaaatgactttatcacctgatttaggtgaaactgatttatccccaaattttgggcaaatgagtctcagccctgatttaagtcaggttacactttctccagatatttcagatacaactcttcttccagacctttctcaaatttctcctccacctgaccttgatcaaattttttacccttcagaatcatctcaatcattattattacaagaatttaatgaatctttcccttatccagatcttggtcaaatgccaagtccaagttctccaacacttaatgacacttttctttcaaaagaatttaatcctcttgtcattgtaggacttagcaaagatggaactgattatattgaaattattccaaaagaagaagttcaatcaagtgaagatgattatgctgaaattgattatgtcccatatgacgatccttataaaacagatgtaagaacaaatattaattcttcaagagacccagataatattgcagcatggtatttaagaagtaataatggtaatagaagaaactattatattgcagcagaagaaatttcatgggattattctgaattcgtacaaagagaaacagatattgaagattctgatgatattcctgaagatacaacatataaaaaagttgtttttcgtaaatatttagattcaacttttacaaaaagagatcctagaggagaatatgaagaacatcttggtattttaggtcctattattagagctgaagttgatgacgttattcaagttagatttaagaatttagcatcaagaccatattcacttcatgctcatggactatcatatgagaaatcatctgaaggaaagacctatgaagacgattcaccagaatggtttaaagaagataacgctgttcaacctaatagttcatatacatatgtttggcacgcaactgaaagaagcggaccagaaagtcctggaagtgcatgtagagcttgggcatattatagtgctgttaacccagaaaaagatattcactcaggacttattggaccattattaatttgtcaaaaaggaatacttcacaaagattctaatatgccaatggatatgagagagttcgttcttttgtttatgactttcgatgaaaaaaaatcatggtattacgaaaaaaaatcacgaagtagttggagattaacttcatcagaaatgaaaaaaagtcatgaattccatgctattaatggaatgatttatagtctacctggattaaagatgtatgaacaagaatgggttagacttcacttattaaatattggaggaagtcaagatattcatgttgttcattttcatggacaaacattattagaaaatggaaataaacaacatcaacttggtgtatggcctttattaccaggatcttttaaaacattggagatgaaagcttcaaaaccaggttggtggctacttaataccgaagttggtgaaaatcaaagagcaggaatgcaaactcctttcttaattatggatagagattgtagaatgcctatgggtcttagtacaggaataattagtgattctcaaataaaggcttctgaatttttaggttattgggagcctagattagctagattaaataatggaggttcttataatgcttggtcagttgaaaaattagctgcagaatttgcatcaaaaccttggattcaagttgatatgcaaaaggaagttattattactgggattcaaacacaaggtgctaaacactatttaaaatcatgttatacaactgaattctatgttgcttattcatcgaatcaaattaattggcaaattttcaagggtaacagtactcgaaatgttatgtatttcaatgggaattcagatgcatcaacaataaaagaaaatcaatttgatccaccaattgttgctcgatatattagaatttctccaacaagagcttataatagaccaactcttcgattagaattacaaggttgtgaggtaaacggatgttcaactcctcttggaatggaaaatggaaaaattgagaataaacaaattacagcatctagtttcaagaaatcatggtggggagattattgggaaccatttcgtgccagacttaatgcacaaggtagagttaacgcttggcaagcaaaagcaaataataataagcaatggttagaaattgatcttttaaaaattaaaaaaattactgctattattactcaagggtgtaagtctttatcaagtgaaatgtatgttaaatcttatacaattcattactcagaacaaggtgttgaatggaaaccatatagacttaaaagttctatggttgataaaatttttgaaggaaatactaatactaaaggacatgttaaaaatttttttaatccaccaattatttcacgatttattagagttattccaaaaacttggaatcaatcaatagcattaagactagaactttttggttgtgatatatat

SEQ ID NO: 9087 - DNA, 6672 bp, synthetic construct
  misc_feature 1..6672: note = source = /note="Description of Artificial Sequence: Synthetic coding sequence"
  source 1..6672: mol_type = other DNA
atgtttcctggatgcccgcggctctgggtcctggtggtcctgggcacttcgtgggttgggtgggggtcacagggcactgaagccgcccaactgagacagttctacgtggctgcacagggcatctcatggtcataccggccggaaccaactaactcatccctgaatctgtccgtcactagctttaagaaaatcgtgtacagagagtacgaaccctacttcaaaaaagagaagccccagtccactatctccggactgctgggtcctaccctgtacgccgaggtcggagatatcatcaaggttcatttcaagaacaaggccgacaagcctctcagcattcacccacagggaatccggtacagcaagctgtcggaaggagcctcgtacctcgatcatactttcccagctgaaaagatggacgacgccgtggcgccgggacgggagtacacctacgaatggtcaatctcagaggactcaggacctacgcatgacgatcctccttgcctgacccacatctactattcgcacgagaacctcattgaggacttcaattccggattgatcggtccgctgttgatttgcaaaaaggggactctcacggagggcggtacccaaaagacgttcgacaagcagatcgtgctgttgttcgcggtctttgatgaatcgaaaagctggtcgcagtcgtcatcgttgatgtacacggtgaacggttacgtgaacggtaccatgccggacatcaccgtctgcgcgcatgaccatatttcatggcacctgctgggcatgtcctcaggaccggaattgttctcgatccactttaacggccaggtgctggaacagaatcaccataaagtgtcggcgatcactcttgtgtcagccacttcaactactgccaacatgaccgtcggtccggaaggaaagtggattatctcatcgttgactccgaagcacctgcaggccggtatgcaagcctacatcgatatcaaaaactgcccgaagaaaaccagaaacctcaagaaaatcactcgggaacagaggagacatatgaaacggtgggagtacttcatcgccgcggaggaagtaatctgggactacgctcccgtgatcccggcaaatatggacaagaaatacagatctcaacacctggacaatttcagcaatcagatcggcaagcattacaagaaggtgatgtacactcagtacgaagatgagtcgttcactaagcacaccgtgaacccaaacatgaaggaggatggaatcctcggtcctatcatcagggcccaggtgcgcgacacgctcaagatcgttttcaagaacatggcttcgcggccgtactcaatctacccgcacggagtgaccttctccccgtacgaggacgaggtgaattcctcgttcacgtcaggacgaaataacacgatgattcgcgccgtgcagccgggagaaacctacacttacaagtggaacatcctcgagttcgatgagcctactgaaaacgacgcccagtgtctgactagaccgtactacagcgacgtggatatcatgcgcgatatcgcctcaggactgattggactcttgctgatttgtaaatcgagatctctggataggcgcgggatccaaagggcggccgatattgagcaacaagccgtctttgccgtgttcgacgaaaacaaatcgtggtacctcgaggacaacattaacaagttctgcgagaatccggacgaagtcaaaagagatgatccgaagttttacgaaagcaacataatgtcgactatcaacggatatgtcccggagtctatcaccaccctggggttctgcttcgacgatacggtgcaatggcatttttgtagcgtcggaacccagaacgagatcctgactatccatttcaccggccactcctttatctacggtaagcgccacgaagataccctgactctcttccctatgcggggtgagtccgtcaccgtcactatggacaatgtgggcacctggatgctgacttcgatgaactcgtctcctcggtccaagaaactgcgcctcaagtttcgtgatgtgaagtgcatcccagacgatgatgaggactcatacgaaatctttgaacctcctgagagcaccgtgatggcaactaggaagatgcacgatcgtctggagccggaagatgaagagtcggacgcggactacgactaccaaaaccggctggcggcagctctgggaatccgctcattccgcaatagctcgctcaatcaggaagaagaagagtttaacctgacggctctcgcgctcgagaatggaactgagttcgtgtcatccaacaccgacatcatcgtcgggtccaattactcaagcccaagcaacatttccaagttcactgtgaacaatctggcagaaccccaaaaagcgccatcgcatcaacaagcgacgactgccggttcccctctgcggcacctcattggaaaaaactcggtgttgaattcgtcgaccgcggagcactcatccccatacagcgaagatcctatcgaggacccgctgcaaccggacgtcactggaatcaggctgctctcgcttggcgcaggcgagttcaaatcccaggagcatgctaaacacaagggaccgaaggtggagcgagatcaagctgcaaagcacagattctcatggatgaagctgctggctcacaaagtgggacggcacctttcacaggacactggaagcccgtccgggatgcggccatgggaggacctcccatcgcaggatacgggtagcccatctcgtatgcgtccttggaaagatccccccagcgacctgctgctcctcaagcagtcgaacagttcaaagatcctcgtcggacgatggcaccttgcttcagaaaaaggatcctacgagatcatccaggacacggacgaggacaccgctgtcaataactggctgatttcccctcagaatgcctcgcgcgcgtggggagaatcaacccccctggctaacaaacctggaaagcagtcaggccaccccaagttcccgcgggtgcggcataagagcctccaggtccggcaagacggaggaaagtccagactgaagaaatcacagtttctgattaagactcgcaagaaaaagaaggagaaacacacccatcacgcgcccctgagccctcggacctttcacccgctgcggagcgaagcgtataacaccttctcagagcggagacttaagcactctctcgtgctccataagagtaacgaaaccagcctcccaaccgacctgaaccagactctgccctcgatggacttcggatggattgcctcattgcctgaccacaaccaaaactcctccaacgataccggacaagcatcctgcccaccggggctctaccagacggtgccaccggaagaacactaccagactttcccgatccaagacccggaccagatgcacagcacctccgacccgtcgcaccgaagctcaagcccagagttgagcgagatgttggaatatgacaggtcgcataagagcttcccaactgacatctcccagatgtcaccgtcatcagaacatgaggtgtggcaaaccgtcatctccccagacctttcgcaggtcactctttcgccggaattgtcccaaaccaacctttcgcctgatctgtcgcatactacgctgtcgccagaattgatccagcgaaatctgtcgccggcattgggtcagatgcctatctcgcctgatctcagccataccactctgtcaccggacctcagtcatactaccctcagcctggatctgagccaaactaacctctccccagagttgtcacagactaacctgtcgcctgcattgggccagatgcccctgagtccagatctctcgcatacgactctctcgctggacttcagccaaaccaatcttagccccgaactgagccacatgaccttgtcgcctgagcttagccaaacgaacttgtcgcccgcgctgggacagatgcccattagccccgacctgtctcacacgactctctctctcgatttttcacagactaatctgtcgcccgaactgtcccaaactaatctcagcccagccctgggacaaatgccactgagccccgacccatcgcacaccaccctgagccttgacctgtcacagacgaatttgtccccggagctctcccagaccaatctctcgcctgacctctcagagatgccactgttcgcagaccttagccagatcccgctcacccctgatctcgatcaaatgactctgtcgccagacctgggagaaaccgacctgtcgccaaactttggtcaaatgtccctgtcacctgacctttctcaggtgacgctctcgcccgacatctcagataccacgctgctgccagatctgtctcagatttcgccaccaccagatctggaccagatcttctacccttcagagtcctcccagtccctgctgctccaggaattcaatgagtccttcccgtaccccgacctgggccaaatgccctccccgtcgtcccccactctgaatgacactttcctgtccaaagagttcaatcctctcgtcatcgtgggactgtccaaggacggaaccgactacatcgagatcatcccaaaggaagaagtccagtcgtccgaggacgactacgctgagatcgactacgttccctacgacgacccttacaagaccgatgtgcggactaacatcaactcatcccgggatccggacaatattgcggcctggtacctgcggtcaaacaatggaaatcggagaaattactacatcgccgcagaagaaatctcgtgggactactcggagttcgtgcagcgggagacggatatcgaggactcagacgacatcccggaagatactacttacaaaaaggtggtgtttagaaagtatctcgatagcactttcaccaaacgcgacccgagaggagagtacgaagagcacctgggaatcctcggaccaatcatccgcgccgaagtggatgatgtgattcaagtgcgctttaagaacctggcgtcgcggccctattcgctgcatgcccatggcctgagctacgagaaatcctcggagggaaagacctacgaggatgactccccggaatggttcaaggaggacaacgccgtccagcctaactcgtcctatacttacgtgtggcatgcaactgaacggtcaggaccggagagcccgggatcggcctgcagggcgtgggcttactactccgccgtcaaccctgaaaaggatattcacagcggactgatcggaccgcttctcatttgccaaaagggaattctgcacaaagattcgaacatgcctatggacatgcgcgaatttgtgctgctgttcatgacctttgacgagaaaaagtcttggtattacgagaagaagtcgcggtcctcctggcgccttacttccagcgaaatgaaaaagtcccatgaattccacgccatcaacggcatgatctacagcctgccgggtctgaaaatgtacgaacaggaatgggtccgcctccacctgctgaacatcgggggatcccaggacatccacgtggtccacttccatggtcaaactctgctggaaaacggaaacaaacagcatcagttgggcgtgtggcccctgctcccaggctccttcaagaccctggaaatgaaggcctccaagccgggatggtggctgcttaatactgaagtgggagagaaccagagagccggaatgcagactcctttcctcatcatggaccgggactgccgcatgccgatgggactgtcgaccggaatcatctccgattcccagattaaggcgtcagaattcctcggctattgggaaccccgcctggccagactgaataatggtggctcctacaatgcctggtccgtggagaagttggcagccgaattcgcatcgaagccgtggatacaggtcgacatgcagaaggaagtgatcattaccggtatccagacccaaggcgccaagcactacttgaagtcatgctacaccaccgagttttacgtggcctacagtagcaaccagattaactggcaaatcttcaaagggaatagcactagaaacgtgatgtacttcaacggaaactccgacgcctcaaccatcaaggaaaatcagtttgatccgcctatcgtcgctagatacattcgcatctccccgactcgggcatacaaccggcccactctgcggctggagctccaaggttgcgaggtgaacgggtgcagcacgccactgggtatggaaaatggaaagatcgaaaacaaacagattactgcgtccagcttcaagaagagctggtggggtgattattgggaacctttccgcgcgcggcttaacgcgcagggccgcgtgaacgcctggcaggccaaagctaataacaacaagcagtggctcgaaattgacctgctgaagattaagaagatcacggctattatcacccaggggtgcaagtcgttgagctctgaaatgtacgtgaagtcgtacactatccattacagcgaacaaggcgtggaatggaaaccataccggctcaaatcgtccatggtggataagattttcgagggaaacactaacaccaaaggacatgtaaagaacttcttcaatccgccaatcatttcaagatttatccgcgtgattcctaagacttggaaccagtctatcgcgctccgccttgaactcttcggatgcgacatctac

SEQ ID NO: 9088 - DNA, 6672 bp, synthetic construct
  misc_feature 1..6672: note = source = /note="Description of Artificial Sequence: Synthetic coding sequence"
  source 1..6672: mol_type = other DNA
atgtttccaggctgtccgcgtctgtgggtcctggtggtccttggaacctcctgggttggatggggatcccaaggtactgaagcagcacaactcagacagttttatgtggctgcccaaggtatttcctggagctacagaccagaacctaccaatagctcgctgaacctgtccgtgacctcctttaagaagattgtgtaccgggagtacgagccatacttcaagaaagaaaagcctcagtccaccatttccggactgttgggtcccactctctacgcagaagtgggtgatatcataaaagtgcacttcaagaataaggcagataagcccctgtcgatccacccccaaggcattcgttacagcaagttgtcggaaggtgcctcctacctcgatcacacttttcccgcggaaaagatggatgacgctgtagccccaggaagagaatacacttacgaatggagcatttctgaagatagcggacctacgcacgatgaccccccttgtctgactcacatatactactcgcatgaaaaccttattgaggacttcaattcggggctgataggccctctcctgatctgtaagaaaggcaccctgacggagggtggtacgcagaaaaccttcgataaacaaattgtgcttctgtttgcagtgttcgacgaaagcaagtcgtggagccagagttcaagcctcatgtacactgtgaatggttacgtgaatggaacgatgcccgatatcactgtgtgtgcccacgatcacatctcgtggcacctgcttgggatgtcctccggacctgaactgttttcgatccactttaatggacaagttctggaacaaaatcatcacaaggttagcgcaatcactcttgtctccgcaacctcaacgaccgctaatatgactgtgggacccgaaggtaaatggatcataagctccctcaccccaaagcacctccaggctgggatgcaggcgtacattgatatcaaaaactgtccaaaaaagactcgaaatctgaagaagataacgcgcgagcaacgcagacacatgaagagatgggaatactttatcgctgcagaagaggtcatctgggattacgcgccagtgattcctgcaaatatggacaagaagtaccgatcccagcatctggataacttttctaaccaaatcggaaaacactataagaaggttatgtacactcaatacgaggacgagtcgttcactaagcataccgtgaatccaaatatgaaggaagatggcatcctgggtcccattatcagagcacaagtcagagacacccttaagattgttttcaagaatatggccagcaggccatactcaatttaccctcatggagtgactttttctccgtacgaagatgaagtcaattcctcatttacctcaggccgcaacaatactatgattcgcgcggtccagccgggagaaacttacacctacaagtggaatattctggaattcgatgagcccaccgaaaacgacgcccaatgccttaccaggccgtattacagcgatgtggacattatgcgagacatcgcaagtggccttatcggcctccttctcatttgtaagtcccgttcgctggatagacgtggtattcaacgcgcggcagatattgaacaacaggcagtgttcgcagtctttgatgagaacaaatcgtggtatctggaagataacattaacaaattctgtgaaaatcctgacgaagtgaagcgagacgaccctaagttttacgaatccaacattatgagcaccatcaatggatacgtgccggaatccattacgactctcggtttttgttttgatgacactgtgcagtggcacttttgtagcgtggggacgcaaaatgaaatactgactatccacttcaccggtcattcatttatctacggcaagcggcatgaggacactcttaccctcttcccaatgcgaggagagtccgtgactgtcactatggataatgtagggacctggatgctgacctccatgaactcatcgccccgctcgaagaaacttagactgaaatttcgggatgtgaagtgtataccagatgatgacgaggatagctatgagattttcgagccacccgaatcaaccgtcatggcaactagaaagatgcatgataggcttgagcctgaggacgaagaatctgacgcagactacgattaccagaaccgcttggcagcagcacttggaatccgctcttttcgtaactcgtcactgaaccaggaagaggaggagttcaaccttacggctcttgcacttgagaatggtaccgaattcgtgtcatcaaataccgacattatcgtgggtagcaactactcgtcaccaagcaatatctcaaagtttacggtcaataatctcgccgaacctcaaaaagcgccttcgcatcagcaggcaacgactgccgggagcccactgcgccacctcattggaaagaatagcgtcctgaatagctcgaccgcagaacactcctcgccttactccgaggatccaatcgaggacccccttcaaccggatgtgaccggcatacggcttttgagcctgggagcaggggagttcaaatcccaagaacatgcgaagcacaagggacccaaggtggaaagagatcaagccgctaaacacagattttcctggatgaaacttctggctcataaagtcggacgtcacctgagccaagataccggcagcccttccgggatgcggccctgggaggaccttccttcgcaggatactgggtcaccctcgaggatgcgtccttggaaggatcctccttccgatcttcttctgctgaagcagtcgaactcgtccaagattctggtcgggagatggcacctggcatcagagaaaggatcctacgagattattcaggataccgacgaagataccgcagtgaataactggctgatctcgcctcagaatgcctcgcgggcctggggagagagcactccgctggctaataagccaggtaagcaaagcggacatcctaagtttccaagagtgagacataagtcccttcaggtgcgacaggatggggggaagagtagacttaagaaatcccaattcttgattaagacccgcaagaagaaaaaggaaaagcacactcaccatgcacctctgtcgccacgaaccttccatccactgagatccgaggcatacaatacttttagcgaaagacggctgaaacattcacttgtcctccacaagtccaacgaaacctcgctccctactgatctcaaccaaacccttccttccatggatttcggatggattgcctcgcttcctgatcataatcaaaactcttcaaacgataccggccaagcgtcgtgtcctcctggcctctaccagaccgtgcctccggaagaacactaccagacctttccaattcaagacccagaccagatgcattccacttccgacccttcccacagatcctccagcccagaactctcagagatgctcgagtacgatagaagccacaaatcattccccaccgatatcagccagatgagtccttcctcagaacatgaagtctggcagactgtgatcagccctgacctttcacaagtcacgctctcgccagaactgtcgcagacgaacctcagccccgatcttagccatactaccctctcgccagagcttatacaaagaaatctctcgcccgcattgggacaaatgccaatttcgccagacctgtcgcataccaccctgtcacccgacctgtcgcacactaccctgtcgctggacctctcgcaaactaatctgtcccctgaactgagtcaaactaacttgtccccagcgcttggccagatgcctctcagcccagatctctcccataccaccttgtccctcgatttttcgcaaacgaacctctccccagagctgtcgcacatgactctcagccctgaactttcccagacgaacctgtcgcccgcacttggccaaatgcctatctcacctgacctgtctcacaccaccctgtcgctcgacttttctcagaccaacttgagccctgaactgtcacaaactaatctttcccctgcgctggggcagatgcccctttccccagatcctagccacaccactttgtcgctcgacctttcacagaccaacctgtcgcctgaactctcacaaaccaacttgtcgcccgatctgtcagagatgccattgttcgcagatctttcccaaattccacttacccctgacctggatcaaatgacccttagccctgatctgggagaaaccgatctgtcgcctaactttgggcaaatgagcctcagtcctgatcttagccaagtcaccttgtctcctgacatttcggatacgactctgctgcctgacttgagccaaatttcgccaccaccagaccttgaccagatattctatccttcggaaagctcccagtcgctcctgcttcaagagtttaacgagtcctttccttaccccgatctgggacagatgccttcgccatcgtcaccaactctgaacgatacttttttgtccaaggaattcaacccactggtcattgtcggtctgagcaaagacggaaccgactacatcgaaatcattccgaaagaagaagtgcaatcgagcgaggatgattatgctgagattgactacgtgccttacgacgatccctacaagacggatgtgcggaccaacataaactcctcacgtgaccctgacaacattgctgcatggtacctgcgatcaaacaacggaaatcggcgaaactactacattgcggcagaggaaataagctgggactactcggagttcgtgcaacgggaaactgatattgaagattcggatgatattcctgaagatactacctacaagaaagtggtgttcagaaaatacctggactcaacttttaccaagcgggatccccggggtgagtatgaagaacaccttggaattctgggtccaataatccgcgcagaagtggatgatgtgatccaagtcaggtttaagaacctggcatcacgaccttactcacttcatgcacatggtctgtcctacgaaaagtcctccgagggaaagacctacgaagatgattcgccagaatggttcaaagaggacaacgcagtgcaacccaacagcagctatacctacgtctggcacgctaccgaacggagcggaccagaatcccctggttcagcatgtcgagcttgggcatattactccgctgtgaaccctgaaaaggatattcattccggacttatcggacctctcctcatatgtcagaagggaattcttcacaaggattccaatatgcctatggatatgcgggaatttgtgctccttttcatgacttttgacgaaaagaagagctggtactacgaaaagaagtccagatcgtcttggaggcttacctcctcagagatgaagaaatcgcacgaatttcatgcaataaacggcatgatttactcccttcccggtctgaagatgtacgaacaagaatgggtcagactgcatctgctgaatatcggggggagccaagatatccacgtcgtccattttcatggtcagacccttctggagaatggtaataagcaacaccagcttggagtgtggcctctcctcccgggcagcttcaaaaccttggaaatgaaggcatcaaagcccggatggtggctccttaacactgaagtgggagagaaccaacgagcaggaatgcagacgccattcctcattatggatcgagattgtaggatgccgatgggactgtccaccggtattatctccgactcccagattaaggccagcgagtttcttggttattgggaaccaaggcttgctaggttgaataacggaggttcgtacaatgcatggtcagtcgagaagctggcggccgagtttgcatcgaagccatggattcaagtggatatgcaaaaagaagtgatcattacgggaatccaaacccaaggcgccaagcattacctgaaatcgtgttacacgaccgagttctacgtggcgtactccagcaaccagattaactggcagatctttaaaggtaactccactcgcaacgtgatgtactttaacgggaactccgacgcatccaccattaaggagaaccagtttgaccctcctattgttgcaagatacatacgcatctcccctacccgcgcttacaatcggccaaccctccgtctggaactccaaggctgtgaggtgaatggttgctcaactcctctgggcatggaaaatggaaagatagagaacaagcaaattaccgcatccagcttcaagaaatcctggtggggtgattactgggagccattccgcgccaggctgaacgcccaagggagagtgaatgcgtggcaagcgaaggccaacaacaacaagcagtggctggaaattgatcttttgaaaatcaaaaagattaccgcaatcattacccaagggtgtaagagcctgtcatccgaaatgtacgtgaaatcttacaccattcattactcggaacaaggggtggaatggaaaccataccgcctgaagagctcgatggtggacaagattttcgaagggaacactaacactaaggggcacgtgaaaaacttctttaatcctccaatcatctctcgtttcattcgtgtcatacccaagacctggaaccaatcaatcgcgcttcgcctcgagctttttggatgcgacatctac

SEQ ID NO: 9089 - DNA, 6672 bp, synthetic construct
  misc_feature 1..6672: note = source = /note="Description of Artificial Sequence: Synthetic coding sequence"
  source 1..6672: mol_type = other DNA
atgttcccgggatgtccccgtttgtgggtcctcgtagtccttggaacctcatgggtcggttggggatcccaaggaacagaggccgcacagctgaggcagttttatgttgctgctcaaggaatctcgtggagctatcgtccagaacctacaaattcgtccctgaacctcagcgtcacttcgttcaaaaagatcgtttaccgagaatatgaaccctattttaaaaaggaaaagcctcagtctaccatctccggtctattgggtccaaccctatatgccgaagtgggggatataatcaaagtgcacttcaagaataaggcggataaacctttgtcgattcacccacaaggaatacgttattctaagctgagcgaaggagcatcgtacctcgatcacacattccccgctgagaagatggatgatgccgttgccccaggtcgcgagtacacttatgaatggagtataagtgaggattctggaccaacccacgacgatccgccgtgtttgacccatatctactacagtcatgagaatctgattgaggattttaacagtggcctcataggtcctcttctgatttgcaaaaaaggtactttgacggagggaggaactcagaaaactttcgataaacagatcgtcctcctttttgccgtctttgacgaaagcaagtcttggagccaaagctccagcctaatgtatactgtcaacggatacgtcaatggtactatgcctgacattaccgtttgcgcgcatgatcacatctcttggcatctcctaggcatgtcgtcaggtcccgagctgtttagcattcatttcaatggacaggtccttgagcaaaaccaccataaggtctctgccattacccttgttagcgcgacttccaccaccgcaaacatgactgtcggtccggagggcaagtggataatcagttcactcacacccaaacacctccaggccggcatgcaggcgtacatcgatattaagaactgcccgaaaaaaacacgaaaccttaagaaaatcacgcgtgaacagcgacgacatatgaagagatgggaatatttcatcgccgctgaggaagttatctgggattacgctccggtcattcctgcaaatatggacaagaagtaccgttcccagcatttagataacttctcaaatcagatcggaaagcactataaaaaagtcatgtacactcagtacgaggatgaatctttcactaaacatacggtgaatccaaacatgaaggaagatggcatactaggtccaatcatcagagcgcaggtccgcgacacgctcaagattgtcttcaagaatatggcctcaagaccttatagtatctaccctcatggtgtgactttctcgccttacgaggacgaagtgaactcaagtttcacatctgggagaaataatacaatgatccgagctgtgcaacctggggagacatacacctataagtggaacatactcgagttcgacgagcctacagagaacgatgcccaatgtttaacacgaccatattattccgacgtcgacattatgcgcgacatcgcatctggtcttattggcctgctgctcatctgtaaatcgcgcagtctcgaccgaagaggaatccagcgcgctgccgacatagagcagcaggcagtgttcgcggtcttcgacgagaacaagagttggtacctggaggataacattaacaaattttgcgagaacccggatgaggttaagagagacgatcccaaattctatgagtccaatatcatgtctacgatcaacggttacgtccctgagtccatcaccactctcggcttctgcttcgatgatactgtgcaatggcacttctgcagcgtggggacacaaaacgagatactaaccatccattttacaggacattccttcatctatggcaagaggcacgaagacacgctcactctttttcccatgcggggggaatctgttacggtcactatggataacgttggaacatggatgctgacgtccatgaattcgtcgccgcgatctaagaagcttcgacttaagtttcgggacgtcaagtgtatcccagatgacgatgaggacagttatgagatctttgagcccccggagtccacagtgatggccacaagaaagatgcacgataggctggagccggaggatgaggagtctgacgctgattacgattaccagaacaggctcgccgcggccttaggaatacggtcgttccggaactcctcgttgaatcaagaggaggaggagtttaatctcacggccctcgcccttgagaacggcacggagttcgtgagctcgaacactgatatcatagtggggagcaactacagctcaccctctaatatctccaaattcacggtaaataacctcgctgaacctcagaaggcgccttcgcatcagcaggccaccaccgcaggtagtccgctcaggcacctcatcggcaaaaattctgtcttgaatagctccaccgctgagcatagctctccgtattccgaagacccgattgaagatccgcttcaaccagatgttactggtatacgattgctgtcgctgggcgctggtgagtttaagtcgcaggaacacgccaaacataaaggaccaaaggttgaaagggatcaggctgctaagcataggttttcctggatgaagcttctcgcgcacaaagtcgggcgccatctctctcaggatacgggttcaccatcaggtatgagaccgtgggaggaccttccatcgcaggacacagggtccccttcccgcatgcgtccctggaaggatccgccgtcagatctcctgcttctgaaacaaagcaattcctcgaagatcttggtgggccgctggcaccttgcgagcgagaaaggctcctacgaaatcatacaggacaccgacgaggatactgcagttaacaattggctaatttcgcctcaaaatgcaagtcgggcttggggagagtcgactcctctggccaacaagcccggtaaacagtccgggcatccgaaattcccacgggttcgacataaatctctccaggtgcggcaggacggagggaagtcccgactaaagaagtctcagttccttatcaaaactcgcaagaaaaaaaaggagaaacatacgcaccatgctccgcttagtccgagaacctttcatcctcttcgctctgaggcttataatacattttcggagcggcgcctgaagcattctctagtgttgcataaatccaatgaaacctccttgcccaccgacttgaaccaaacacttccttcgatggactttgggtggatcgccagtctccccgatcataatcagaattcgtcgaatgataccggccaggcatcctgtcctcctggcctgtatcaaaccgtgccacctgaagagcactaccaaacgttcccaatacaagaccccgaccagatgcattccacatccgatccgtcgcacagatcgtcttccccagagctctcggaaatgctcgagtatgatcggagccacaagtctttccccacggacatctcgcaaatgtctccctcgtccgaacacgaggtgtggcagactgtaatcagcccagatctctcacaggttaccctatcgccggagctgtcacagaccaacctatccccggatctgtcccacacgacacttagcccggaactgatacagcgcaacctctcacctgcgttgggtcaaatgcccattagtcccgatttgtcacacactaccctaagccccgatctatcccatacgacattaagtctagacctttcccagactaacctgtcgccggagttgtcccagaccaaccttagcccggctcttgggcagatgcccctttctccagatctgtctcatacaacgctgtcactggatttttcgcaaaccaatctctcgccggagttgtctcatatgaccctttcacctgaactctctcagacaaatctgtcacccgctttgggtcaaatgccaatctcgcctgatctatcccacaccacactaagtcttgacttctcccagaccaatctgtccccggagctttctcaaactaacctgagtccggcactgggtcaaatgcctttgagtcccgacccaagtcataccacactgagtctggacctgtcgcagactaatctttctcccgagctatcccaaaccaatttgagtcccgacctttccgagatgcccctcttcgctgatctttcacagatccctctgactcctgacctcgaccagatgaccctttctcctgatctcggcgaaacggacttgtctccaaacttcggtcagatgtcgttgagtcctgatctgtcccaagtcactctttccccagatatctccgatacaaccttacttccagatctctcgcagatttcacccccacctgatctggaccagattttctatccgagtgagtcatcccagtcactgcttttgcaggaattcaatgaatcttttccctatcctgatctcggacaaatgccgtctccgagcagccctacactgaacgacacctttctttccaaggaattcaacccactagtcatagtgggcttatcgaaagacggcacggattacatagagattattccgaaagaggaagtgcagtcgtcggaggatgactacgctgagattgattacgttccttatgatgatccgtataagacggatgtccggactaatataaactcctcgagagaccctgacaacatcgcagcctggtacctccggtcgaacaacggcaatcggcgtaactattatattgcggcagaagagatttcctgggactattccgagtttgttcaacgagaaaccgacatcgaagacagcgatgacatcccggaagataccacgtacaagaaggtggtatttcgcaagtacctcgactcgacctttactaagcgtgatccccgtggcgaatacgaagaacacctcggaatcctcgggccgatcatcagggccgaagtggacgacgtcatccaagtacggtttaaaaacttggcgtctcgtccttatagcctccacgctcacggcctttcttacgagaagtcttcagaaggaaagacgtacgaagatgattcgcctgagtggtttaaggaagataacgccgtgcagccgaactcctcgtacacatatgtttggcacgctacggagagaagtggccccgagagtccgggctccgcctgccgcgcttgggcgtactatagtgcggtcaacccggaaaaggatatccattccggtcttatcggcccgctcctgatctgtcagaagggaattttgcataaagactcaaatatgccgatggacatgcgagagtttgtgctcctattcatgaccttcgacgaaaaaaagtcctggtattacgaaaaaaaatctcgttcttcctggcgccttacctctagcgagatgaaaaaatcacacgagtttcacgccattaacggaatgatttattcgttacccggacttaaaatgtatgagcaagagtgggtcaggttgcatcttctgaacataggtgggtcacaagatattcacgtcgtacacttccatgggcagactttgctcgaaaatggcaacaagcagcatcaattgggcgtttggccgctccttccaggtagcttcaaaacactggagatgaaggcttcaaagcccggatggtggctcctcaatacagaagtcggtgaaaaccaacgcgctggtatgcaaacgccttttctcattatggatagagactgcagaatgcccatgggactcagtaccgggatcatcagcgatagccagatcaaggccagtgagtttcttggatactgggagccacgacttgcccgcttaaacaatggcggcagttacaatgcttggtccgtggagaagctggccgctgaatttgcgtcgaaaccctggattcaggtcgacatgcagaaagaggtcattataaccgggatccaaactcagggcgctaagcactatttgaaatcctgttatactaccgaattctatgtcgcttactcaagtaaccagattaactggcaaatcttcaaggggaatagtacacgaaacgtgatgtacttcaatgggaactccgacgcatccacgatcaaagaaaaccaattcgatccccccatcgtcgcccgttacatcaggatttctcctactcgtgcttacaacaggcccactcttcgcctagaactccaggggtgtgaggtgaacggctgcagtacacctttgggcatggagaatggcaaaatagagaataaacaaatcactgcgtcgtcttttaagaaatcatggtggggggactattgggagccgttcagagcacgcctaaacgcgcagggccgggtcaacgcttggcaggcgaaagcgaacaacaataaacaatggctggagatcgacttgcttaaaattaagaaaatcacagctatcattacccagggctgtaagtctttaagcagtgagatgtacgttaagtcatacacaatccattactctgaacaaggtgtcgaatggaaaccctaccgactgaagtcgtctatggtcgataaaatctttgaggggaacacaaacacgaaagggcatgttaagaattttttcaatcctccgatcatctctcgttttatacgtgtaatcccgaagacctggaaccagtcaatcgcattgaggttggagctcttcggatgtgacatatac

SEQ ID NO: 9090 - DNA, 6672 bp, synthetic construct
  misc_feature 1..6672: note = source = /note="Description of Artificial Sequence: Synthetic coding sequence"
  source 1..6672: mol_type = other DNA
atgttccctggttgccctcgtctctgggtgcttgtagtgctcggcactagctgggtgggctggggatctcagggcaccgaggccgcccagctccgtcagttctacgtggctgctcagggaatctcctggtcttaccggccagagccaaccaatagcagtttgaatctctccgtcaccagctttaaaaaaatcgtgtaccgggagtatgagccatacttcaaaaaagagaagccccagtccacaatttctgggctgttgggtcctaccctgtacgccgaagtcggagacatcattaaggttcactttaaaaataaggccgataaaccacttagcatccatccacagggcatacggtactcaaaactctccgaaggagcttcttatctggaccacacattccctgccgagaaaatggacgacgctgtggcccctgggagggaatatacgtatgagtggtctatctcggaagactctggacctacccatgacgacccaccatgcttgacgcatatatactactctcacgaaaacctgatcgaggatttcaacagcggcctgattggtcccctactgatctgtaagaagggcactctgactgaaggagggacccagaaaactttcgacaaacagatcgtcctgctttttgcagtcttcgatgaatccaagagctggagtcagagctcttcactgatgtacactgtaaacggttacgtcaacggcaccatgcccgacattaccgtctgcgcccacgatcacattagttggcacctgttgggtatgtcttcagggccagagctcttttcgattcatttcaatggccaggtcttggaacagaatcaccacaaggtttcagcaataactctcgtgtctgcaaccagcaccactgccaatatgaccgtgggcccggaaggaaagtggatcatctcctccctcaccccaaaacacttgcaggcaggcatgcaggcctatattgatatcaagaattgccctaagaagacacggaacctgaagaagatcaccagagagcagcgacggcatatgaaaaggtgggagtacttcatcgctgccgaggaagtgatctgggactatgcccccgtcattccagctaacatggacaagaaatacagatcccagcacctggacaatttctcgaatcagattggaaagcattataaaaaagtcatgtacacacagtacgaggacgagtcattcactaaacacacggttaaccctaacatgaaggaagatggcatcctgggacccatcatccgtgcgcaggtccgcgacacacttaagatcgtttttaagaatatggctagccggccctattcaatctacccacacggtgtcacattcagcccttacgaggatgaagtgaattcatcgttcacaagcggccgaaacaacaccatgatccgcgcagtgcagccgggagaaacctatacatataagtggaacatactagagttcgatgagccaacagagaacgatgctcagtgccttacgcgcccttactactctgatgtcgacattatgcgcgacatcgcttccggcctgatcggcctgctccttatttgcaagagcaggtccctcgaccgtaggggtattcaacgggctgccgatattgagcagcaggccgttttcgccgttttcgacgagaacaaatcctggtacctggaagacaatatcaataagttttgcgaaaacccagatgaggtaaagcgagatgaccccaaattttacgaaagcaatattatgtccactataaatggctacgttcctgaatccattactacgcttgggttttgttttgacgacactgtgcagtggcatttttgcagcgtgggtacacaaaacgagatcctgacaattcattttactggacactcctttatttatggcaaacggcacgaggatacactcacactcttccccatgagaggcgaatccgtcaccgttacgatggacaacgttggaacgtggatgctcacatccatgaattcaagtccaaggtccaaaaagctacgcctaaagtttcgagacgtgaagtgcatccctgacgatgatgaggactcatatgaaattttcgagcctcccgagagcactgtgatggccacccgaaagatgcacgatcggctcgagcctgaggacgaggaatctgatgctgattatgattatcaaaacagactggcggccgccctagggatccgatcttttcggaacagctcattgaaccaagaagaagaagaattcaacctgacagccctggcccttgaaaacggcaccgaatttgtaagctcgaacactgatattatcgttgggagcaattactccagcccctctaacatctccaagttcaccgttaacaatcttgcagaaccgcagaaagctccatcccatcagcaggcaacgaccgccgggtccccgctgaggcacctaattggtaagaacagtgtcttgaactcgtccactgcagaacactcctccccctacagcgaggaccccattgaggaccccctccagcccgacgtcaccggcattcgtcttctgtcactcggggccggagaattcaaatcgcaagaacatgccaaacataagggaccgaaagtggagcgtgatcaggccgccaagcatagattcagctggatgaaattgctggctcataaagtgggccggcatcttagccaggacaccggttcaccctcaggtatgcggccatgggaggacctgccaagccaggacacaggatctccaagccgcatgagaccttggaaggatccaccatccgacctcctactcctaaagcagagtaactcctccaagatcttggtaggacgatggcaccttgcttcagagaaaggatcttatgagattatacaggacactgatgaggacactgccgtgaacaattggcttatcagcccacaaaacgccagtcgcgcctggggcgaaagcacccccctggccaataagccgggcaaacagtccggacaccctaaatttcctcgcgtccgccacaagtcgctgcaagtgcgccaggacggtggcaaaagcaggctgaagaaaagccagtttttgattaagactcgtaagaagaagaaggagaagcacacccaccacgctcccttgagccctcggactttccacccactgagatctgaagcatataatactttttctgaacgccgcctgaagcattctctcgttcttcacaagagcaacgaaaccagtcttccgaccgatctcaaccagacactgcccagcatggatttcgggtggatcgcctcactgccagatcacaaccaaaactcatcaaacgatacgggccaggcctcctgcccacctggactgtatcaaacggtccccccggaagagcactaccagacatttccaatccaggaccccgaccaaatgcacagtacctcagatccctctcatcgatctagctcgccggagctcagtgagatgctcgaatacgacaggtcccacaagtccttccctacggatatttctcagatgtccccctcgtctgagcatgaagtctggcagaccgtgatttctcctgacctttcacaggtgactctgagccctgagttgtcccaaacaaacctaagcccggacttgtctcatactaccctgtcaccggagctaatccagcgcaaccttagtcccgcactcggtcagatgcccatctctcccgatctcagccatacaacgctctcgcccgacttgagccatacaaccctatccctggacttgagccagacgaacctgagtccagagctttctcaaactaacttgagcccggctctgggacagatgccactcagtcccgacctttcgcacaccactctaagcctcgatttttcccaaaccaatctcagtccggaactgtcacacatgacattgtctcctgaactaagccagactaatctgtcacctgccctcggccagatgccaattagccccgacctttcccacaccactttgtcccttgactttagtcagaccaatctgagtccagagctgtcacagacaaatctatcccccgcacttgggcagatgccgctgagtcccgacccttcacacactactctgagcctagacctgagccagacaaatctgagccccgagttatctcagacaaacctgtctcccgacctgtcagagatgcccttgtttgccgacctgtctcaaatcccgttgacccccgacctggaccaaatgactctgtctccggatctgggcgagaccgatctgagccctaacttcggccaaatgtcactttcccccgacctctcacaggtaacactctcccccgatatatccgataccaccctgctgcccgacttgagccagatttcccctccacccgaccttgatcagatattttatccaagtgagtcatcccagtcactcctacttcaggagttcaatgaaagtttcccctatcccgacttggggcagatgccatccccaagttcacccacgctgaatgataccttcctctcaaaggagtttaacccgcttgtgatcgtggggctttccaaggatggcaccgattacattgaaatcatccctaaggaggaggtgcagtcctctgaggatgattatgcagagatcgactacgtgccttatgacgacccttataaaaccgatgtgagaactaacataaactcgtccagggatcccgacaacatcgctgcctggtacctgaggtccaacaatggcaatcgccggaattactatattgctgccgaggaaatcagctgggactatagcgagttcgtgcagagggagacagatattgaagattccgacgacatccctgaagacaccacttataagaaagtcgttttcagaaaatatctggattccacctttactaaacgagatccgagaggtgaatatgaggaacaccttggcatcctgggtcctatcatacgcgcggaagtcgatgacgtaatccaagtccggttcaaaaacctggcttctcggccgtatagtctccacgctcatgggctgtcttacgagaaaagtagcgaaggaaagacctacgaggatgacagccccgagtggttcaaagaagacaacgcggtgcaacccaactcctcttacacctatgtctggcacgcaaccgagcgatctggtccagaaagtcctgggtccgcctgtcgggcctgggcctactacagcgccgtcaatccagagaaggacatacattcaggcctgatcgggcccttactgatttgtcaaaaggggatcctgcacaaggactcaaatatgcccatggatatgcgggagtttgtattgctgttcatgacgtttgacgaaaagaaaagttggtactatgaaaagaaaagccgatcgagttggcgcctgaccagttccgaaatgaagaagagccatgagttccacgcaatcaacggaatgatctactcacttccgggcctgaagatgtacgagcaggagtgggtgcggctgcatcttctcaatatcggagggtcccaggatattcatgtagttcattttcacggacaaacacttctcgagaacgggaacaagcaacaccagctgggcgtgtggcccctcctgccgggcagtttcaagaccctggaaatgaaggctagtaagccagggtggtggctgcttaacaccgaggtgggggagaatcagagggctgggatgcagaccccttttctgattatggatcgggattgccgcatgccaatggggctgtctacaggcatcatcagcgatagtcagatcaaagcatccgagtttctgggttactgggagccaaggctcgcaagactgaacaatggaggcagttataacgcctggtccgttgagaagttggcagctgaattcgcgtccaagccttggattcaagtcgatatgcagaaagaagtcatcatcaccggcattcagacacagggagccaagcactatcttaaatcctgttatactactgaattttacgttgcctactcctcaaaccaaattaactggcaaatctttaagggaaacagtactcggaacgtaatgtacttcaatgggaactctgacgcatccacgatcaaggagaatcagttcgacccacccatagtggcacggtacatacgtatcagcccaacccgcgcttataatcggcctacccttcgcctggaactccagggctgcgaagttaacgggtgctcaactccactgggtatggaaaatggaaaaatagaaaacaagcagattacagccagttcgttcaagaagtcctggtggggggattactgggagcccttcagagcccgactgaatgcccagggaagggtcaatgcctggcaggccaaggcaaacaacaacaagcagtggctggagattgacctgctgaagattaagaagataaccgcgattattacacagggctgcaagtcactgtcctccgagatgtatgttaaatcttatacgatacactatagcgaacagggtgtcgagtggaagccctatagactcaaaagctccatggtggacaagatattcgagggaaacaccaacacaaaggggcatgtaaaaaacttttttaatcctcctatcatctcacggttcattcgtgtaattcctaaaacgtggaaccagtcaatcgctctccgcctggagttgttcggctgcgatatctac

SEQ ID NO: 9091 - DNA, 6672 bp, synthetic construct
  misc_feature 1..6672: note = source = /note="Description of Artificial Sequence: Synthetic coding sequence"
  source 1..6672: mol_type = other DNA
atgttccctgggtgccctcggttgtgggttctggtcgtcctggggacctcctgggtgggctggggctctcagggtactgaggccgcccagcttcggcaattctatgttgcagcccaagggatcagctggagttaccgccctgaacctaccaactctagcctgaacctgtctgtcacttcattcaaaaagatagtgtatcgagaatatgagccctactttaagaaggagaagccgcagtccacaatatcagggctcctgggacccactttgtatgccgaggtgggcgatatcatcaaggtgcactttaagaacaaagctgataaaccactgagcatccacccccagggaatccgttattctaaactgtccgagggggcctcctatctggatcataccttccccgcagagaagatggatgatgctgtcgctcccgggcgcgaatacacatacgagtggtccatcagcgaagactcagggcctacgcacgacgatccaccgtgcctgacccacatatattacagccacgagaatttgattgaagatttcaactccgggctgatagggccgctgctgatctgcaagaaaggcacattgaccgaggggggcactcagaaaactttcgacaagcagattgtgttgctgttcgcagtctttgatgagtcaaagtcttggtcccaatcaagtagcctcatgtataccgtgaatggctacgtgaacggaacgatgcccgatatcaccgtgtgcgctcatgatcacattagttggcatctgttggggatgtcgtcaggccccgagctgtttagtattcactttaacggtcaggtgctggagcagaaccatcacaaggtgagtgcaatcaccttggtcagtgcgacaagtacaaccgctaatatgaccgtcgggcccgaaggcaagtggatcattagcagtctcacaccaaagcatctgcaggcaggtatgcaggcttacattgatatcaagaattgtcccaagaaaactcgcaaccttaagaagataacacgtgagcagcggcgccacatgaagaggtgggagtatttcatagctgctgaggaagtgatctgggattatgccccagtgatccccgctaatatggacaagaagtacaggagccagcatctggataatttctccaatcagatcggcaagcactacaaaaaagtgatgtacacccagtacgaggatgagtctttcacaaagcacacagtgaaccccaacatgaaggaagatgggatcctggggcccataatacgcgcccaggttcgcgacacactcaagattgttttcaagaatatggcgagtagaccctattctatataccctcacggcgtcacattttccccctatgaagatgaggtgaacagctcgttcacctccggtaggaataacaccatgattagggccgtgcaacctggggagacatatacctacaaatggaacattctcgagtttgacgaaccaacagaaaatgacgcccagtgcctgacaaggccttactactctgacgtggatatcatgcgggatatagccagcggactgattggtctgttgttaatctgtaagagcaggtcgttggacagaagaggtatacagcgcgccgccgatatagagcaacaagcagtgtttgctgtcttcgacgagaataagtcatggtatctcgaagataacataaacaaattttgcgagaaccccgatgaggttaagagagatgaccctaaattttacgagtccaatattatgtctacaatcaatgggtacgtccctgagtccatcacaaccctggggttttgcttcgacgatacagtgcaatggcacttctgctcagtgggtactcagaacgagattttgacgatccacttcacaggccatagctttatttacggcaaacggcatgaagacacgctgacactttttcccatgcgcggcgaatcagtcaccgtgacgatggacaatgtaggaacttggatgctgacctcaatgaactcttcaccaaggtcaaaaaagctgcgcctgaagttcagggatgtgaaatgcatacctgacgatgacgaggatagttatgagatatttgagccaccagagagcacagtgatggccacgagaaaaatgcacgataggctggagcctgaggatgaagagtcagacgcagattacgactaccagaaccggctggctgcagcactggggatacgctctttcaggaattcatcgttaaaccaggaggaggaggagttcaacttgacggctctggcgctagaaaacgggaccgaattcgtctccagcaatactgacatcattgttggctcgaactacagctctcccagcaatattagcaagtttacagtgaacaacctggccgaacctcagaaagcgcccagccatcagcaagctacaacagcgggctctccgctgagacacctcatcggcaagaacagcgtgctgaattcctcaactgctgaacattcgtctccctatagcgaggaccccattgaggatccgttacaaccagatgtgacaggaattaggctgctcagtctcggtgccggagagttcaaatcacaggaacacgccaaacacaaagggccaaaggtcgaaagagatcaagcggcaaagcatcggttctcttggatgaagcttcttgcgcacaaagtcggtagacacctatcccaggatacaggaagcccatctggcatgagaccctgggaagacctaccctctcaggatacagggtctcctagtaggatgagaccctggaaggatccccccagtgacctgctcctcctcaaacagagcaattcttccaagatactcgttggacgctggcacctcgcatcagagaagggctcttacgagattatccaggacactgacgaggacaccgccgtgaacaattggctaatttcacctcaaaacgccagccgtgcttggggggaatccacgccactggccaataaaccgggaaagcagtcagggcaccccaagtttcccagagtaaggcataagagcctgcaagtgaggcaggatgggggaaagagccggcttaaaaagagccagttccttatcaaaacaagaaagaagaaaaaggagaaacatactcatcacgcccctctgtctccccgcacgtttcatccactcaggtccgaggcttacaatacattcagtgagcggagacttaagcattctctagtgctacataagagcaatgaaacttcactgccaaccgacctaaatcagacccttcctagcatggactttggttggatcgcatcgctgccagaccataaccaaaattcttctaatgacacgggtcaagcatcatgcccacctggcctgtaccagacagttcctccggaggaacactatcagacgttcccgatccaggacccagaccagatgcactctactagtgatcccagccaccggagtagtagcccagagctgagcgaaatgttggagtatgaccggagccacaagagcttccctacggatatttctcagatgtcgccaagcagtgagcacgaggtttggcagacggtcatttcacccgaccttagccaggtgactcttagccccgaattgtcacagacaaacttaagtcccgatctgtcacacaccactttatccccagagttgatacaacggaacctttcccccgccctggggcagatgcctatttctccggatctcagtcacactacactctctcctgaccttagtcacacaacgttgagcctggatttgagtcagactaacctgagccccgagctgtcgcagaccaacctgtcccctgccctgggacaaatgccattgtctcccgatctgtcacacaccaccttatccctcgacttctcccagactaatctgtctcccgaactatcccatatgacgcttagtcccgagttgagccagacaaatctgtcgcccgcgcttggccagatgccaatctcccctgatctatctcataccactttatcccttgatttctcccagaccaatctgtctcctgaactcagtcaaactaacctgtccccggctctcggtcagatgccgctctccccagatccctctcacacgactttgagtctggacctgtcacagaccaacctctctcccgagctgagccagacaaatctatccccagatttatccgagatgcctctgttcgctgacctgtcgcagatccctctgaccccggatctggaccagatgaccctcagccccgacctcggagaaacggatctgagtccaaacttcgggcagatgtctctgtctcctgacctatcccaggtgaccctcagcccagacatttctgatacgacattgttacctgatctatctcagatctcgccacccccggacttggatcaaattttctacccatccgaatcttcccagtcattacttctccaggagtttaacgaatcattcccataccctgacctaggccagatgccctcccctagctcgcctaccctaaacgatacattcctttctaaggagtttaacccacttgtgatcgtggggttatcgaaggatggcacagactacatcgagattattcccaaagaagaggtgcagtcaagcgaggatgattacgccgagattgattacgtgccctatgacgacccgtacaagaccgatgtgcgaacaaatattaatagtagtcgtgatccggataacattgctgcttggtacctgaggtccaacaatgggaacagacgaaactactacattgctgctgaggagatcagctgggactactcagagtttgtgcagcgcgagacagacatcgaagattccgatgatatcccagaggataccacctacaaaaaggtagtcttcaggaagtacttggactctactttcactaaacgcgatccacgaggagaatacgaggaacatctcggcatcctgggcccaattattcgtgcagaggtggatgatgtgatccaggtcagattcaagaacctggcctcccgcccgtacagtctacacgctcacggcctttcttacgagaaaagctctgagggcaaaacttatgaggatgacagccccgagtggtttaaagaagataacgcggtgcagccaaacagctcctatacctacgtgtggcacgctacggagagatcaggcccagagtcccccgggtccgcctgtcgtgcttgggcttattattctgcagtcaatccggagaaagacatccattcagggttgataggaccactgctcatctgccagaagggaatccttcacaaagactcaaacatgcccatggatatgcgcgagttcgtcctgctgtttatgacttttgacgaaaagaaatcctggtattacgaaaagaaaagcagatctagctggaggctgacaagctccgagatgaagaagtcccatgaatttcacgccataaatggtatgatctacagtctgcctggacttaagatgtacgaacaggagtgggttcgcctgcacctcctgaatatcggggggtcacaagatatccacgttgtacacttccatggccagacacttctggagaatggaaacaagcagcaccaattgggtgtctggcctttgctgcccgggtcgtttaaaacgctggaaatgaaagcctccaaaccaggttggtggctccttaacacggaggtaggggagaaccagagggctgggatgcagacgccatttttgattatggaccgagactgtcgcatgcctatggggctctcaactggaattataagtgattcccagatcaaagcctcagagttcctgggatattgggaacctcgtctcgcccgcttaaacaacggtgggtcctataatgcatggtcggtcgaaaagttagctgccgagttcgcaagcaaaccgtggatccaggttgatatgcagaaagaggtaattatcaccggaatccagacacagggcgccaagcattacttgaaaagttgttatacgacagaattctacgtggcctacagctctaaccagattaattggcagatttttaagggcaactccactagaaatgtgatgtattttaacgggaactctgacgcgtcaaccataaaagaaaatcagtttgacccaccgatcgtcgcccgttacatccgtattagccccacgagagcttataacagaccaacactacgccttgagttgcaaggctgtgaagtgaacggttgctctacgccattgggaatggaaaatggtaagatagaaaataagcagataacagctagttccttcaagaagtcctggtggggggattactgggagccgttccgagcgcgcctgaatgcacaggggcgcgtgaatgcctggcaggccaaagccaacaacaataaacaatggctggagatcgatcttctgaaaatcaagaaaatcaccgcaattatcacccagggatgcaagagtctgtcgtctgaaatgtacgtgaagagttacactattcattacagcgagcaaggggtggagtggaaaccttatcgtctgaaatcatctatggtcgataaaattttcgagggcaacaccaatactaagggccacgttaaaaatttctttaacccccctataatatctcggtttattcgcgttatccctaagacatggaatcagtcgatagccctgagactggaactgttcggttgcgacatttat

SEQ ID NO: 9092 - DNA, 6672 bp, synthetic construct
  misc_feature 1..6672: note = source = /note="Description of Artificial Sequence: Synthetic coding sequence"
  source 1..6672: mol_type = other DNA
atgttccccgggtgcccccgtctgtgggtgctggtcgttctcggcacaagttgggttgggtggggtagtcagggaaccgaagccgcccaacttagacagttctatgtggccgcccagggaataagctggtcctatagaccagagcctacgaatagttccttgaacctttccgtgacttccttcaagaagatcgtctatcgtgaatatgagccctactttaagaaggagaaaccccagtctactatcagcggcctgctgggtcctacactgtacgccgaagtgggggacatcatcaaagtgcactttaagaataaagctgataaacccctgtcaatccaccctcaaggtattcgctattccaagctgagcgagggcgctagctacttagatcacaccttccccgcggagaagatggacgatgcagtggctcccggccgcgaatacacttatgagtggtcaatctctgaggacagcggccctacacatgatgaccctccttgcctgactcacatttattattctcatgaaaatctgatcgaagattttaattccggactaattgggccccttctgatctgcaaaaagggaaccctcacagaggggggaacacagaagactttcgacaaacagatagtcctgttattcgccgtattcgacgagagcaagagctggagccagtcaagttccttgatgtataccgtgaacggctacgtgaatggaacgatgcctgatatcacagtctgcgctcacgaccatatcagctggcacctgctcggcatgtcatccgggcccgagctcttttcaatccatttcaacggacaggttctggaacaaaaccaccataaggtgtcggcgatcaccctcgtctctgccacgtccaccactgcaaatatgacagtcggcccagaaggtaagtggataatatcctcacttacacctaaacacctccaagcgggcatgcaggcctatatcgatattaagaactgtccaaagaagacccggaaccttaagaagatcacccgcgagcagcgacggcatatgaaaaggtgggaatacttcatcgcagctgaggaggtgatctgggactatgccccagtgatccccgcgaatatggataagaaatatagatcacagcacttagataatttctctaatcagatcggcaaacactacaaaaaggttatgtatactcagtatgaagatgaatctttcacaaagcataccgtgaaccctaatatgaaggaggatggaattctgggtcctattattcgagcgcaagtgcgtgatactctaaagatcgtattcaaaaatatggccagcaggccttactccatctaccctcatggtgttaccttttccccgtacgaagacgaggttaacagttcatttacaagcgggcgaaacaacactatgattcgagcagtccagcccggcgagacatatacctacaagtggaacatacttgaattcgatgagccaactgagaatgacgcgcagtgcttgacccgaccatattacagtgacgtggatattatgagggacattgcaagcgggttgatcggcctcctcctaatctgtaagtcgagatctttagaccggcggggaatccagcgagcagcggacatagagcaacaggcggtgttcgctgtctttgatgaaaacaaatcctggtatcttgaggacaacatcaacaagttttgcgaaaaccctgatgaagtcaagcgcgacgaccctaagttctatgagagcaatataatgagtacaattaatggatacgtacccgaaagtatcaccactctgggattttgctttgacgataccgtacagtggcatttttgctctgtcggaactcagaacgaaatactgaccatccacttcaccgggcacagcttcatctacggtaaacgacatgaagacacactgacactttttccaatgcgcggtgaatctgtgacagtgaccatggacaacgtcggaacgtggatgctgaccagcatgaactcgagtccccgatccaaaaaactgaggcttaagtttcgggatgtaaagtgcatccctgatgacgatgaagactcctacgaaatcttcgagcccccagagagcaccgttatggccacacgcaaaatgcacgaccggttggaacctgaagacgaggagagcgatgccgattacgactaccagaatcgccttgctgctgctctgggcattcggtctttcagaaacagctctttaaaccaggaagaggaggagtttaacttaactgccctcgctctggagaacggtaccgagttcgtgtcatcgaacaccgacataatagtcggcagcaattattctagcccctcaaatatctcgaaattcaccgtaaacaatctggcagaacctcagaaggcgccttctcaccaacaggcaacaactgccggatctcctctacgccatttaatagggaagaatagtgtgcttaattcttctactgccgagcattcgtcaccatacagcgaggaccctatagaggaccctctgcagcctgacgtcacaggcatccgcctgctgtctctaggagcaggggaattcaaatcccaagaacatgctaagcacaagggacccaaagttgaacgtgatcaggcggccaagcatcgatttagctggatgaaactgctggcccataaggtcggcaggcacctgtctcaggacaccggaagtccttccggtatgaggccatgggaggacctgccatctcaagatacaggatcaccgtcccggatgcgcccatggaaggaccctccatcagacctcctgctgctgaaacagtccaacagctcaaagatcctggtgggtagatggcaccttgcatccgagaaaggtagttatgaaataattcaggatactgacgaagatacagcagtgaataactggctcatatccccacaaaatgcatctcgcgcctggggggaatccacccctctggctaataagccaggcaagcagagcggccatcccaagttcccccgggttaggcataaaagcctgcaggtccgtcaagacggagggaaatcaaggctgaagaagtctcaattcctgatcaaaacccgcaaaaaaaagaaagagaaacatacccaccacgctcctctttcaccacggacgttccacccactccgctcagaagcgtacaatactttcagcgaaaggagattgaaacatagtcttgtgctccataaatccaatgagacgagcctgccgactgatttgaaccagactctgccctccatggattttgggtggatcgcttctctacccgaccataaccagaactcatcaaacgacaccggccaggcctcgtgcccgcctggactgtaccagactgtaccaccagaagagcattatcagacctttcccatccaggatccagaccagatgcactccacaagtgaccctagccacagatcaagtagccccgaattgtcagagatgctcgagtacgaccgcagtcataagagcttcccaacagacatctcacaaatgtccccatcttccgagcacgaggtttggcagacggtgatcagtcccgatttgagtcaggttactttatctccagagctcagccagaccaatctttcccctgacctatctcacaccaccctgagtccagagctcatccagagaaacctgagccccgcattgggtcagatgcccatcagccccgatctgagtcacacaacgttgtcccctgatctgtcacatacgaccctgtctcttgatctgagccagactaatcttagtcccgaattgtcgcaaacgaacttatcccctgcactagggcagatgccactttcacccgacctctcacacacgaccctcagcttagacttcagtcagaccaaccttagtcccgaactctctcacatgacgctaagccctgagctgtcccagactaatctgtctcccgctcttggacagatgcccatctcccccgatttaagccataccacactgtccttggatttttcacagacaaacctgtcaccagaactcagccaaacaaatttgtccccagctctggggcaaatgccgctcagcccagatccgagtcatacgacattatctttggacctcagtcaaacaaatttaagccccgaactgtcacagaccaatctgtctcctgacctttcagagatgcctctgtttgctgatctgagtcagattcccttaacacctgacctcgaccaaatgactctaagtcctgatctgggagagacagatttgtctccgaacttcgggcagatgtccctgtctcccgatctctcccaggtgactctctccccggacatcagtgacaccaccctgctccctgacctctcacagatttcaccacccccagacttggatcagatattctaccccagcgagagcagtcagagcctgcttctgcaggaatttaacgagagctttccatatcccgatttagggcagatgccatctccctctagcccaacactcaacgatactttcctgtccaaagagtttaaccccctggttatcgtgggcctgagcaaagatggcacagactacatagaaatcatacctaaggaagaagttcagagtagtgaagacgattatgccgagatcgattacgtgccatatgatgacccttacaagacagatgtccggaccaacattaacagctcgagggatcccgataacatcgccgcctggtatctcaggagtaacaatggcaatcgacgtaattattatatcgctgccgaggaaataagctgggactacagcgagttcgtccaaagggagacggacattgaggactcggatgatattcctgaggacacaacctacaagaaggttgtgtttcgaaagtacctcgatagcacgttcaccaaaagggatcctagaggagaatatgaggagcacctaggtatccttggcccaatcatcagagccgaggtggatgacgtgattcaggtacggttcaaaaacctggctagccggccctactcccttcacgcccacggtttatcctacgaaaaatcctccgaggggaaaacctacgaggacgattccccagagtggttcaaagaggataatgcggtccagcctaattcctcatacacttatgtttggcacgccaccgaaaggtcaggacctgaatcaccgggttccgcttgccgcgcctgggcatactattccgctgtgaacccagagaaagacatccattccgggctgatcggtcccttgctgatctgtcagaagggtatactccataaagactccaacatgcctatggatatgcgcgagttcgtcctgctgtttatgaccttcgacgagaaaaagtcctggtactacgaaaagaagagccgctcctcatggcgtctgacttcttccgaaatgaaaaagagtcatgaatttcacgctatcaatggaatgatctactcattgcctggactcaaaatgtatgaacaggaatgggtccgtttgcatctactgaacataggaggctcccaggatatccacgtcgttcacttccacggccaaaccctcctggaaaacggcaataagcagcatcaactgggggtctggccattgctgccgggcagctttaagacactggaaatgaaagctagcaaacctggttggtggcttctcaacaccgaagttggagaaaaccagcgcgccggtatgcagacacctttcctcataatggatagagattgccgtatgcctatggggctcagcaccggaatcattagcgatagccagattaaagcctcagagtttctgggatactgggagccaagactggcacggctgaacaatggtggaagttataatgcctggagcgttgagaaactggctgctgagttcgcatcaaagccctggatccaggtggatatgcagaaagaggtgatcatcactggaatacagacgcagggcgccaaacattatctgaagagctgttacacgacggagttttacgtagcatattcaagcaaccaaatcaactggcagattttcaagggcaatagcaccagaaacgtcatgtatttcaacggcaactcagacgccagcactattaaggagaaccagttcgaccctcctattgtggccagatacataaggatcagtccaactcgcgcatacaatcgaccaacactgcgccttgagctgcagggttgcgaggtaaatggttgttccactcccctggggatggagaacggaaaaatcgaaaacaagcagatcacagctagctcgtttaagaaaagttggtggggcgattattgggagccatttcgcgctcggctgaatgctcaggggcgcgtgaacgcctggcaggccaaggccaacaataacaaacagtggctcgagattgacctcctgaaaattaagaagattaccgctattattacccagggctgcaagtcgctgtcctcagagatgtatgtgaagagctatacgatccactattcagagcaaggcgtggaatggaagccttataggctgaagagctccatggtggataagatattcgaaggcaataccaacaccaagggacatgtgaaaaacttttttaatccgcctattataagcaggttcatacgcgttattcctaaaacttggaaccagtcgattgctttacgactcgagctctttgggtgtgacatatac

SEQ ID NO: 9093 - DNA, 6672 bp, synthetic construct
  misc_feature 1..6672: note = source = /note="Description of Artificial Sequence: Synthetic coding sequence"
  source 1..6672: mol_type = other DNA
atgttcccaggttgccccagactttgggttctggtcgtgctgggtacctcctgggtgggttggggaagccaggggactgaggcagcacaactgcggcagttttatgtggcggcgcagggcatatcgtggtcctaccgtcctgaacccactaattcctcgctcaatctgtcggtgacttcgttcaagaaaatcgtgtatcgagaatatgaaccatactttaagaaggaaaaacctcagtcaaccatctcaggcttgctgggacctaccctttacgcagaggtgggcgatatcattaaagtgcatttcaaaaacaaggcagacaaacctctttccatccacccgcagggcatcagatactcaaagctgtcggagggagcatcttaccttgatcacacctttccagcagaaaagatggacgacgcagtcgccccgggcagagagtacacttacgaatggtcgatatcagaggactccggcccaactcatgatgaccccccttgtctgacccatatctactactctcatgaaaatcttatcgaagatttcaactcgggtttgatcggacctctgttgatttgtaagaaagggaccctgactgaaggtggaactcagaaaactttcgacaagcaaatagtcctcctgtttgccgtgtttgatgaatcgaagtcgtggtcccagtccagctcattgatgtacactgttaatgggtacgttaacggtactatgccagatataaccgtctgtgcacatgaccatatttcatggcatctcctggggatgtcgagtggacccgagctcttttcaattcatttcaatggccaggttctcgaacagaaccatcataaagtgtccgccataactttggtgtcggcgaccagcaccaccgctaacatgactgtcggtccagaaggaaaatggatcatatctagcctgactcccaagcacctccaagcaggtatgcaagcctacatcgacataaagaactgccctaagaaaactaggaacttgaagaagatcactcgtgagcaaaggagacatatgaaacggtgggagtactttattgcagcagaggaagtgatctgggattacgcccctgtaattcctgcaaatatggataagaagtatagatcacaacatctcgataacttctccaatcagattggaaaacattacaaaaaggtgatgtacactcaatacgaagatgaatcatttacgaagcacactgtgaacccaaatatgaaggaagatggaatcttgggtcccattatccgcgcgcaagtccgggataccctgaagatcgtctttaagaacatggcgtcgaggccttactccatttatcctcatggtgttaccttctccccttacgaggacgaggtgaactcgagcttcaccagcggacggaacaatacgatgattagagccgtgcaaccaggtgaaacctacacttacaagtggaatattctggagttcgacgaacctaccgagaatgacgcacagtgtcttacccgcccatactacagcgacgtcgacattatgcgggacattgcaagcggcttgattggactccttctcatctgcaaatcccgcagccttgatagaaggggaattcagagagcggcggatatagagcagcaagcagtctttgcagtgttcgacgagaacaagagctggtaccttgaggacaacatcaataagttttgcgaaaaccccgatgaggtgaagcgcgacgacccgaagttctacgaaagcaacattatgagcaccattaacggttacgtgcccgaatcgattaccactctgggattttgttttgatgataccgtgcagtggcatttctgttcagtgggcacgcagaatgaaatactcaccatccacttcaccggtcattccttcatttacggtaagcgccacgaagatactctgactctgttccctatgcgaggagaatcagtcaccgtgactatggataacgtggggacctggatgctgacttccatgaactcgtcaccaagatcgaagaagttgagacttaagttcagggatgtcaagtgcatccccgatgacgatgaggatagctacgagatctttgaaccccctgagtcaaccgtgatggcaacgcgtaagatgcatgaccgactggaacctgaggatgaggaatcagatgcagactacgattaccaaaaccggctggctgcagcgcttggcattcgatcttttcgcaatagctcgctgaaccaagaggaagaagagtttaaccttactgcactggcactggaaaacggaactgaattcgtctcatctaacactgacattattgtcgggtcaaactattcgtcaccaagcaacatttcgaagtttacggtgaataacttggcagagcctcagaaagcccctagccaccaacaagcaaccaccgcaggaagccccctgcgacacctgattggcaagaacagcgtccttaacagctccaccgccgaacattcaagcccatactcggaggatcccattgaagatccacttcagcctgacgtgacgggtattaggttgctctccctgggtgcaggggaattcaaatcgcaagagcatgcaaagcacaaaggacctaaggtggagagagatcaagccgcaaagcacagattctcgtggatgaagctgctggcgcataaggtgggccggcatctgtcacaggataccggtagcccatccggtatgcgtccttgggaagatctcccttcccaggatactggaagcccatctcgaatgcggccatggaaggacccgccatcggatctgctgcttctgaagcaatcaaacagctcgaagatccttgtcggcaggtggcatcttgcgagcgaaaagggctcatacgagattatccaagataccgatgaggatactgcggtgaacaactggctcataagcccccaaaacgcatcgagagcctggggtgaatcaactcccctggccaacaaacctggcaagcaatcgggccatcctaagtttccaagagtcagacacaagtcactgcaagtgagacaggatgggggaaaaagccgcctgaaaaagtcgcaattcctgattaagactagaaagaaaaagaaggaaaagcacacccaccatgcacccctgtcccctagaacttttcaccctctgagatctgaagcctacaacacttttagcgaaaggagacttaagcattctctggtcctgcacaaatccaacgaaacttcactccctacggatcttaaccaaactctcccgtccatggattttggttggatagcgtcgctgcctgaccacaatcaaaactcgtcaaacgatactggtcaagcctcctgtcccccaggcctttaccagaccgtgcctcctgaagaacattaccaaactttcccgatccaagaccctgaccagatgcattccacctcagatccttcacaccggagctccagcccagagctttcggaaatgctcgaatacgacagatcacacaaatccttcccgacggacattagccaaatgtccccaagctccgaacatgaggtgtggcagaccgttatctcgccagatctcagccaagtcaccctctcgcctgaactctcccaaacgaacctttcacctgatctcagccacaccaccctcagccctgaattgattcaaagaaacctgtcgcccgcacttgggcaaatgcctatttcaccggatctttcacataccacccttagcccggatctttctcacacgacgcttagcttggatctttcccaaactaatctctcccctgaactgtcccagactaatctgagcccggcacttggacagatgccactctcccctgacctgtcgcacacgaccttgtccttggacttctcacaaacgaatctctcaccagagctgtcacatatgaccctcagccccgaactgagtcagacgaacctttcccctgcacttgggcagatgcccatttccccagatctctcgcataccacgttgtcccttgattttagccagaccaatctttcaccagaattgtcccagaccaacctgtcaccagcacttggtcagatgcccctttcgcctgatccttctcatacgacgctttcacttgacttgtctcaaaccaacctctccccagagctcagtcagaccaacttgtccccggaccttagcgagatgcctctgtttgccgacctgagccaaataccgttgacccctgatctggaccagatgactctcagccccgatctgggggaaactgatctgtcacctaatttcgggcaaatgagcctctcccccgacctttcccaggtgacgctctcaccggacatctcggacacgaccctgttgcctgatttgtcgcaaatcagcccgcctccagatctcgatcaaatcttctacccatctgagtcgtcacagtcactcctcttgcaggagtttaatgagtcgtttccctaccctgatctgggtcaaatgcctagcccttcctcaccaacgcttaatgataccttcctgtcgaaagagttcaacccgcttgtgatcgtcggactctccaaggatgggactgattacattgagataattcctaaagaggaagtgcaatcatccgaggatgactacgcggaaatcgattacgtgccgtacgacgatccgtacaagactgatgtcagaactaacattaacagcagccgagatcccgataacatcgcggcatggtacctccggagcaataatgggaatcgtaggaactactatatcgcggctgaagaaatttcgtgggattactccgagtttgtgcagcgcgaaaccgatattgaagattccgatgatatcccagaggatactacgtacaagaaggtcgtgttccggaaatacttggacagcacctttactaaaagagatccccgcggagaatacgaggagcaccttgggattctgggacccattatccgggcagaagtcgatgatgtgattcaggtgcgctttaagaatctcgcttcccgtccatattcactgcatgctcacggtctttcctacgagaagtcgtccgaaggaaagacttacgaggatgattcccctgaatggtttaaggaagataacgcagtgcagcccaattcgtcctacacttacgtctggcatgcaaccgaaagatcaggacccgaatcgccagggtcggcgtgtagggcctgggcgtactactcggctgtgaaccctgaaaaggacattcacagcggactcatcggaccacttctcatatgtcagaagggtatcctgcacaaggattcaaatatgcctatggatatgagggagtttgtccttctgtttatgaccttcgacgaaaagaagtcctggtactacgagaaaaagtcgaggtcgtcatggagacttacttcatccgaaatgaaaaagagccatgagtttcatgcaattaacggtatgatttactcacttcccggactcaaaatgtacgaacaggagtgggtgcgactgcatctgcttaacatcggtggcagccaagatatccatgtggtgcattttcatggccaaaccctgctcgagaacggaaacaagcaacaccagctgggagtgtggccactccttccagggagctttaagactcttgaaatgaaggcatcgaagccaggctggtggctgctgaatactgaagtgggagagaaccaacgtgcaggaatgcaaactccatttctgattatggatagagattgcaggatgcctatgggactgtcaactgggattatcagcgactcacaaatcaaggcaagcgagtttcttggatactgggagcctcgtctcgcgaggctgaacaatggtggttcgtacaatgcgtggagcgtggagaaacttgcggctgaattcgccagcaagccatggatccaagtggacatgcagaaggaggtcatcattaccggtattcaaacccaaggagctaaacattaccttaaaagctgctacaccactgaattctacgtggcatacagcagcaatcagattaactggcagattttcaaaggaaactcgactcgcaacgtgatgtactttaacgggaactccgatgcaagcaccataaaggaaaaccagtttgacccaccgatcgtggcaagatacattcgcatctcacctaccagagcatacaatcggcctacgctccggctcgaacttcagggatgtgaagtgaacggttgctcaaccccgctgggtatggagaacggaaagattgagaataagcagattaccgcatcgtccttcaaaaagtcctggtggggtgattattgggaaccattcagagcgagactgaatgcgcaaggaagagtgaatgcatggcaggctaaggctaataacaataagcagtggctggaaatcgatctgctgaaaatcaaaaagatcaccgctatcatcactcaagggtgtaagtccctgtccagcgaaatgtacgtgaaatcttacaccattcattactccgagcaaggagtggaatggaagccgtatagactgaaatcatcaatggtggacaaaatctttgaaggaaatactaataccaaaggtcacgtgaagaactttttcaacccccctattatctcacgcttcatacgagtcattcctaaaacttggaatcagagcattgccctgaggcttgagctctttggctgtgacatttac

SEQ ID NO: 9094 - DNA, 6672 bp, synthetic construct; identical to SEQ ID NO: 9028
  misc_feature 1..6672: note = source = /note="Description of Artificial Sequence: Synthetic coding sequence"
  source 1..6672: mol_type = other DNA

SEQ ID NO: 9095 - DNA, 6672 bp, synthetic construct
  misc_feature 1..6672: note = source = /note="Description of Artificial Sequence: Synthetic coding sequence"
  source 1..6672: mol_type = other DNA
atgtttccgggctgcccacgcctgtgggtgctcgtcgtcctggggacttcttgggtcgggtgggggtcgcagggtaccgaggctgctcagctcaggcagttctatgtcgctgcgcaaggcatctcctggtcgtaccggccagaacctactaattcctccctcaacctctcggtgaccagcttcaagaagatcgtgtacagagaatacgagccgtacttcaagaaggaaaagccgcagagcaccatcagcggactgctgggaccaactctgtacgcagaggtgggagacatcatcaaggtccatttcaagaacaaggccgacaagccattgtcgatccacccgcagggcatcagatactcgaaactctccgagggagcatcctatctcgaccacactttcccggccgagaagatggacgacgcagtggcaccaggacgggagtacacctacgagtggtccatctcggaagattcaggcccgactcatgatgatccaccgtgcctgacccatatctactactcacacgaaaatctcatcgaagacttcaactccggcttgatcgggccactcctcatctgtaagaagggaaccttgaccgagggaggaactcagaagactttcgacaagcagatcgtcctgctgtttgccgtttttgacgagtcaaagtcctggtcgcagtcgtcatcactgatgtatacggtgaacggttacgtgaatgggactatgcctgacattaccgtgtgtgctcatgaccacatcagctggcacctcctcggaatgtcatcggggcctgaacttttcagcatccacttcaacggacaagtgctcgaacagaatcaccacaaagtgtccgctatcacccttgtctcagcaacttcgactaccgcaaacatgactgtgggccctgagggcaaatggattatctcaagcctcacgccaaagcacttgcaggccggaatgcaagcgtacatcgacatcaaaaactgtccgaagaaaactcgcaatttgaagaaaatcaccagagaacagcgccggcacatgaagcggtgggaatactttattgctgccgaagaggtgatctgggactacgcgcctgtcatcccggccaacatggacaagaagtacaggtcgcagcacctcgacaatttctcaaatcaaatcggaaagcactacaaaaaagtgatgtacactcagtacgaagatgagagcttcaccaaacataccgtcaaccctaatatgaaggaagacggcatcctgggcccgattatccgggcccaggtgcgcgacactctgaagattgtcttcaagaatatggcctcccggccatacagcatctacccgcacggcgtgaccttctccccatacgaggacgaggtcaatagctcgttcacctcaggcaggaacaacaccatgatcagggcagtgcaacctggcgaaacgtacacttacaagtggaacatcctcgaattcgacgaaccgaccgaaaatgatgcacaatgcctgacgcgtccgtactacagcgatgtggacatcatgcgggatatcgcttccggcctgatcggtttgcttctgatctgcaaatcgcggtcgctcgaccgcagaggtatccagcgcgccgcggacatcgagcagcaggccgtgttcgcagtgttcgacgagaataaatcctggtatctggaagataatatcaacaagttctgcgagaatccggacgaggtgaaacgcgacgacccgaagttttatgaatcgaacatcatgtcgaccatcaacggctacgtcccagaatcgattaccactctgggcttctgcttcgacgataccgtccagtggcatttctgttcggtgggaactcaaaatgaaattctgaccatccatttcactggacacagcttcatttatgggaagagacacgaggacaccttgactctgttcccgatgagaggagaatcggtgaccgtcaccatggacaatgtgggcacttggatgttgacctcgatgaactcctcgcccagaagcaagaagctgcgtctgaaatttagagacgtgaagtgcatcccagacgacgatgaggacagctacgagatcttcgagccacctgagtccactgtcatggccaccagaaagatgcatgatcggctggaacctgaagatgaggagagcgacgctgattacgactaccagaaccgactggcagcagcacttggtatccgctcgttccgcaattcctccctgaaccaagaggaagaggaatttaacctgactgctttggcactggaaaacggcactgaatttgttagctcgaacactgacatcatcgtgggctcgaattactcctcaccatccaacatatccaagttcaccgtcaataatctggctgagcctcaaaaggctccgagccatcagcaggcaactaccgccggctccccgctccgccatctgatcggaaagaattccgtgctcaacagctcgaccgccgagcatagctccccgtacagcgaagaccctattgaagatcctctgcagccagacgtgactgggatccgactcctctcactgggagcgggtgagtttaaatcgcaggagcatgccaagcataaggggcccaaagtggaacgggatcaagcggccaagcaccggttcagctggatgaagctgctggctcataaggtgggccgccacctgtcacaggacaccgggtccccatccggaatgaggccttgggaagatctgccgagccaggataccgggagcccttcccgtatgaggccgtggaaggatccgccgagcgatctgctgctgttgaaacaatccaactcatccaagatcctggtggggagatggcacctggccagcgagaagggatcctacgaaatcatccaggatacggacgaggacaccgcggtgaacaactggctcattagcccacaaaacgcgagcagggcatggggagagtcaaccccactggcgaataaacccggaaagcagtccggccacccgaagttcccgcgggttcggcataagtcgctccaagtgagacaggacggcgggaagtcacgcctgaagaaatcgcaattcctgattaaaacgcggaagaagaaaaaagagaaacacactcatcacgccccgctctcacctcggaccttccacccacttcgctcggaggcttacaacaccttttcggaacgccgcctgaagcattccctggtcttgcacaagtcaaacgagacttccctgccgactgatctgaaccagaccctgccgtcaatggacttcggatggattgcttctttgccagaccataaccaaaactcgtcaaacgacactggacaagcgtcctgcccacctgggctgtatcaaaccgtgccacctgaagaacactaccagacttttcccatccaggacccggaccaaatgcatagcacttcggatccttcgcaccgctcgtcgagcccggaattgtcagaaatgctcgaatacgacagatcccacaagtcgttcccgaccgatatttcccaaatgtcgccaagctcggagcacgaagtttggcagactgtgatcagcccagatctgtcccaagtcacgctgtcgccggaactctcgcaaaccaacttgtcgccagacctttctcatactaccctctctccggaactcatccagcggaatcttagtccagctcttggccagatgccgatttccccggacctttcccacacgactctgagtccggatctctcccatacgaccctgtcccttgacctcagccagacgaatttgtcgcccgagctgagccaaactaatctcagtcctgcgctcggtcagatgcctctctcacctgatctcagccatactactctctcgctcgacttctcgcagaccaatttgtcgcctgagctctcccacatgaccctgagccctgaactcagccagaccaatctgagccctgccctcggacagatgccgatctcgcccgacctctcgcacactactctgtcgttggatttttcccagactaatctgtccccagagctcagtcagactaacctttcaccggctttgggccagatgcctctttcgccagatccatcccacactaccctgtctctggatttgagccaaaccaacctgtcccccgagctgtcgcagaccaacctgagccccgatctcagcgagatgcctctgtttgcggaccttagccagatccctctgaccccggaccttgaccaaatgaccctctccccggatttgggcgaaaccgacctgtcgccaaattttgggcaaatgtcgctctcaccggacctctcgcaggtgaccctgtcaccggacatttcagacactaccctcctcccggacctgagccaaatctccccgccgccggatttggaccagatcttctacccatcagaatcttcgcaatcgctgctgctgcaggaattcaacgagtcttttccgtacccagacctgggtcaaatgccatcaccctcatccccgaccctgaacgacactttcctctcgaaggaattcaacccattggtcatcgtgggactctcgaaggacggaaccgactacatcgagatcatcccgaaggaagaagtccagtcctcggaagatgactacgcggaaatcgactacgtgccgtacgacgatccgtacaagaccgacgtgcggaccaacatcaatagctcacgcgacccggataacattgcggcctggtacttgagatcgaacaacggaaaccgcaggaactactacatcgccgcggaggaaatctcgtgggattacagcgagttcgtgcaacgcgaaactgacattgaagattcagacgacatcccagaagacaccacttataagaaggttgtcttccggaaatacctggattccacttttaccaagcgggacccacggggagagtacgaggagcacctcggaattctgggaccaatcatcagagcagaggtcgatgatgtcatacaggtgagatttaagaatctggcatcccggccctattcgctgcacgcacacgggctgagctacgagaagtccagcgaaggaaagacctacgaagatgactcccccgaatggttcaaagaagacaatgccgtccagcccaacagctcgtacacttatgtgtggcacgctacggagaggagcggaccagagtcacctggaagtgcctgtcgggcctgggcctactactccgcagtgaatcccgaaaaagacatccactctggactcatcggcccgcttctcatctgccagaaaggcatcctgcataaagacagcaatatgccgatggatatgcgggagttcgtgctcctgtttatgaccttcgacgaaaagaaatcatggtactacgagaaaaagtcgcgcagcagctggcgccttacctcctcggagatgaagaagtcccacgagttccatgctatcaacggaatgatctactcgctgccaggacttaaaatgtacgaacaggaatgggtcagactgcacctgctgaatatcggagggtcccaagacatccacgtggttcacttccacgggcaaacgctgctggaaaacggaaataagcagcaccagctgggggtctggccgctgcttccaggatcgttcaaaaccctcgaaatgaaggcgtcgaagcccgggtggtggctgctgaacaccgaggtgggagagaatcagcgcgcgggcatgcagacccctttcctgatcatggaccgggactgtaggatgccgatgggactgtccaccggcatcatctccgactcccaaatcaaggcttcggagttccttggttactgggaacctcgacttgctagactcaataacggaggatcctacaacgcctggtcggtggaaaagctggcggctgaattcgcctcgaaaccgtggatacaagtggatatgcagaaagaggtgatcatcaccggaatacagacccagggtgcgaagcactacctgaagtcttgttataccaccgagttttatgtcgcgtactcgtcaaaccagattaactggcaaattttcaagggcaactcaactaggaacgtgatgtatttcaatggcaattcagacgcctccactattaaggaaaaccaattcgacccacccatcgtcgctcggtatatcaggattagcccaaccagggcatacaaccgcccgactctccgcctggaactgcagggatgtgaggtcaacggatgctcaacccctctcggcatggaaaatggcaagattgagaataagcaaatcaccgcgtcctccttcaagaaatcgtggtggggggactactgggaaccgttccgagctcggttgaacgcacaggggcgcgttaatgcttggcaagctaaggcgaataacaacaagcagtggctcgaaattgacctcctgaagatcaagaagattaccgccattatcacccagggatgcaaatcactgtcgtcggaaatgtatgtcaagtcttacactatccactactcggaacagggggtggaatggaaaccgtatcggttgaaatcgtcgatggtcgacaagatcttcgaaggcaacactaacacgaagggtcatgtaaagaacttcttcaatccgccgattatctcccgctttatcagagtgatcccgaaaacctggaaccagtcgatcgctctcaggctggaactcttcggttgcgacatctac

SEQ ID NO: 9096 - DNA, 6672 bp, synthetic construct
  misc_feature 1..6672: note = source = /note="Description of Artificial Sequence: Synthetic coding sequence"
  source 1..6672: mol_type = other DNA
atgttcccggggtgcccaagactctgggtgctggtcgtgctgggaacctcctgggtgggatggggctcccagggaaccgaagccgcgcaacttagacagttctacgtcgccgcgcaaggaatctcctggtcgtatcggccggagcctactaattcaagcctgaacttgagcgtcacctcattcaaaaagatcgtctaccgggagtacgaaccatacttcaaaaaggaaaaacctcaaagcaccatctcaggcttgctcggaccgactctgtacgccgaggtcggagacatcattaaagtccatttcaagaataaggctgacaaacctctgagcatccacccacagggaattcgatactcgaaactctcagagggcgcctcatacctggaccacactttcccagcagaaaagatggacgacgcggtggctccagggagagaatacacgtatgagtggtcgatttcagaagattctggcccgacccacgacgaccccccatgcctcacccacatctactactcccatgaaaaccttatcgaggacttcaactccggactgatcggacccctgttgatctgtaagaagggcaccctgacggaggggggaactcaaaagacttttgacaagcaaatcgtgctcttgttcgccgtttttgatgaatcgaaatcgtggtcacagtccagctccctgatgtacaccgtgaacggatacgtgaatggcaccatgccggatatcaccgtctgcgcgcacgaccatatcagctggcatctgctcggcatgtcgtcgggcccggaactgttcagcatccatttcaacgggcaggtgcttgaacaaaaccatcacaaggtgtctgccatcactctggtgtcagccacctcaactactgcgaacatgaccgtgggaccagaggggaagtggatcatcagctcattgactccaaagcacctgcaggcgggcatgcaggcttacattgacattaagaattgtccaaaaaagactcgcaacctcaagaagatcacccgcgaacagcgacgtcacatgaagagatgggaatacttcatcgccgctgaagaagtgatctgggattacgctccggtgattcccgccaacatggacaagaagtataggtcgcaacaccttgacaacttttcaaatcaaatcggcaagcattacaagaaggtcatgtacacccaatacgaggacgagtcgttcactaagcacaccgtcaacccaaatatgaaggaagatggcatcttgggaccgatcatccgggcccaggtgagggacaccttgaagatcgttttcaagaacatggcgtctaggccatactccatctacccacacggtgtcactttttcgccgtacgaagatgaggtgaactcgagctttacctccgggcggaacaacacgatgatcagagccgttcaacctggtgagacttacacctacaagtggaatatcctcgagttcgacgagcccaccgagaatgacgcacaatgcctgactagaccgtactactccgacgtggacattatgcgggacatcgcctccggactcatcggtctgctgctgatttgtaagtcaagatccctcgacagacgcggcatccagcgcgcagccgacattgagcaacaggcggtttttgctgtgtttgatgagaacaagtcctggtacttggaggataacatcaataagttttgcgaaaaccctgacgaagtgaagcgcgacgatcccaagttttatgaaagcaatatcatgtcgacgatcaacggatacgtcccggaatcgatcactactcttggtttctgctttgacgataccgtccagtggcatttttgctcggtcggaacccagaacgagatcctgactatccattttaccggccacagcttcatctacggaaaacgccacgaggacactcttaccctctttcccatgcggggcgaaagcgtcaccgtcaccatggataacgtgggtacctggatgctgaccagcatgaatagttcgccgcgcagcaaaaagctcaggttgaagttccgggatgtgaagtgtatcccggacgacgacgaggattcctatgagattttcgagccacccgaaagtaccgtaatggcgactaggaagatgcatgatcgcctggaacctgaagatgaagagtcggacgccgattatgattaccaaaaccggctggccgctgcgctggggatccgctccttccgcaattcgagcctgaatcaggaagaagaggagtttaatctgaccgccttggccctcgaaaacggaaccgagtttgtctcctcaaataccgatatcatcgtcggttcgaactactcgagcccgtcgaatatctcaaaattcacggtgaacaacctggccgagccgcagaaagcgccgtcgcatcagcaggccaccaccgccggatccccgctgcgccacctcataggcaagaactcggtgttgaactcgagcacggccgagcactcctcaccctactccgaggatccgatcgaggaccctctccagccggacgtgactggaattaggctcctgagcctgggagccggcgagttcaaatcccaggaacacgcgaagcacaaagggcccaaggtggaacgcgaccaagctgcaaagcatagattctcctggatgaaactcctcgcccacaaggtgggacggcacctctcgcaggatacgggatccccgtcaggaatgcggccctgggaggacctcccaagccaagacaccggaagcccgtcgagaatgcggccgtggaaggacccaccgtcagacctcctgctgcttaaacagagcaacagcagcaagatcctggtgggacggtggcacctggcatcagaaaaagggagctacgaaatcattcaggataccgacgaggacaccgcggtgaacaactggttgatctccccacagaatgcatcgcgcgcgtggggcgaatcgacccccctcgccaacaagcctggcaaacagtccggacaccctaagttcccccgggtgcgccataagtccctccaagtcagacaagatggagggaaatcgcgtcttaagaagtcgcaattcctgatcaagactaggaaaaagaaaaaggaaaagcacactcatcatgcgccgctgtcgcctcgaacctttcacccgctgagatccgaggcttataacactttctcagaacggaggcttaaacacagcctggtgctgcacaagtcgaatgaaacctcacttcccactgacctcaaccaaaccctgccgtctatggacttcggatggatcgcctcgctgccggaccacaaccaaaactcctctaacgataccggacaggcctcatgccccccgggactgtaccagaccgtgccaccggaagagcattaccaaacttttccaatccaagacccagaccagatgcactccacttcggatccgtcacataggtcctcctcgcctgagctgtcagaaatgttggagtacgacagatcgcacaagtccttcccgaccgatatctcgcagatgtccccatccagcgaacacgaggtgtggcaaaccgtgatcagcccggacctgtctcaggtgacccttagcccagagctctcacagaccaatctctctccagacctctcacatactacgctcagcccagaactgatccagagaaacctgtccccagctctcgggcagatgcccatctcgccggacttgtcccacactaccctttctccagacctgtcccacaccacgttgtccctggacctgtcccagaccaatctgtcaccggaactgtcccagactaatctctcgccagccttggggcaaatgcctctctccccggatctgtctcacaccactctgagcctcgattttagtcaaactaacctttcgccggagctctcccacatgactctttcgcctgaactttcacaaactaatctgagtccagctctgggacagatgccgatttctcccgatctctcacataccaccctctctctggatttctcccagacgaacctctcccccgaactgtcccaaaccaacctgtcgccggctctcggacagatgcccctctcacctgacccaagccacacgactctcagcctcgacctttcccagactaacctgtcaccggagctgtcccaaacgaatttgagcccagatctgtcggaaatgccgctgttcgccgatctgtcgcaaatcccactcactccggatctcgatcagatgaccttgtctcctgatctgggagaaacggaccttagcccgaatttcgggcagatgagcctctcgccagacctttcacaagtgaccctctcgcctgacatctctgatacgacgctgctgccggatctgtcgcagatatcgccgcccccggacctggaccagatcttctacccgtccgaaagctcgcagtcgctgctccttcaggaattcaatgagagctttccgtacccggatctcggccagatgccgagcccatcgtccccaacgctgaacgatactttcctgagcaaggagttcaaccctctggtgatcgtgggactttctaaggacggaactgactacattgagatcatcccgaaagaggaagtgcaatcgagcgaggacgattacgctgaaatcgactacgtgccttacgacgatccatacaagaccgacgtgagaaccaatatcaactcctcgcgcgacccggacaatattgcagcatggtaccttaggagcaacaacggaaacaggcggaattactacatcgcagcagaagaaatctcctgggattactcggaattcgtgcaacgggagactgacatcgaggactcggacgacatcccggaggatacgacttacaaaaaggtggtgttccggaagtacctcgactcgacgtttactaaaagagatccgcgcggtgagtacgaagaacatcttggcatcctgggaccaatcattcgtgcagaagtggacgacgtcatccaggtgcgcttcaaaaatctcgccagccgcccatactcccttcacgctcacggtctgtcgtacgaaaagtcctcagaaggaaagacttacgaggatgattcgcccgaatggttcaaggaagataatgcagtacaacctaattcctcttacacttacgtatggcacgccaccgaacgctccggacctgagagcccggggtccgcatgcagagcgtgggcgtactacagtgcagtcaacccggaaaaagatatccatagcggccttatcgggccgttgctgatttgtcagaagggaattctgcataaagacagcaacatgccgatggatatgcgcgagttcgtcttgctcttcatgactttcgacgaaaagaaatcatggtactacgagaaaaagtcgcgttcttcatggcgactgactagctctgaaatgaagaagtcccatgagttccacgccattaatggaatgatttactcacttccgggactgaagatgtatgagcaggaatgggtgagactgcatctgctgaatatcggaggatcccaagatatccacgtggtgcacttccatggacaaactctgctggagaatgggaataagcaacatcagctgggagtctggccactcttgccgggatcgttcaagactctggagatgaaggcttcaaaacctggttggtggctgctgaacaccgaggtgggcgaaaatcagcgcgccggaatgcagactccttttctcattatggatagggactgcagaatgccgatgggcctgtcaaccggcattatctcggactcccagatcaaagcatcggaattcctgggatattgggagcctcgcttggcacgccttaacaacggtggatcatataacgcatggtccgtggaaaagctggccgcggaattcgcgtcgaagccatggattcaggtcgacatgcagaaggaggtgatcattactggtatccagacccagggagctaaacactacctgaaatcctgctacactactgaattctacgtggcgtactcaagcaaccagatcaactggcagatctttaaggggaactccactcgcaatgtgatgtacttcaacgggaactccgatgcgtcgactatcaaagagaaccagttcgatcctcctatcgtggccagatacatccggatctcgcctacccgcgcgtacaaccggccgactctgcgactggaacttcagggttgtgaggtaaatggctgcagtacccccctgggaatggaaaacgggaagattgagaacaagcagattaccgcctcatcgttcaagaagtcatggtggggcgactactgggagcccttcagggcacggctcaacgcgcagggccgggtcaatgcatggcaagcgaaagcgaacaacaataagcaatggctggaaatcgacctgctgaagatcaagaagattaccgccatcatcacccagggttgcaagtcgttgtcgtctgaaatgtacgtgaagagttacaccatccattactcggagcagggcgtggagtggaaaccgtaccgtctgaaatcctcaatggtcgacaaaatcttcgaaggaaataccaacaccaagggccacgtgaaaaactttttcaatcctcccatcatttcccgcttcatccgcgttatcccaaagacgtggaaccagtctatcgccctgaggctggaattgttcggatgcgacatatat

SEQ ID NO: 9097 - DNA, 6672 bp, synthetic construct
  misc_feature 1..6672: note = source = /note="Description of Artificial Sequence: Synthetic coding sequence"
  source 1..6672: mol_type = other DNA
atgtttccaggctgcccaagactctgggtgcttgtggtgctaggaacatcttgggtgggttggggcagtcaaggcactgaggccgcacagctgcggcagttttacgtggcagctcagggcatctcatggtcctaccggcccgagccaacaaatagctcactcaacctgtcagtgacaagcttcaaaaaaattgtttacagagaatatgaaccctacttcaaaaaagaaaagcctcagtccactatctctggtctgctgggaccaacactgtacgctgaggtgggcgacatcattaaagtgcatttcaaaaacaaggctgacaaacctttgtccattcacccacagggaattcgatactccaagcttagtgagggcgcttcctaccttgaccatacctttccagccgagaaaatggacgacgcagtcgcgcctggcagagagtatacttacgagtggtctatctcagaggattccgggcccacgcacgatgaccctccttgtctgacccacatctactactctcatgaaaacctgattgaagattttaactctggccttattgggcccctactgatttgcaaaaagggtaccctcacagaagggggtacccagaaaacatttgacaagcagattgtcctgctttttgccgtctttgacgaaagcaaaagctggtctcagagctcctctctgatgtacaccgtgaacggttatgtgaatggtaccatgcctgacatcaccgtgtgcgcacacgatcacataagttggcacctgttgggtatgagttcagggcctgagttgttttccattcactttaacggccaagtacttgagcagaaccaccataaggtgtccgctattacactggtgtctgctacaagtactacggcaaacatgactgtagggccagagggaaaatggataatcagctccctgacacccaaacatcttcaagcaggcatgcaggcatatatagatatcaagaattgcccaaaaaagactaggaatttgaagaaaattacgcgggagcaacgacgacatatgaagcgatgggaatatttcattgcagcagaggaagttatatgggactacgctcccgttatccccgcaaacatggacaagaagtacagatcacagcacctggataatttcagcaatcagataggtaagcattacaagaaagtgatgtatactcagtatgaggacgaatccttcaccaagcatactgtcaaccccaatatgaaggaggatgggatcctgggcccgatcatccgggcacaggttcgggacacccttaaaatagttttcaaaaatatggcctcccgaccctattccatctatccacacggtgtaacattttccccctatgaagatgaggttaactcaagcttcacatccggcaggaacaataccatgattcgcgcggtccagccaggtgaaacatatacatataagtggaatatcctggaatttgatgaacccaccgagaatgatgcacagtgcctcacccggccctattattctgatgtagacattatgcgggacatcgcttcaggccttataggactgctcctaatctgcaagtcaaggtccctggaccggagggggatccaaagagcggctgacatcgagcagcaagctgtctttgccgtctttgacgagaataagtcctggtaccttgaagataacatcaataagttctgcgagaatcctgacgaggtcaagcgggacgaccctaagttctatgagagtaatatcatgagcaccatcaatggatacgttccagagtcaataaccactctgggcttctgctttgatgacacagttcagtggcacttttgtagtgtgggcactcaaaatgagattctgaccatccatttcactggtcattcttttatctacgggaagaggcacgaagatactctgaccctgtttccgatgcggggggagagtgtgacagtcaccatggacaatgtgggaacgtggatgctcacttcgatgaatagctcacctaggagcaagaaactgcgattgaagtttcgcgatgtgaaatgtatccccgatgacgacgaggatagctacgaaattttcgagccccccgaatctacagtaatggctacgcggaagatgcatgatcgactggagcccgaagacgaagaatctgatgcggattatgactaccagaatagactggcagccgcactcgggataagatccttccgtaattcatcgctgaaccaggaagaggaggaattcaatctgacagctctagctctagagaatgggaccgagtttgtcagctctaatactgacataattgtcggctccaactatagttcaccaagcaatatctcaaaattcacagtgaataaccttgccgagccacaaaaagctccctctcatcagcaggccacgaccgcagggagtcccctgcgacatttaattggtaaaaatagcgttcttaacagttccacagcggaacattcttcaccttattcagaggatccaatcgaggaccccctgcagcctgatgtcaccggaattagacttctatctctcggggccggcgaatttaaaagccaagagcatgccaaacacaaaggaccaaaggtcgaaagagatcaagctgctaagcaccgcttcagctggatgaagcttctcgctcacaaagtgggacgccacctgagccaggacacaggcagcccatccgggatgagaccatgggaggacctgcccagccaggacacgggctccccttccagaatgaggccttggaaggatcctccttcagacctgctgcttctgaagcagagtaattcttccaaaatccttgtcgggcggtggcacctagctagcgaaaaaggcagctacgaaataattcaggacaccgacgaagacaccgctgtgaacaactggctgataagcccacagaacgcatcccgtgcttggggagagtctactcctttggccaacaagcctggcaaacagtccggacatcccaaattcccccgcgtgcggcataagagcctgcaggtacgccaggacggtggaaaaagtcgtcttaagaagtcacagtttcttatcaaaacgaggaagaagaagaaggagaaacatacccaccacgcgccactgtctccaaggacattccatcccctgagatctgaggcttacaatacattttcagagagaaggctaaagcattctttggtgttgcacaagtcaaacgaaactagcctgcccactgatctgaatcagactctcccctccatggacttcggttggatcgcctctctgccagatcacaaccagaatagtagtaacgataccggccaggcttcatgccctcctggactataccagactgttcctccagaagagcattatcaaaccttcccgatccaggatcctgatcagatgcacagtaccagtgatccaagccacagaagctccagccctgagctttccgagatgctggagtacgaccggtcgcacaaaagctttcccaccgatatctctcaaatgtccccatcaagcgaacatgaagtctggcagactgtgatctcacccgacctgagccaggtgaccttgtcccctgagctgagtcaaacaaatttgagccctgacctctctcacactaccctttctcctgaattaatccagaggaacctgagtccagcactgggacagatgcctattagtcccgacctctcacatacaacgctaagcccagacctgagccacaccactctcagtctggacctaagccagacaaacctgtcacctgagctctctcagactaacctgagtcctgctctgggtcagatgcctctgagtcctgacctgtctcacaccacattgtccttggacttcagccaaacaaacctcagtcctgagctgtcccacatgaccttgtctcctgagctgtctcagaccaatctctcccctgccctcgggcagatgccgatatccccggatctctctcacacaacattgtcgttggattttagccaaacaaacctgtcccccgaactgtcccaaacaaacctgagcccagcattgggtcaaatgcccttatctcctgatccctcgcacaccaccttatccttagatttgagccagaccaatctctcccctgaattgtcgcagacaaacctcagccctgacctgtccgaaatgccactgttcgcggatctctctcagatccccctgaccccggacctggaccagatgaccctctctcctgaccttggcgaaacagacctgagtccaaacttcggacagatgagtctgtccccagatttatcccaggtaactttgagccccgatatctccgataccacgcttttacccgacctgagtcagatttccccacctccagacctggaccagattttctaccctagtgagtcgtcgcaatcactgctcctacaggagtttaatgagtcttttccgtatccggatctgggacagatgccttcaccatctagcccaaccctgaatgatacattcctctcaaaggagtttaacccactcgtgattgtaggcctgtcgaaggacggcactgattatatagaaattattccaaaggaagaggtgcagtcctcagaggacgattatgctgagattgactacgtgccgtatgatgacccctacaagacagatgtcagaaccaacatcaacagctcaagggaccccgataatatagccgcttggtatttgcggtctaataacggaaatcgtcgtaattactacatagctgccgaagagatctcttgggactactctgagtttgtgcagagagaaaccgacatcgaggactcagacgatatcccagaggacaccacatataagaaggtggttttcaggaagtatctcgattcaaccttcactaagcgggaccctagaggggaatacgaggaacacctaggaattctgggcccaataattcgagccgaggtggatgatgtcattcaggtgcgtttcaagaacctggcctcacggccctacagcttgcacgctcacggcctgtcatacgaaaagtcctctgagggcaagacctacgaagatgattctccagaatggtttaaggaagataacgcggttcagcccaacagtagctacacttatgtctggcacgcaacggaacgttcaggaccagagagcccggggagtgcatgtcgcgcttgggcctattatagcgccgtgaaccccgaaaaggacattcattccgggttgatcggccccctgctgatttgtcaaaagggcatcctgcacaaagatagtaatatgcccatggacatgcgggaatttgtgttacttttcatgacctttgacgaaaagaaaagctggtactacgaaaaaaagagccgcagttcttggagactgactagttctgagatgaagaaaagccacgaattccacgcgataaacggcatgatttacagcctacccggtctaaagatgtacgagcaggaatgggttcggctgcatctcctcaatatcgggggctcacaggatatccacgtcgtgcactttcacggccagacacttctggagaatggaaataaacagcatcaacttggggtctggcccttgctgcctggtagtttcaaaaccctggaaatgaaggcctcgaaacctggctggtggctgctgaatacggaagtgggcgagaaccagagagccggaatgcagactccctttttgatcatggaccgggactgtagaatgccaatgggactctccaccggtatcatctctgactctcaaatcaaagcaagcgagttcttaggatattgggaaccccgcctggcgcgcctgaacaacggcggaagttacaatgcatggagtgtggaaaagctcgctgcagaattcgcctcgaaaccatggatccaggtcgatatgcagaaggaagtcatcattacagggatacaaactcaaggagcgaaacactacttaaagtcatgctataccacagagttctacgtggcctactcttctaaccagataaactggcaaatctttaaagggaactccacccgcaatgtaatgtacttcaacggaaacagcgatgcctctacgataaaggagaaccagttcgacccaccgattgtggctagatatatacgcatctcccccacgagagcttacaaccgaccgactctgagactggagctccaggggtgcgaggtgaacgggtgcagtacgcctctcggcatggaaaacgggaagatagagaacaaacaaatcaccgcgtccagttttaagaaatcctggtggggtgactactgggagccgtttagggccaggctaaatgcacaggggcgggtaaatgcctggcaggctaaggctaataataataaacaatggctcgagattgacctgctgaagatcaagaaaattaccgctatcattacccaggggtgcaagtcactctcctctgaaatgtacgtcaaatcgtatacaattcactatagcgaacagggagtcgagtggaaaccctatagactgaagagctccatggtagacaaaatctttgagggcaacacaaacaccaaagggcacgtcaaaaacttttttaatccgccgatcatcagtcgtttcattcgtgtgatacctaaaacgtggaaccagagtatcgcactccggttggagctttttggctgcgacatctac

SEQ ID NO: 9098 - DNA, 6672 bp, synthetic construct
  misc_feature 1..6672: note = source = /note="Description of Artificial Sequence: Synthetic coding sequence"
  source 1..6672: mol_type = other DNA
atgtttcccggctgtccacgcctgtgggtgctcgtggtcctcggcacttcctgggtgggatggggttcgcaggggaccgaagcagcacagctccgtcagttttacgtggcagcgcagggaatttcctggtcctacaggcctgaacctaccaactcatctctcaacttgtcggtgaccagctttaagaagatcgtataccgcgaatacgagccctactttaagaaggaaaagcctcaatcgaccatctcggggctcctcggacctactctgtacgcagaagtgggagatatcattaaggtgcactttaagaacaaggctgataagcccctttctattcatccgcagggtattaggtactcaaagctctccgaaggggcctcctacctggaccacaccttccccgcagagaaaatggacgatgcagtggcaccaggcagagaatacacgtacgaatggtcgattagcgaggacagcggtcctactcatgacgatccaccttgtctgactcacatctactattcccatgaaaatcttattgaagatttcaattccggactcattgggcctcttcttatctgcaagaaaggtactctgaccgaagggggaactcagaaaactttcgataaacaaattgttcttctcttcgctgtgtttgacgaatcgaaaagctggagccaaagcagctcccttatgtacaccgtgaatggatatgtgaacggtactatgccggacatcaccgtgtgcgcccatgaccatattagctggcacctgctgggtatgagctcgggtcctgaacttttttccatccatttcaacggtcaagtgctggagcaaaaccatcacaaggtgtctgccattactcttgtctccgcaacctcgactaccgctaatatgactgtcggccctgaaggaaagtggattatcagctcccttacgccaaagcatctgcaagccggtatgcaggcatacattgacataaagaattgccccaagaaaactcgcaaccttaagaaaatcactcgcgaacagcggcggcatatgaaacgttgggaatacttcatagcagctgaagaagtgatttgggactatgcaccagtgattcccgcaaatatggataagaagtaccgatcccaacaccttgacaacttttccaaccaaataggcaagcattacaagaaggtgatgtatactcagtacgaggacgaatctttcaccaaacatactgtgaacccaaatatgaaggaagatgggatcctggggccaattatccgcgcacaggtgagagatactctcaaaatcgtgttcaagaacatggcgtcacggccttactccatataccctcatggagtcacctttagcccgtacgaagatgaagtcaactcctcatttacgtccgggaggaacaacaccatgatacgggcagtgcagcccggcgaaacgtacacttacaaatggaacatcctggaatttgacgagcctacggaaaatgacgcgcagtgtcttacgcgcccttactactcagatgtggacatcatgcgtgatattgcatccggactcatcggactgttgctcatttgcaagtcgcgctcacttgaccgtagaggtatccagagagcagcagatatagagcaacaagcggtgtttgccgtgttcgatgagaacaagagttggtacttggaggataacatcaacaaattctgcgaaaatccagatgaggtgaaacgtgatgatccaaagttttacgagtcaaacatcatgtccactattaacggttacgtccctgaaagcatcaccactctcggcttttgctttgacgacaccgtccagtggcacttttgtagcgtcggaacgcagaatgaaatcctgactattcactttacgggtcattcattcatttatggtaagaggcatgaggacactcttactctctttcccatgcggggagaatccgtgactgtgaccatggataacgttggcacctggatgctcacctccatgaacagctctcctcggtcgaagaagctgcggctgaagtttagagacgtgaagtgtattcctgatgacgatgaggattcttacgagatctttgagccacccgaaagcaccgtgatggcaacccggaaaatgcatgatcgcctggagcccgaggacgaggaatcggatgcggattatgactaccaaaacaggcttgcagctgcactggggattcgtagctttagaaattcgagcctcaatcaggaagaagaagaattcaaccttactgccttggcactcgaaaacggaacggagtttgtctcctcgaatactgacataatcgtgggcagcaactactcgtccccaagcaacatttccaaattcaccgtgaataatcttgccgaaccacagaaagcgccctctcatcaacaggcgacgaccgcaggatcccctctgcgtcacctgatcggaaagaatagcgtgctcaattcctcgaccgcggaacattcaagcccatacagcgaagatcctatcgaggatcctcttcaaccggatgtgacgggaatcagactgctctcgctcggggccggtgaattcaaatcacaagaacacgcaaagcacaaaggaccaaaagtggagcgcgaccaagcagcaaaacatagatttagttggatgaagctgctggcccataaggtgggaaggcacctttcgcaagataccggaagtccatcaggaatgaggccgtgggaggatcttccatctcaagataccggtagcccttcacgcatgcgcccatggaaggaccctccaagcgaccttctgcttctgaagcaaagcaactcgagtaagatccttgttggaaggtggcatcttgcctcagagaaaggaagctacgaaatcatccaagacaccgatgaggataccgcagtgaacaactggctgattagccctcaaaatgcgtcccgcgcgtggggcgaatcaactccattggctaataagcctggcaaacagtccggacacccgaaatttccaagggtgcgccataagtccctgcaggtgagacaagatggcgggaagagcagactgaagaagtcccagttcctgattaagacccggaagaaaaagaaagaaaagcatacgcatcatgcacctctttcccctcgcacttttcaccctcttcgcagcgaagcctacaacacgttttcggagcgccgtctgaagcattcgctggttctccacaagtctaacgaaacttcgctgcccactgatcttaaccaaactcttcccagcatggattttggatggattgcatcactgccagatcacaatcagaattcctccaatgacactggccaagcgtcctgtcctccagggctttaccagaccgtgcctccggaagaacattaccaaactttcccaatccaagatccagatcaaatgcactccacgtccgatcctagccatcgatcctcaagccccgaactgagcgagatgctggaatacgatagatcccataagtcttttccgacggacatctcccaaatgtccccttcaagcgagcatgaagtctggcaaaccgtcatttcgccggatctgagtcaagtcaccctttccccagagctcagtcagactaacctttctccagatctttcgcacaccactctgagccctgagttgattcaacggaacctctctcccgccctgggacagatgccaatcagccctgacttgtcgcatactactttgtcacctgacctttcgcacactactctgagcctggatctctcacaaacgaacctgtccccagaactttcgcagactaatctttcccctgcacttggccaaatgccgctgtcaccggatctcagccacactacccttagcttggatttttcacaaaccaatctgagccccgagctgtcgcacatgacgctgagccccgaactttcccagactaacctgagcccggcgctgggccaaatgcccatttcgcctgatctcagtcatactactctttctctggatttctcgcaaaccaacctgtcgccagaactcagccagactaatctctcacccgcactcggtcaaatgccactttcacccgacccttcccacaccaccctgtccctggatcttagccagaccaatctctcgcccgaattgagccagaccaacttgagccctgatctctcggagatgccactttttgcagatctgtcgcagattcctctgactcctgatctggaccaaatgacccttagccctgatcttggtgaaactgatttgagcccgaactttggacagatgtcgctgtcccctgatcttagccaagtcaccctctcgcctgacatttccgacacgaccctgctgcccgatttgtcccagatctcgccgcccccagacttggatcagatcttttacccatccgaatcctcgcaatcgctcctgctccaagaattcaacgagtcgtttccgtaccccgatctgggtcagatgccatccccttcgtctcccaccctcaatgatacttttctttccaaggaattcaaccctcttgtgatcgtgggactgtccaaagacggaactgattacattgagataatacccaaggaggaagttcaatcgtcggaagatgattacgcagaaattgattatgtcccgtacgacgacccttacaagaccgatgtgagaacgaacatcaactcgtcccgcgaccccgacaacatcgccgcatggtacctgaggtcaaataacggtaaccggcggaactactacatcgctgccgaggagatatcctgggactactcggagtttgtccaaagggaaactgacattgaagattccgatgatatccccgaagataccacctacaaaaaagtggtgttcaggaagtacctcgattcgacctttaccaagcgagatccgcggggggaatacgaagaacatctgggaattctgggaccgataattcgcgcagaggtcgacgatgtcatccaggtgaggttcaagaacctggccagccgaccatacagcctgcatgcacatggtcttagctacgaaaagtcatcagaaggaaagacctatgaagatgatagccctgagtggtttaaggaggacaacgccgtccagccgaacagctcatacacttacgtgtggcatgctaccgaaaggtccggcccggaatcaccagggtccgcctgcagagcgtgggcatactacagcgccgtcaatcccgaaaaggatattcattccggtttgataggtcctctcctgatctgtcaaaaggggattctccataaagattccaatatgccaatggatatgcgagaattcgtgctgctctttatgacctttgatgagaagaaaagttggtactacgagaaaaagtcgagatcatcatggagattgacttcgtcggagatgaaaaagtcgcacgagtttcatgcgattaatggcatgatctactcactcccaggacttaagatgtacgaacaggagtgggtgcgacttcatctccttaacataggaggatcacaggacatccacgtggtccactttcatggtcagactctcctggaaaatggtaacaagcaacaccaacttggagtctggcctctgctccctggatcgttcaagactctcgaaatgaaggcatccaaacctgggtggtggctccttaacaccgaagtgggcgagaaccaacgcgccggaatgcaaacccctttcctgataatggatagggactgccgcatgcctatgggactctccactggcataatcagcgattcgcagattaaggcgtcagagttcctcggatattgggagccgagactggcccgattgaataacggaggctcgtacaatgcatggtcggtcgaaaaacttgccgctgagttcgcgtcgaagccgtggattcaagtggacatgcaaaaggaggtgatcattactggaattcagacccaaggggcaaaacattacctcaagtcgtgctacactaccgaattctatgtcgcatactcttccaatcagattaactggcagattttcaaagggaactccacccgtaacgtgatgtacttcaacggtaacagcgacgcatccacgatcaaggagaaccagtttgatccacccatcgttgcaagatatatccggatttcacccacgcgcgcatacaatagaccgaccctgagattggaacttcaagggtgcgaagtgaatggatgtagtaccccactgggcatggagaatgggaaaatcgagaacaagcagattaccgcatcaagttttaagaagtcctggtggggtgattactgggaacccttccgggcacgcctgaatgcccaaggacgtgtgaacgcatggcaggcaaaagccaataacaataaacaatggctggagatagatcttcttaagatcaagaagatcactgcaattatcacccaaggttgtaagagcctttcctcagaaatgtacgtcaagtcgtacaccatccattactccgagcagggtgtcgaatggaagccatatcggttgaaatcgtcgatggtcgacaagatttttgagggaaacaccaacaccaagggtcacgtgaagaacttctttaatccaccaattatctcaaggtttattcgagtgattcccaagacctggaaccaatccatcgccctccgacttgaactgttcggttgtgatatctat

SEQ ID NO: 9099 - DNA, 6672 bp, synthetic construct
  misc_feature 1..6672: note = source = /note="Description of Artificial Sequence: Synthetic coding sequence"
  source 1..6672: mol_type = other DNA
atgtttccgggatgcccacgactttgggtgctggtggtgctggggacttcctgggttggctggggatcccaggggactgaagcggcccaactgagacagttctatgtagcagcacaggggatttcgtggtcgtatcgtcctgagccaactaattcgtcgctcaacctgtcagttacttccttcaagaagattgtctacagggaatacgagccatactttaagaaggaaaaaccacagagcaccatttcagggcttctcggccctacgctgtacgcagaagtgggagatatcataaaggtccacttcaaaaacaaagctgataaaccactctcgatacatccacagggtattcgatattccaagctctcggaaggcgcatcatatctcgatcatacttttcctgcggaaaagatggacgatgcagtggcacctgggcgagaatacacttatgaatggtcgatctccgaggatagcgggcctacgcatgacgacccaccatgtcttacccacatttactactcacatgagaatctgatagaggatttcaactctggcctcataggaccccttttgatttgtaagaaagggaccctcaccgaaggggggacccaaaaaactttcgataagcagatagtgttgctttttgcagtgttcgatgagtcgaagagctggagtcaatcgtcgtccctgatgtacacggtgaacggctacgtgaacggtactatgcctgatatcaccgtgtgtgcacacgaccacatttcctggcatctgcttggaatgagttcgggaccagagctttttagcattcatttcaacggacaagtcctggagcagaatcaccataaggtgtccgcgattacccttgtaagcgctactagcaccaccgcaaacatgactgtggggcctgaaggtaaatggattatctctagcctcactcccaagcatttgcaggccggtatgcaagcatacattgatatcaagaactgtccgaaaaagaccagaaacctgaaaaagattactcgtgagcaacggaggcacatgaagagatgggagtactttatcgcggccgaagaagtcatttgggactacgcaccagtcattccagccaacatggacaaaaagtaccggagccagcacctggataacttttcgaaccaaataggtaagcactacaagaaggtgatgtatacccagtacgaggatgagagcttcactaagcataccgtcaatccaaatatgaaggaagatggtatccttggaccaattatcagagcccaagtccgcgataccctgaagatcgtgtttaagaacatggcgtcgcggccatattcaatctaccctcatggtgtcactttttcgccttacgaagatgaggtcaattcgtccttcaccagcggaagaaacaatactatgattcgcgccgtgcaaccgggcgaaacttacacctataagtggaacattcttgaatttgacgaacctaccgagaacgacgctcaatgcctgactcgtccttactactctgatgtggacataatgagggatattgcatccggtttgatcggactgctgctcatctgtaaatcgcgcagcctcgatcggcgggggatccaaagagcagcagacattgaacagcaagctgttttcgcagtgtttgacgagaataagtcttggtaccttgaggacaacattaacaagttttgcgaaaacccagatgaagtcaaacgtgatgatcctaagttttacgaatcaaatatcatgtcaaccatcaacggttacgttcccgaatcgataaccaccctcggattctgttttgacgataccgttcaatggcacttttgctcggtcggtacccagaacgaaattcttaccatccatttcactggccattccttcatttatggaaagagacacgaggatactcttactctttttcctatgagaggcgagtcagttactgtgaccatggacaacgtgggcacctggatgcttaccagcatgaactcctctcctcgctcgaagaaacttaggctgaagtttcgggatgtgaaatgtatcccagatgacgacgaagattcatacgaaatctttgaacctcccgaatcaactgtgatggcaactaggaaaatgcatgatcgcctggagcctgaagatgaagaatcagatgcagattacgattaccagaacagacttgcagcggcactgggcattcgctcattccgcaattccagccttaatcaggaagaggaggaattcaaccttaccgccctggcactcgaaaacggtacggaatttgtatctagcaacaccgacattatcgtgggaagcaattactcgagcccatccaatatctctaaattcactgtgaacaacctggcggagcctcaaaaagcgccttcccatcaacaagcaacgactgcagggtcccctctcagacatctcattggtaagaactcggtgcttaatagctccactgccgaacattcgagcccgtactcggaagatccaattgaagatccccttcagccggatgtgactgggatcaggcttctgtctctcggtgcaggggagtttaagtcgcaggagcatgccaagcacaaaggtcccaaagtggaacgcgaccaagccgctaagcacagattttcctggatgaaacttcttgctcacaaggtggggagacatctgtcacaagataccggtagccctagcggaatgcgtccttgggaggatcttccctcccaagataccggatcgccttcccgaatgcgcccctggaaggatcctccgtccgatctgctgctgcttaaacagtcgaattcgtccaaaattctcgtcggaagatggcacttggcctcggaaaaaggatcctacgagattattcaggataccgatgaggatacggcagtcaataactggcttatttcacctcaaaacgcatcgcgtgcgtggggtgaatccacccccctcgccaacaagccaggcaagcagtcgggccaccccaagtttcccagggtcagacacaagagcctccaggtgagacaagacgggggtaagtcacggcttaagaagagccaattccttatcaaaacgagaaagaagaaaaaggaaaagcatactcatcatgccccgctttcccctcggacctttcatcctcttcggtctgaagcatataacaccttttcagagcgacgccttaagcattcgcttgtgctccacaagtcaaatgaaacgtcccttcctaccgatttgaaccagactctgccttcaatggacttcggatggattgcaagcctccctgatcacaaccagaattcgtcgaacgataccggacaagcctcctgtcctcctggcctgtaccagacggtgcccccagaagaacattaccaaacgtttcccatacaggaccccgaccagatgcactcaacttctgatccttcgcacagatcatcctcccccgaattgtccgagatgttggaatacgaccgtagccataaatcatttcctaccgatattagccagatgtccccttcctcagaacacgaagtgtggcagaccgtcatttcaccagacctctcgcaagttactctgagcccagaattgtcgcaaacgaatttgagcccagatctgagccatactacgttgtccccagaacttatccaacgaaacttgagccctgcattgggacagatgcccatatcacccgatcttagccatactactctgtccccggacctttcccataccaccttgtccttggacctcagtcaaaccaatctttcaccagaactctcgcagacgaacctgagtccagcccttggtcaaatgccgctgtctcctgatctgtcccatacgaccctgagccttgacttctcacaaactaacctctcaccagaactttcacatatgactctgagtcccgaacttagccagaccaacctctcgcctgccctgggtcagatgcctatttcgccagatctgtcgcacacgaccctttctctggacttttcacaaaccaatctcagccccgaattgagccaaaccaatctgtcaccggctctggggcaaatgccactctccccggacccgagccatacgactcttagcctggacctgagccagactaatctctcacctgagctttctcagaccaacctgtcccccgacctgtccgaaatgcctctgttcgctgatcttagtcaaattccacttacccccgacctcgatcaaatgactctctcaccagatctcggtgagacggaccttagtcccaactttggacaaatgtcactttcacctgatctctcacaggtcactctgtcccctgatatctccgacacgacgcttctgcctgacctttcacagatttcgcctccccctgacttggatcagatcttttacccgtccgaaagctcacagtcccttcttttgcaagagttcaatgaatcgtttccataccctgaccttggccaaatgccgtcgccatcgtccccgaccctgaacgatacttttttgagcaaagagtttaaccccctggtcatcgtgggtctttccaaagatggtaccgattacatcgagattatcccgaaggaggaagtccaatcgagcgaagatgattacgcagaaattgattacgtgccttacgacgacccatacaagaccgacgtgagaacgaacatcaactcatccagggacccagacaacattgcagcatggtacctgaggtcgaataatggaaataggagaaattactacatcgcagcggaagagataagctgggattacagcgaattcgtgcaacgggaaactgacattgaagattccgatgacatcccagaggacactacttacaagaaagtggtgtttcggaaatacctggattcaacgttcactaagcgcgatccacggggcgagtacgaggagcacttgggaattctgggacctatcatacgcgcagaagtggatgacgtgatacaggtgaggttcaagaacctggccagtagaccttacagcctgcatgcacacggcctctcctacgaaaaatcgtcggaaggcaaaacctacgaggacgactcccctgagtggtttaaggaagataatgcagtgcagcctaacagctcttacacctacgtttggcacgccaccgaaagatccggtccagaatcacccggctcagcctgtcgtgcttgggcatactactcggccgtcaatccagaaaaggacatccatagcggtctgatcggaccactgctgatttgccaaaaaggaattcttcataaggattcgaatatgcctatggatatgcgcgaatttgtgcttcttttcatgacgttcgatgagaagaagtcgtggtactacgagaagaagagcagatcctcgtggagacttaccagctcggagatgaagaagtcccatgaatttcatgcaattaacggaatgatttactcgcttccgggacttaagatgtacgaacaagaatgggtccgcctgcatcttctgaacattggaggctcgcaggacatccatgtggtgcactttcatggacagaccctgttggaaaatggtaataagcaacatcagctgggagtgtggccactgttgcctggatccttcaagaccctcgaaatgaaggcatccaagcccgggtggtggctcctcaacactgaagtgggggaaaaccaacgagcagggatgcagactcccttcctcattatggatcgagattgcagaatgccaatgggtctgtcaaccggtattatctcggactcccaaatcaaagcatcagaatttcttggctattgggagccacgactggcccggctgaataacggtggatcttacaacgcctggtccgtcgaaaagctcgcagcagagtttgcaagcaagccttggatacaagtcgatatgcaaaaagaagtgatcattaccggaattcaaacgcagggagcgaagcattacctgaaatcatgttacactactgagttttacgtggcttactcgagcaaccaaatcaattggcagattttcaagggaaactccacccgcaatgtgatgtacttcaacggtaactcggacgcgtccactatcaaggaaaaccagtttgatcccccaatagtggcccgttacatccgcatatcgccaacgagagcatacaatcgaccgactctgagactcgaactgcaaggttgcgaggtgaacggatgtagtaccccgcttggtatggagaacggtaagattgagaataaacaaataaccgcatcgtccttcaagaaatcttggtggggggattactgggaaccctttcgagctcgtctgaacgcacaagggcgggtgaacgcgtggcaagcaaaggccaacaacaacaagcaatggctcgagattgatctgctgaagatcaagaagattactgcaatcataacccagggttgtaagtcgcttagcagcgaaatgtacgtgaagtcgtacaccatccactactcagagcaaggagtcgagtggaagccatatcgcctgaaatcaagcatggtggataagatttttgaaggaaatacgaacactaagggacatgtcaagaatttctttaatcctcctatcatttcgcggtttattcgcgtgatccctaaaacctggaatcagtccattgctctgagattggagttgttcggttgcgatatctac

SEQ ID NO: 9100 - DNA, 6672 bp, synthetic construct
  misc_feature 1..6672: note = source = /note="Description of Artificial Sequence: Synthetic coding sequence"
  source 1..6672: mol_type = other DNA
atgttccccggatgtcctcgcctttgggtgctggtggtgctagggaccagctgggtgggatgggggtcgcagggcactgaggcagcccaactgcggcagttttatgtcgccgctcagggcattagctggtcgtataggccagaacctaccaatagcagtctgaacctgtcagtcacatcatttaagaaaatcgtttacagagagtatgagccttacttcaagaaggaaaagccacagtcaaccattagtggccttctgggccctaccctgtacgccgaggtgggagacatcatcaaagtgcacttcaagaataaggcggataagccactgtcaatccacccccagggcattaggtacagtaagctctctgagggcgcttcctatctggatcatacattccctgctgagaagatggatgatgccgtagctccaggacgggagtatacctatgagtggtcaatatctgaggattccggaccaacccacgacgatcccccatgccttacccatatatactatagccacgaaaatttgattgaggacttcaacagtgggctaattgggccccttctgatatgcaagaagggaacgctcacagaaggcggcactcagaagacatttgataaacaaatcgtgctcctgttcgctgtctttgatgaaagtaaatcttggagccagtcctctagcctaatgtacactgtgaatggctatgtgaatggcaccatgcccgacataactgtgtgtgcacatgaccatatctcctggcacctcctggggatgtcctccggccccgagctgttctctatccacttcaacggacaggtgctggaacaaaaccatcataaggttagcgccatcaccttagtgtcagctacaagtactactgccaacatgactgtagggccggaaggaaaatggattattagtagtctgacgcccaagcacctccaggcaggtatgcaagcatacatcgacattaagaactgccccaagaaaacccggaacctgaaaaaaatcacaagagaacagaggcgccacatgaagcgctgggaatattttatcgcggccgaagaggtgatttgggattacgccccagtaatacccgcaaatatggacaaaaagtatcggtcccagcatctcgacaacttcagcaatcagattgggaagcattacaaaaaggtaatgtacacccagtatgaggatgagtcgtttacgaaacataccgtcaaccctaacatgaaggaggacgggattttgggccccatcattcgtgctcaggtgcgggacacactgaaaattgttttcaaaaatatggccagtaggccctattctatctatcctcacggcgttaccttctccccttacgaggatgaggtgaattcgtcttttacttcaggccggaataataccatgatccgtgccgtgcagccgggggaaacttacacatacaagtggaacatactcgaatttgacgaaccaacggaaaacgacgctcagtgtctcacgcggccttactattccgatgtggatattatgcgagacattgccagcggcctgatcgggttactccttatatgcaagagtcgttcattagatagaaggggcatccagcgcgcagccgacatcgaacaacaggccgtcttcgccgtttttgacgaaaataaaagttggtacctggaggataacattaacaaattttgcgagaaccccgacgaggtgaagagggatgatccaaaattttatgagtcaaacattatgtcgaccatcaacggctatgtccccgagtcaatcacgacattagggttttgttttgatgacacagtgcagtggcacttctgttccgttggtacccagaacgagatactgacaattcacttcaccggtcactctttcatctatggcaaacggcacgaggacactctaacactgttccctatgaggggcgagagtgtgaccgtcacaatggacaatgttggcacctggatgctcacatctatgaactcttcccccagaagcaaaaagttgaggctgaaattcagagacgtgaagtgcatccccgatgatgacgaggactcatatgagatctttgaaccgcccgagtccactgttatggccacccggaagatgcatgatcgcctggaaccagaggatgaagaaagcgatgccgactacgactaccagaaccggctggctgccgccctgggcatcagaagtttcagaaactcgtctctgaaccaggaagaagaggagttcaacctgacagccctcgccttggagaacgggacagagttcgtatccagcaacacggatatcatcgtggggagcaactatagttctccctctaacattagtaagttcaccgtgaacaatttagcagaacctcaaaaggcgcccagccaccagcaggctactaccgctggatctcccttgagacatctgattggaaagaactcagtgctgaacagtagtacggccgagcatagcagcccctatagcgaagatcccattgaggacccattgcaacccgacgtaaccggcattcgcctgctgagcctgggggctggggaatttaagagccaggaacatgctaagcacaagggcccgaaagtagaaagggaccaggccgcaaagcatcgcttcagctggatgaagctgctggcacacaaggtgggtcgccacttatctcaggatactggtagtccgtcaggcatgcgcccttgggaggaccttccaagccaggatacaggcagtcccagccggatgagaccgtggaaggaccctcccagcgacctgctcctgctgaagcagagcaattcttcgaagattcttgttggacgctggcacctggcctcggaaaaaggcagctatgaaatcattcaggacacagacgaagataccgcggtgaacaactggctcatatcaccacagaacgccagccgcgcctggggagaatctacccctctagcaaataaacctgggaagcaatcaggacaccctaagttcccacgggtaaggcacaaatctttgcaggtgcgccaggatggggggaagtcacgtcttaaaaagagccagtttttgattaaaacccggaagaagaagaaggagaaacacacacatcacgcgcccttgtcccctcgaaccttccatccgctcaggtctgaagcttacaataccttcagcgaacggaggttgaagcatagcctggtcctgcacaaatccaacgagacatcgctccccaccgacctgaaccaaaccctgccatcaatggactttggatggatcgcaagtctacctgatcataaccagaactcgtctaacgacacagggcaggcctcctgcccccccggcctgtaccaaacggttccccccgaggaacattaccagacctttcccattcaggatccagatcagatgcattccacttccgacccgtctcatcgttcttcctcccccgagctgtctgagatgctggaatacgaccggagtcacaaaagttttccaaccgacatttcacagatgtctccatcctccgaacatgaagtttggcagactgtcatatcccctgacctgtcacaggtgactctatcccctgaactaagccagactaatttgtccccagacctgtctcacacaactctgagcccagaactgattcagaggaacctctctcctgcactgggacaaatgccaatctcaccagacctgtcgcataccacactctccccagacctgtcacacaccactctgtctttggacctgtcacagaccaacctgtcacctgaactgtcacagacaaacctgagtccggctctgggacagatgccactgtctcccgacctgtcacatactaccctcagcctggatttcagtcagacaaacctgagcccagaactgagccacatgaccttgagtcccgaattatctcagacaaatctatcccctgcactgggccagatgcccatctcccctgatctgagtcacacaaccctgtccctggacttctctcaaaccaatctgtctccagagctatcacaaactaatctgtcaccagcactagggcaaatgcccctgagccctgacccatcccacacgacattgtctctggacctcagtcaaaccaatctatcacctgagctgtctcagaccaatctgagccccgatttgagtgaaatgccacttttcgccgacctctctcagatccccctcactcccgatctcgatcagatgaccctttcccccgacctgggagaaaccgacttgagtcctaactttggccagatgtcactgtcacccgacctgtcccaagttactctgtcacctgatattagcgatactacgctgctccctgatcttagccagatctccccccctccggacctggatcagatattctaccctagcgaatcttcccagtcacttctgctgcaagagtttaacgagtcatttccttacccggacttggggcagatgccttcaccctcttctcctaccctgaacgacacctttttaagcaaggagtttaaccccctggtcatcgttggcctgtccaaggacggcacagactacatcgaaatcattccaaaggaagaggttcagtcctcggaagacgactacgccgagatagattacgtcccttacgacgatccatataagacagatgttagaactaatatcaattccagcagagaccctgacaatatcgccgcctggtacttgaggtctaataacggaaatcgccgtaactactacatcgccgctgaggagatctcttgggattacagcgagttcgttcagcgggaaaccgacattgaagacagcgacgacatacctgaagatactacttataaaaaagtggtgtttcgcaaatacctggactcgacctttaccaagcgagacccacggggagagtatgaggagcatctggggattttgggtcctattattagggccgaagttgacgacgtgatacaggtgcgattcaagaatttggctagcaggccctactcattacatgctcacggtttgagttacgagaagtctagtgaaggtaagacttacgaagacgattctccagagtggtttaaggaggataacgctgtacaacccaattctagctatacttacgtgtggcacgcaacagaaagatccggaccagaatctcctggctctgcttgccgagcgtgggcatattattctgccgtgaaccccgagaaggacattcactccggtctgataggccccctccttatttgccagaagggcatcctgcacaaggatagtaatatgccgatggacatgcgagaatttgtgctcttattcatgacatttgatgaaaagaagtcctggtactatgagaagaagtcccgcagctcttggagactcacctctagcgagatgaagaaatcacacgaattccatgcaattaacggtatgatttatagcctcccaggacttaaaatgtacgagcaagaatgggtgagattgcatttactgaacatcgggggctcgcaggacattcacgttgtccactttcatggccaaactttgctggaaaacggtaacaaacagcaccagttgggagtatggcccctcctgcctggaagcttcaagacgctggagatgaaggctagtaagcccgggtggtggctactgaataccgaggtcggtgaaaaccaacgtgctgggatgcagacgccatttctgataatggatcgtgactgtagaatgccaatgggtctctctactggtattatctctgactcccaaatcaaggcctccgaatttctaggatattgggagccccggctggctaggctgaacaatggcggaagctacaatgcgtggtccgtggagaagctggccgccgagttcgcctctaagccttggattcaggtggacatgcagaaggaggtgatcattacaggaattcagacccagggagccaaacactacctcaagtcatgctacacgaccgaattctacgtagcttattcttcaaaccagatcaactggcaaatctttaaaggcaattcaacgcgcaacgtcatgtactttaacggaaactctgacgcctctacaattaaagagaaccagttcgaccctcctatcgtggctcggtacattaggatctctcccaccagggcctacaaccgacctacactcaggctggagcttcaaggttgtgaggtcaacggatgctctactcccttgggcatggagaatggcaaaatcgaaaataaacagatcacggcctcatccttcaagaaaagctggtggggagactactgggaaccatttagagctaggctgaatgctcaggggagggtcaacgcctggcaagccaaggcgaataacaacaaacagtggctcgaaattgacctactcaagatcaaaaaaatcaccgctatcatcactcaagggtgcaagtcgctgtccagcgagatgtacgtaaaatcttacactatacactattcggagcagggcgtagagtggaaaccatatcgactgaaatcgagcatggtggacaagatctttgaaggcaacacaaacacaaaggggcacgtgaagaacttctttaatcctccaataattagcaggtttattagggtcatccctaagacttggaatcagtccatcgcactgcgattagagctgtttggttgtgacatttat

SEQ ID NO: 9101 - DNA, 6672 bp, synthetic construct
  misc_feature 1..6672: note = source = /note="Description of Artificial Sequence: Synthetic coding sequence"
  source 1..6672: mol_type = other DNA
atgttcccaggctgcccacgcctgtgggtcttagttgtgttgggcacttcatgggtgggctggggctcccagggtacagaggctgcacagctgaggcagttctatgtggcggcacaaggcatttcttggtcctaccgtcctgagccaactaacagctccctgaatctcagcgttaccagtttcaagaagatcgtttatcgcgaatatgagccttactttaagaaggagaagccgcaaagcacgatcagcggcctccttgggccgacgttgtatgcggaggttggtgatatcatcaaggtgcatttcaagaataaagctgacaagcccctcagcatacacccacaaggtattcgttatagcaaactatctgagggggcaagctatctggatcacacgttcccagctgagaagatggatgacgcggttgcgccagggagggaatatacctatgagtggtccatctcggaggattccgggccaacccatgatgatcctccatgcttgacgcacatttactactctcacgagaatctgattgaggacttcaactctggtctgatcgggccgctgctgatctgcaagaagggcacgctgaccgaaggcggcactcagaaaacctttgacaagcagattgtcttgctgtttgcagtgttcgatgaaagtaaatcttggtcccagagctcctctctgatgtacacggttaatggatacgttaacggcaccatgccagacattactgtttgcgcccacgatcacatcagttggcatttactgggtatgtcctccgggccggaactgttttccatccactttaatggtcaagttctggaacagaaccaccacaaggtgagcgcaatcacgcttgtgtctgcgacttccacgactgccaacatgacagttgggcctgaaggtaaatggattatctccagcttgactcctaaacacctacaggccggtatgcaggcgtatatcgacataaagaactgccccaaaaaaactcgcaatctgaaaaagattaccagagagcagcgccgccacatgaaacgttgggagtattttatcgccgccgaggaggtaatttgggactatgcaccggttattccggcaaacatggacaaaaaatatcgtagccagcacctggacaacttcagcaatcagatcgggaaacactataaaaaggttatgtacacccagtacgaggatgagtcttttactaaacatacggtcaaccctaatatgaaggaagatggcatcctgggtccgatcatccgcgcccaggtgcgagacacactgaagattgtgttcaaaaatatggcttcacgcccgtactccatctacccccatggggtgaccttttctccgtatgaggatgaggttaattcctcctttacttcaggccgcaataataccatgattagggcggtgcaaccgggtgagacctatacctacaagtggaatatcctggaatttgacgaacctacggagaacgatgcacagtgtttgacgcgcccatattactcagacgttgatattatgcgcgacatagcgagcggactgattggtctgctgttgatttgcaagagccgtagtctggatcgccgcgggattcagcgcgcagcggatattgagcagcaggccgtgtttgctgtttttgatgagaacaaatcctggtacctcgaggacaacataaataaattctgcgaaaatccagacgaagtgaagcgcgatgaccctaagttctacgagagcaacattatgtctactattaacggctacgttcctgaaagcatcacaactctgggcttctgttttgatgacaccgtccaatggcacttttgctccgttggtactcagaacgaaatcctcaccattcatttcaccggtcatagcttcatttacggtaaacgacacgaagatacgctgactcttttccccatgcgcggagaaagcgttaccgtgaccatggataacgtgggcacgtggatgctcacctctatgaacagctctcctcgttctaagaaattacggctgaaattcagggacgttaaatgcattcccgatgatgacgaggactcttatgaaatttttgaaccccccgaatccactgtgatggcaacgcggaaaatgcacgaccgcctggaacctgaggacgaggagtctgacgctgactatgattaccagaatcgcctcgctgcagcactgggaatacgcagctttcgcaattccagtctgaaccaagaggaggaagagtttaacctgactgcgttggcactggaaaatggcaccgagtttgtgagcagcaacaccgacatcatcgtcggcagcaactatagctcccctagcaatatcagtaagttcactgtgaacaatctggctgagccgcagaaagcgccgtcgcaccagcaggcaactactgcaggaagccctctaaggcatcttataggcaaaaatagcgtgctgaatagcagcaccgcggaacatagcagcccttatagcgaagatcccattgaggaccctctgcagccggatgttaccggaatccgactgctgagcctgggcgctggcgagttcaagagccaggaacacgccaagcataaaggtccaaaggtggaaagggaccaggcggctaaacaccgcttcagctggatgaagctgctggcccataaagtgggtaggcatttgagtcaggacacgggttcgccatcaggcatgcgcccttgggaagacctaccttctcaggataccggcagccctagcaggatgaggccgtggaaggacccgccaagcgacctgctgttgttgaagcagagtaactctagcaagattttggtgggccggtggcacctggcgtcggagaaaggcagctacgagatcatccaggacaccgacgaggataccgccgtgaataactggctcatctctccgcaaaacgcctcccgcgcttggggtgagagcacgccactggcaaataagcctggtaagcagagcggccaccctaagtttcctcgtgtgcggcacaaatccttgcaagtgcgtcaagacggtggtaaaagtcgcttaaagaaaagtcagttcctgattaagacccggaaaaagaagaaggagaagcatacccaccatgcaccattgagcccacgcaccttccaccccctgcgttccgaagcgtacaacacgttttcggagcgccgcctaaagcactctctggtccttcataagtccaatgagacctcgctgccgaccgacctgaatcaaacgctgccgtcgatggatttcggttggattgcctcactgccagaccataaccagaactcctctaacgacaccggtcaggcttcttgtccgcccggtttgtaccagaccgtgccacctgaggagcattaccagaccttcccgatccaagatcctgaccaaatgcactcaaccagcgatccttctcacaggtctagcagtcccgagctaagcgaaatgctagaatacgatcgcagccataaaagctttccgaccgacatttcccagatgagcccttcttctgaacacgaggtctggcagaccgttattagccctgatctctctcaagtgacgctgagcccagagctgagccaaacgaatctctccccggacctgagtcataccacgctgtctcctgaattgattcagcgaaatctgtcacctgcgctgggccagatgccgatcagcccggatctgagccacactaccctatccccggatctgtcacatacgacactgagcttggacttaagccagaccaacctgagcccggagctgtcccaaactaatcttagccctgcactgggacaaatgccactgtctcctgacctgagccacacaactctgagtctggacttctctcaaacgaatctcagccctgagctatctcacatgacgctatccccagagttgtctcaaaccaatctctcaccggccttgggccaaatgcctatttctcctgacctgtcccacactacgttgtctctggacttttctcagactaacctgagccctgagctgagccagaccaatttgtctcctgctctgggtcagatgccccttagccctgatcctagccacactactctgtctctggatttgagccagaccaatcttagcccagagctttcccaaaccaatctgagtcctgacctgtctgaaatgcctctcttcgccgacctgtcgcaaattccactgacgcctgacctggaccaaatgacgctgagcccagaccttggcgagacagacctctccccaaacttcgggcagatgagcttgtcaccggatctgagccaagtgaccttaagtccggatatttcagatacaacattgctgccggatctcagccaaatctcaccaccgccggatctggatcaaatcttttaccctagcgagtctagccagtccttgctgctgcaggaatttaatgagagcttcccctatccggatctgggccagatgccaagcccttcatcacctacactaaacgacacctttctttctaaggagtttaaccctcttgtcatcgtcggcctctccaaagatggtacagactatattgagattatccctaaagaggaagtgcagtctagcgaggatgactacgccgagatcgactacgtgccgtatgacgatccttataagactgacgtccgcactaacattaactcgagccgtgacccagataacatcgctgcgtggtacctcaggagcaataacggaaataggagaaattactatattgcggcggaggagatctcgtgggattatagcgaatttgtacagagggagaccgatattgaggacagcgacgacatccctgaggacactacctacaaaaaggtcgttttcagaaagtacctggactccacgtttactaaaagagacccacgcggtgaatatgaggagcatctgggcatcctgggtcctattattcgcgcagaggtagatgacgttattcaagttaggtttaaaaatctggcgtcacgtccttatagcctgcatgcgcacggcctctcctatgagaaaagcagcgaaggcaaaacctacgaggacgacagccctgaatggtttaaggaggataatgcagtgcagcctaattctagctacacttacgtgtggcacgcaacggaacgctccggacctgaatcccctggatcagcctgcagggcgtgggcgtattattctgcagtgaacccggaaaaagacattcattcgggtcttattggtcccttactgatctgccagaaggggatactgcacaaggactcgaacatgcctatggatatgcgtgaatttgtcttgctgtttatgaccttcgacgagaagaagtcctggtattatgagaagaagtcgcggtcgagctggaggttgacgtccagcgaaatgaagaagtcacacgagtttcacgcaatcaacgggatgatctattccctgcctggtctgaagatgtacgaacaagagtgggtgcgcctgcacctgctgaacataggtggcagccaggacattcacgtagttcacttccacggccagacactcctggagaatggtaataagcagcatcaactgggcgtgtggcccctgctgcctgggtcgtttaagaccctggagatgaaagcaagcaaaccggggtggtggttactgaacaccgaggttggtgaaaatcagcgagcgggcatgcagacgccatttctgataatggacagagattgtcggatgccgatgggcctgagcacaggtatcatatctgatagccagatcaaggcaagcgagtttctgggttactgggaaccgaggctggctcggctgaataatggtgggagctataatgcatggtctgtggaaaagctggctgcggaattcgctagcaaaccatggattcaggttgacatgcaaaaagaagtgattatcaccggaatccagacccagggtgctaaacattacttgaagtcttgctacacgacggaattttacgttgcttacagcagtaatcagatcaattggcagatttttaagggcaactccacgcggaatgttatgtactttaacggcaattccgacgcctctacgatcaaagaaaaccaattcgacccgcctatcgtagcgcgctacattcgaatctccccgacgcgtgcgtataatcggccaacgctgcggctggaattacagggttgcgaagtcaacgggtgcagtactccccttggtatggagaacggcaaaattgagaataaacagatcaccgcgagcagcttcaagaagagctggtggggtgattattgggaacctttccgcgcgcgcttgaatgcccaaggccgggtgaatgcgtggcaagcgaaggcgaataacaacaaacagtggctggagatcgatctgctgaaaattaaaaaaattaccgcgattatcacgcaggggtgtaagagcctgagctctgagatgtatgtcaagtcttacaccattcattatagcgagcagggcgtagagtggaagccgtatcgcttgaagagcagcatggtggataagatttttgaaggtaatacaaacaccaaagggcacgtgaagaacttttttaaccctccaatcattagccggtttatacgcgtgattccaaaaacgtggaatcagtcgattgccttgcgcctggagctgtttggctgcgacatatat

SEQ ID NO: 9102 - DNA, 6672 bp, synthetic construct
  misc_feature 1..6672: note = source = /note="Description of Artificial Sequence: Synthetic coding sequence"
  source 1..6672: mol_type = other DNA
atgtttccaggatgtccaaggctctgggtgctggtagtactggggacatcttgggttggatggggatcacagggaactgaagctgcccagctgcgccaattctatgtcgccgcccagggaatatcctggtcgtatagacctgaacccacaaacagtagtctaaacttgtccgtgacatctttcaaaaaaatcgtgtatcgggaatacgaaccatacttcaagaaagaaaaacctcagagtactatcagtggacttttagggcccacactgtatgcagaggtgggggatataatcaaagtacacttcaaaaataaagccgataagccactgtctatccatccccagggaattcggtattcaaagctctccgaaggggcttcttatctggatcatacatttcccgccgagaaaatggatgacgcagtggctccaggacgcgaatacacatatgaatggtctatctcagaagattctgggcctacacacgacgaccctccctgtcttactcacatctattattcccatgaaaatttaatagaagattttaactctggattgataggaccccttctgatctgtaagaaaggaactcttactgaaggaggaacacagaaaacatttgacaaacagattgtactattatttgcagtgttcgatgaatctaaaagttggtctcagtcctcctcccttatgtacacagtgaacgggtatgttaatgggacaatgcctgacatcacagtatgcgctcatgatcatatatcttggcacctgctcggaatgtctagtgggcccgaactgttttctatccacttcaatgggcaggtgctcgaacagaatcaccataaagtttctgccataactctcgtaagtgcaacatctacaactgccaatatgactgtaggacccgaggggaaatggatcatatcctctctgactcccaaacaccttcaggctggaatgcaggcctatatcgatatcaaaaattgccccaaaaaaactcgcaatttaaaaaaaatcacaagagaacaacggagacatatgaaaagatgggagtactttattgcagctgaagaagttatttgggactatgctcctgttattccagcgaacatggataaaaaatatcgctctcaacacctcgacaatttttccaaccagattggaaaacattataaaaaagtgatgtatacacagtatgaagatgaatccttcacaaaacatacagtcaacccgaacatgaaagaagatggaattcttggacccattatccgggcacaggtgcgggatacactcaaaatagtgttcaaaaacatggcctctcggccatattctatatatccccacggggttacattcagtccttatgaggacgaagtaaattcttccttcactagtgggcgaaacaatacaatgatcagggcagtacagcctggggaaacatatacatataaatggaacattttagaatttgatgaaccaactgaaaatgatgctcagtgtctgacacggccctactactccgatgtcgatatcatgcgagatatcgcatcaggattgattggactactcctaatatgcaagtctagatctctggataggcgtgggattcagcgcgccgcagacattgaacagcaggctgtattcgcggtgttcgacgaaaacaaaagttggtacctggaagataatattaataaattctgtgagaatcccgatgaagtcaaacgcgatgatcccaaattctatgaatctaatataatgtcaactattaatgggtatgtgcctgaatctattacaactcttggattctgtttcgatgatacagtgcagtggcatttctgctcagtaggaacacagaatgagatactcactatccacttcacaggacactctttcatatatgggaaacgacatgaagatactttaactctatttcccatgagaggggaaagtgtcactgttactatggataatgtagggacatggatgcttacatcaatgaattcatcaccccgaagtaaaaaactgaggctgaaatttagagatgttaaatgtatccccgatgatgatgaagactcctatgagatttttgaaccacctgaatccactgtgatggcaacaaggaaaatgcacgatcggctggaacccgaagatgaagaatctgatgctgattacgattaccagaatcgcctcgctgcagccctgggaatcaggtctttccggaattcatctctaaatcaggaagaagaagaattcaatctcactgcacttgccctggaaaatggaactgagttcgtgtctagtaatactgatatcatagtgggatcaaattatagttccccttctaatatctcaaaatttactgtcaataatttggctgaacctcagaaagccccttcacatcagcaggccacaactgcagggagtcctttaaggcacctgatcggaaaaaattcggtgcttaacagtagtacagctgaacattcctctccctattctgaagatccaattgaagaccccctacagcccgatgtgacaggaatcagactactgtcgctcggagccggagaatttaagtcgcaggaacatgcaaagcacaaaggacccaaggttgagcgggatcaggcggccaagcataggttctcgtggatgaaactactcgcccacaaagtgggaagacacctatcacaggatactgggtctccatctgggatgaggccttgggaagacctaccctcacaggatacagggtccccctccagaatgcgcccttggaaggatcccccatctgacctcctcctcctcaaacaatccaactcctcgaagatactggtaggaagatggcacctagcttcggaaaaaggaagttatgaaattattcaggacactgatgaagacactgcagttaacaattggctgatatctccccagaatgcctccagagcctggggagaatccactcccctggctaataaaccagggaaacagtctgggcatcccaaatttcctcgagtgcggcacaaaagtcttcaggtacggcaggatggaggaaaatctagactcaaaaagtctcagtttctaataaagacacggaagaaaaagaaggagaagcacacacaccacgctccactctcccctagaactttccatccactgcgatctgaagcctacaacactttcagtgaacggaggcttaaacactctcttgtgttacacaaaagtaatgaaacatcactgcctacggatcttaatcagactctaccctccatggatttcgggtggatagcatccttgcccgatcacaaccaaaatagttcaaatgatacagggcaggccagttgtcctcctggactttatcagacagtgcctccagaagaacactatcagacattccctatccaggatcctgatcagatgcactccacttcagatccaagtcataggtcgtcatcgcccgaactgtctgagatgctggaatatgatcggtctcacaagagttttcctacagatatttcacagatgtcacccagttctgaacacgaagtatggcagacagtcatatctcccgatcttagtcaggtgacactgtctcctgaactttcccagacaaatctgtctcccgacctgtcacacactacattgtcacccgaattaatacagcggaatctgtcccccgctctggggcagatgcccatttcccccgacctctctcatacaacacttagtcccgatctctcccatactacactgtccttggatctaagtcagacaaatttatctccagaattgtctcagacaaacctgagtccagcgcttggacaaatgccactatcacccgatctaagtcatacaactttgtctcttgatttctcccaaactaatctatcacctgaactttcccacatgactctatctccagaactgtcacagactaacctctctccagccctagggcagatgccaatttccccagatctctcgcacactactctgtcgctcgatttttctcaaactaatctgtctcctgaactctctcagacaaacctctctccagcacttgggcagatgcccctctctcctgatccttcccacactacactgagtctggatctgtctcagactaatctctctccagaactgtctcagacaaacctctcccccgatctcagtgaaatgcccctgttcgctgacctgtcccagattcccctcactcccgatcttgatcagatgacactaagtcccgatttgggagaaactgacctatcccccaattttgggcagatgtcactcagtcccgatctttctcaggtaactctttcccccgatatctctgatactacactcctacccgatttatctcaaatcagtcctccccccgatctggatcagatattctatccatcagaatcctcacagagtcttctccttcaggaatttaatgagtccttcccctatccagatctaggacagatgccttctccctcttctcccacattgaacgatacgttcttgtcaaaagaattcaatccattggtgatagtcggactcagtaaagatgggactgattatattgagatcatccccaaagaggaagtgcagtcctcagaagatgattatgcggaaatcgactatgttccatacgatgatccctataaaacagatgttcgcacaaatatcaactcatcacgagaccccgacaacatcgctgcttggtatctaagaagtaataacgggaacaggcggaattattatatcgccgcggaagagatctcttgggattatagtgaattcgtgcagcgcgagactgatatcgaagattcagatgatatccccgaagatacaacatataaaaaagtggtgttcaggaaatacctagacagtacatttacaaaaagggatcccaggggagaatatgaagaacatctcgggatcctgggacccatcatcagagccgaagtagatgatgtgatacaggtccggttcaaaaacctggcatctcggccatactctctccatgctcacgggttgtcttatgaaaaatcttcggaagggaagacatatgaagacgattcccctgaatggtttaaagaagataatgccgtccagcccaacagttcttatacatatgtgtggcatgctactgaacgctcaggacccgaatcacctgggagtgcatgtcgggcttgggcctactatagtgccgtgaaccccgaaaaagatatccacagtggactaattgggccactgttgatctgccagaaaggaatactgcataaagattctaatatgcctatggatatgagggaattcgtgttgctgtttatgacatttgatgaaaaaaaatcttggtactatgaaaaaaaatctcggtctagttggaggctgactagttcagaaatgaagaaatcacatgaattccacgccataaacggaatgatctattcgctccccgggcttaagatgtatgaacaggagtgggttcgtcttcatctgctcaacatcggaggatcccaggacatccatgtggttcatttccatgggcagacactgctagaaaacgggaacaaacagcaccagctaggggtgtggcctcttctgcccgggagttttaaaacactcgaaatgaaagcctctaaaccaggatggtggcttctgaacacagaagtaggggaaaatcaaagggccggaatgcagactccattccttataatggatagagattgtcgaatgcctatgggactctccactgggatcatatccgattcacagattaaagcatctgaatttttgggatactgggaaccacgacttgccagactcaataacggagggagttacaatgcttggtcagtggaaaagcttgctgcggaatttgccagtaagccttggatccaggtggatatgcagaaagaagtgatcatcacggggatccagacacagggggccaaacattatctgaagtcttgctatactactgagttctatgtagcttattcatctaaccagatcaactggcagatttttaagggaaattcgactcgaaacgtgatgtatttcaatggaaattcggatgcttccactatcaaagagaaccagttcgatcctccaatcgtggctcgctacatccggatatcacccacaagggcctataatagaccaacactccgattagaactgcaggggtgcgaagtgaacggatgttcaacgccactggggatggaaaacgggaaaatagaaaacaaacagattacagcatccagttttaaaaagtcctggtggggggattattgggaaccatttcgggctcggcttaatgctcaggggagggttaatgcctggcaggcgaaagccaacaacaacaaacagtggctcgaaatagatctcttgaagataaaaaaaattacagcaatcatcacacaggggtgtaaatccctatcttcagaaatgtatgtgaagtcctatacaatccactacagtgaacagggagtggaatggaaaccttaccgattaaaatcttccatggttgataaaatcttcgaaggaaacacaaacacaaagggacacgtaaaaaactttttcaatccacctatcatctcccgctttataagggtgatcccaaaaacttggaatcagtctatcgcactccggctggaactttttggatgtgatatctac

SEQ ID NO: 9103 - DNA, 6672 bp, synthetic construct
  misc_feature 1..6672: note = source = /note="Description of Artificial Sequence: Synthetic coding sequence"
  source 1..6672: mol_type = other DNA
atgttcccgggttgcccccgcctctgggtgctggtggtgctggggaccagctgggtggggtggggatcccagggaaccgaggctgctcaactgaggcagttttacgtggcggcccaaggaatctcgtggtcctaccggccggagccgactaactcgtcgctcaacttgagcgtgaccagcttcaagaaaatcgtgtatagggaatacgagccgtacttcaagaaagaaaagccgcaaagcaccatctcgggcctcctcgggccaacgctctacgccgaggtgggggatatcatcaaggtgcacttcaagaacaaggctgataagccactttctatccatcctcagggcatccgctactcgaagctctccgagggagcgagctatctggaccacacctttcccgccgaaaagatggacgacgcagtagctccgggacgcgaatacacttacgaatggtcaatctccgaggactcaggtccaacccatgacgaccccccttgtctgactcatatctattacagccacgaaaacctcatcgaggacttcaactcgggtctgatcggcccgctgcttatctgcaagaaaggaactctcactgaaggaggaacccaaaagacctttgacaaacagattgtgctgctgtttgcagtgtttgatgaaagcaagtcgtggtcgcagtcgtcatccctgatgtacactgtgaacggctatgtcaatggcacgatgccagacatcactgtgtgtgcgcacgaccacatttcctggcacctgctgggaatgtcgtcaggcccagaactgttttcgattcacttcaacggtcaggtcctggaacaaaaccatcacaaggtgtccgctatcactctggtgtcggcaacctccaccactgcaaatatgactgtgggtcctgaaggaaagtggatcatcagcagcctcacgccgaagcacctgcaggctggaatgcaggcctacatcgatatcaagaactgtccgaaaaagaccaggaatctcaagaagatcactcgggagcagcggaggcatatgaaacggtgggaatacttcatcgcagccgaagaagtgatctgggactacgcgcctgtgatccctgccaatatggataagaagtaccggagtcagcatctggacaacttctccaaccagatcggaaagcactacaagaaggtgatgtacacccaatacgaggacgaaagtttcaccaagcataccgtgaacccgaacatgaaagaggacggtattctgggtccaatcattcgggcacaggtcagggataccttgaagatcgtgtttaagaacatggcttcccggccatactccatctaccctcacggagtcacgttctcgccgtacgaggacgaggtgaacagctcgtttactagcggacggaataacacgatgatccgcgcggtccaaccgggagaaacctatacctacaagtggaacatcctggaattcgacgaacctactgagaatgacgcgcaatgcctcacgcgcccatactactcggatgtcgatatcatgcgggatattgcctcgggactgataggattgctcttgatttgtaagagcaggagcctcgatcgccgcgggatccagcgcgccgcagatattgagcagcaagccgtgttcgcagtgtttgacgagaacaagagctggtacctggaggataacatcaacaaattctgcgagaatcctgacgaagtgaagcgggacgatccaaagttctacgaatcaaacatcatgagcactatcaacggatacgtgccagagtcgatcacgacgctgggcttctgcttcgatgacactgtgcaatggcacttctgctcggtgggaacccaaaatgagatcctgactatccatttcactggtcatagcttcatctacgggaaaagacacgaagataccctcacccttttccctatgcggggagaatcagtcaccgttaccatggataacgtcggaacttggatgctgacttctatgaactcgtccccacgatccaagaagttgcgcctgaaattccgtgatgtcaagtgcatccctgacgacgatgaagattcctacgaaatcttcgagccgccggaaagcaccgttatggccacccggaaaatgcacgatcgcctggaacccgaggacgaagagtcggacgcagattacgattaccaaaaccggctcgccgcagcactcggaatccgctcatttagaaacagctcgctgaatcaggaagaagaggagtttaacctgaccgcgctggcgcttgagaacggtaccgagttcgtgtcctccaacaccgatatcatcgtcggcagcaattactcgagcccgtccaacatctcgaaattcactgtgaacaacttggcggaaccgcagaaagcgccgagtcatcagcaagccacgaccgctggctcgcccctccgccatctgatcggaaagaattccgttctgaactcgtcaaccgcggaacatagctcaccttattcagaggacccgattgaggacccgctgcagcctgacgtgaccggcatcagactcctgtcactgggggcaggcgaattcaagtcccaggaacacgcaaagcacaagggaccaaaagtggagcgcgaccaagccgcgaagcatagattctcctggatgaaactgctggcgcataaggtcgggcggcacctgtcgcaggatactggatccccatcgggaatgcgcccgtgggaagatttgccttcgcaggacaccggatccccgagccgcatgcgaccgtggaaagatccaccgtccgacttgctgctgctgaagcagtccaactcgtccaagatcctggttgggcgctggcacctggcctccgaaaagggatcctacgagattattcaggacaccgatgaggacactgcagtcaataactggctgatttcaccacagaatgcctctcgggcatggggcgaatccactcctctggccaataagccggggaaacagagcggacacccgaagtttccaagagtgcggcacaagtcgttgcaagtcagacaggacggaggcaagtcgcgcctgaagaaatcgcagttcctgatcaaaacccgaaagaagaaaaaggagaagcatactcaccatgcgcctcttagcccacggaccttccacccgctccggtcagaagcgtacaataccttctccgaacggcgcttgaagcattctctcgtcctgcacaaaagcaacgagacttccctcccgaccgacctgaaccagaccctgccatccatggactttggctggatagcctccttgccggatcacaatcaaaactccagcaacgacactggacaggccagctgccctccaggattgtaccagaccgtgccaccggaggagcactatcagaccttccctatccaggacccggaccagatgcactccacctcggacccctcccaccggtcctcctccccggaactttccgaaatgctggagtacgacaggtcccacaaatcattcccgacggatatctcccagatgtcgccttcatctgagcacgaggtgtggcagaccgtcatctcgcctgacctgtcccaagtgactctgtctcccgagctctcgcagactaatctcagtcctgacttgtcgcatactacgctctcgcccgaattgatccaacgcaacttgagtccggcactgggtcagatgcctatctccccagacctgtctcacaccactctgtcgcccgatctttcgcacaccactttgtcgctggacctgagccaaacgaacttgtcaccggaactctcccagaccaacctttcccccgccctcgggcagatgcccctgtcccctgacctgtcacataccaccctgtcccttgatttctcgcagacgaacctgtccccggaactgtcccatatgactctgtccccagagttgtcccagaccaatctcagcccggccttgggacaaatgcctatctctccggatctcagccataccactctgagcctggacttttctcagactaatctttcccctgagctgagccaaactaatctgtcaccggctctcggccaaatgccactgtcaccagaccccagccatactactctgagccttgatttgtcacaaaccaacttgtccccggagctgtcccaaaccaatctctcaccggatctgagcgaaatgccgctctttgcagatctcagccaaatccctctcacgccggacctggatcagatgaccctgtctccggatttgggtgaaactgacctttcgcctaactttgggcagatgtccctgtcaccggaccttagccaggtgactctcagcccggatatctccgataccactctcctgcccgaccttagtcaaataagcccgccgcccgatctggatcagattttctacccttccgaatcaagtcaatcgctcctgctccaggaattcaatgagagcttcccctacccagatcttggtcagatgccatccccgtccagcccgactctgaacgataccttcctgtcgaaagagttcaacccgctggtgattgtcggactctccaaggacggaactgattacattgagattatcccaaaggaggaagtgcagtcatcagaggatgactacgcggagatcgactacgtgccgtatgacgacccgtacaagaccgacgtgagaaccaatatcaactcatctcgcgatccggacaatatcgcagcttggtacctgcggtccaacaatggtaatcgcagaaactactacattgcggctgaagagatttcgtgggactactctgagtttgtgcagcgcgagactgatatcgaagattcggatgacatccccgaggacaccacttacaagaaagtggtgttcaggaaatacctcgactcgacgttcacgaagagagatccccgcggagaatatgaggagcatctgggcatcctcggacctatcatccgcgccgaagtggacgacgtaatccaagtgcgcttcaagaaccttgcctcccgcccgtactccctccacgcgcacggactctcgtacgaaaagagctcggagggaaagacgtacgaagatgactcccctgaatggttcaaggaggataatgctgtccagccaaattcctcctacacctacgtttggcatgcgaccgaacggtcaggacctgagtcacctggttccgcttgccgcgcatgggcctactactccgcagtcaatccggagaaggatattcacagcggcctgatcggaccactcctgatctgccagaagggaattttgcataaggatagcaacatgccgatggacatgcgggaatttgtactcctgtttatgactttcgacgaaaagaagtcctggtactacgagaagaagtccagatcctcttggcggctgaccagctcagagatgaaaaagtcacacgaattccacgcaatcaacggaatgatctattcgctgccggggttgaagatgtacgagcaggaatgggtgcgcctgcaccttctcaatatcggcggatcccaagacattcatgtggtccactttcacggccagactctcctggaaaacggcaacaagcaacaccagttgggggtctggccgctgcttcctggatcgttcaagactctggagatgaaggccagcaaaccaggctggtggctgctcaacactgaagttggagagaaccaacgcgcagggatgcaaacccctttcctgatcatggaccgcgactgccggatgccgatggggctctcaactggaatcatcagcgacagccagataaaggcctcggaattcctcgggtattgggagccacggctggccagactcaacaatggtggatcgtacaatgcctggtcggtggaaaaactcgcggccgaattcgcgagcaagccatggattcaagttgacatgcagaaagaagtcatcattacgggcatccagactcagggagctaagcattacctcaaaagctgctacaccaccgaattctacgttgcctactctagcaaccaaatcaattggcagatcttcaaaggtaattcgacgaggaacgtcatgtacttcaacgggaattccgatgcctccaccatcaaagagaaccagttcgaccccccgatcgtggcgcggtacattagaatcagccctacccgtgcatacaacaggccgaccctgaggctggagctccaaggatgtgaagtcaacggttgttcgacgccgttgggtatggaaaacggaaaaatcgagaacaaacagatcaccgcttcttcctttaagaaatcctggtggggcgactactgggagccgtttcgggcgagactgaatgcacaaggacgcgtgaacgcctggcaagcaaaagctaataacaacaaacagtggctggagatcgacctgctgaaaatcaaaaagatcactgccattatcacgcaggggtgcaagagcctttcgtcagaaatgtacgtgaagtcctacaccatacactactccgaacagggagtcgaatggaagccgtacaggctgaagtcgtcgatggtcgacaagatcttcgagggcaataccaacacgaaaggccacgtgaagaactttttcaatccacctatcatctcacgtttcatacgcgtgatccccaagacttggaaccagagcatcgcacttcgactggaacttttcggatgcgacatctac

SEQ ID NO: 9104 - DNA, 6672 bp, synthetic construct
  misc_feature 1..6672: note = source = /note="Description of Artificial Sequence: Synthetic coding sequence"
  source 1..6672: mol_type = other DNA
atgttccccgggtgcccgagactctgggtcctagtggtcttaggcacatcgtgggtggggtgggggagccaggggaccgaggcagcccagctgcggcagttctacgtggcagctcagggaatttcctggagctacaggcccgagccaaccaactcgtcactgaatttgagtgtgacaagttttaaaaagattgtgtaccgagagtacgagccctactttaaaaaagagaaacctcaatccaccataagtggactgcttggtcccactttgtatgcagaggtgggggacattatcaaggtccactttaagaataaggcagacaagcctctctccatacacccccagggtataagatactctaagttatcagagggcgccagttacttggaccacaccttccctgcggaaaagatggatgatgctgtggcccccggccgggaatacacctacgagtggtctattagcgaggacagcgggcctacacacgatgatcctccctgcttgacccacatctattactcccatgagaatctgatcgaagatttcaactccggtctcatcggccctctgttgatttgcaaaaaggggacccttactgaaggcggaacacagaagactttcgataaacagatcgtgctgctgttcgccgtctttgacgagtccaagagctggtcccagagcagttcgctcatgtatactgtcaacgggtacgttaacggtaccatgccagacattaccgtgtgtgctcacgatcatatttcgtggcatctgctcggcatgtccagtggacccgagctcttctcaattcatttcaatggccaggtgcttgagcagaaccatcataaggtgtccgcaattaccttggtaagtgctacgtctacaaccgccaacatgacggtggggccagaaggaaagtggataatcagcagcttaaccccaaaacacctacaagccggcatgcaggcgtacatagacatcaaaaactgccctaagaagactcggaatctgaagaaaattacgcgagaacagaggcgccatatgaagcgttgggaatactttatcgctgccgaggaagtaatctgggactacgcacccgtgattcctgctaatatggacaaaaagtaccggtctcagcatttagacaacttctcaaaccaaattggcaaacattataagaaggtgatgtatacacagtatgaagacgagagcttcacaaagcacactgtaaacccaaatatgaaggaggatggtatcctgggcccgatcatcagagctcaggtccgagacacccttaaaatcgtttttaaaaacatggcctcccgtccatatagtatctatccccatggggtaacatttagcccatacgaagatgaggtgaactcatcttttacttcaggacgcaataacaccatgatacgagccgtgcaacccggcgagacttatacctacaagtggaacattctggaatttgacgaacctacagagaacgacgcccagtgcctcacaaggccgtattacagcgatgtcgatatcatgagagacattgcatctggtttgattggcctcctcctgatctgtaagtctcggagtcttgaccggagaggtatccagcgtgcagcagatatcgaacagcaggccgtgttcgctgtcttcgatgaaaataaatcttggtatctagaggataacataaacaaattctgcgaaaaccccgacgaagtcaagcgtgatgaccccaaattctatgagagcaatatcatgtcaaccattaatgggtatgtaccagagagcatcacaaccctgggcttctgttttgacgatacggttcagtggcacttttgctcagtgggtactcaaaacgagatcctcactatccactttaccggtcacagctttatctatggtaagcgacacgaggatacgctgaccctgtttcctatgcgaggtgagagtgttacagttaccatggacaacgtaggaacgtggatgctgacgagtatgaattctagccccaggagcaagaaacttcggctgaagtttcgcgacgttaagtgcattccagacgatgatgaagactcatacgaaatctttgaaccaccagagagcacggtgatggctactaggaagatgcatgacaggctcgagccagaggacgaagaaagcgatgcagattacgattaccagaaccgcctggcggcggcgttagggatccgctcctttagaaacagtagtctgaatcaggaggaggaggagttcaacctcacagccctcgcactcgaaaatggcaccgagtttgtgagctctaatactgacattatagttggaagcaactacagctctccaagcaatatatctaaattcaccgtgaataacctggccgaaccccagaaagccccatctcaccaacaggcaacgaccgcaggtagccctctacggcacttgataggaaaaaactccgtgttgaatagtagtaccgcggaacactcgagcccctactctgaggaccctattgaagacccacttcaaccagatgttaccgggattaggctgctatcgctcggggcaggcgagtttaagtcccaggaacacgcaaagcataaaggcccaaaggttgaacgggaccaagctgctaaacacagattcagttggatgaagcttctagctcacaaggttgggagacacctgagtcaggacaccggctcaccttctgggatgcgtccttgggaagatctcccatcccaggacaccggatccccctctcgtatgagaccttggaaagatcccccctccgacctccttctactgaagcagagtaattcctccaagattctggtgggccgctggcacctcgctagcgaaaaaggttcgtatgaaatcatccaggatactgacgaggacacagcagtcaataattggctcattagtccacagaatgcatcccgtgcctggggagagtccacaccgttggcaaataagcctggaaaacagtcaggccacccaaaatttccccgagtgaggcacaaatctctgcaggtgcggcaggacggcggcaaatctagattgaaaaagagccagttcctaattaagacaaggaaaaagaaaaaggagaagcacacgcatcacgcgcctctttctccaaggacgttccacccccttcggtcagaggcctataatactttttccgagagacggttgaaacatagcttggtgctacataaatccaacgaaacaagtctgcccactgatttgaaccagacactgccttccatggacttcggctggattgcttctctgccagaccataatcagaatagctcaaacgatacaggacaggcttcttgtccacccggcctgtatcagaccgtcccacccgaggaacattaccagaccttccctattcaggatcccgatcagatgcactctactagtgacccatctcacagaagctcctcacctgagctcagtgaaatgctggagtacgaccgatctcataagagtttcccaacggacattagccaaatgagcccaagcagtgaacatgaggtgtggcaaaccgtcatcagtccggatttgtcgcaggtgaccctgtcccctgagctgtcgcagactaacttgagcccagatctgtctcataccaccttgtccccagaattgattcaacggaatctttcccctgccctcggacagatgccaatctctcccgacctgtcccacaccaccctgtctcctgacctgtcacacacgactctctcgctggacctttctcagacaaatctgtctcctgagctgtctcagaccaatcttagcccagcgttgggtcaaatgccacttagcccagacctgtctcataccacactaagcctcgactttagccagacaaacctatcccccgagctctctcacatgaccctctcccccgaattgagccaaacaaatttatctcccgcacttggccaaatgcccatctctcctgatttgtcgcatactacattgtccctagatttctctcagacaaacctgtccccagagctctcccagacgaacctgagcccagcccttggtcaaatgcctctgtctcccgatccaagccatacaacgctctcactcgacctatcccagaccaatctctctccagagctcagtcagacgaatctgagccctgacctgagcgaaatgcccctcttcgccgatctgtcacagatccccctcactccggatttggatcagatgacactcagtcctgacctgggcgagacagatttgagtcccaattttgggcagatgtctttgagcccagacttgagccaagttaccctgtcacccgatatctcggacactactctgctgccggatctatctcagatcagcccaccaccagatcttgatcagatcttttacccctccgagtcctcccagtccctcttgctgcaagagttcaacgagagctttccataccctgacctgggccagatgccctccccgtcctcgccaaccctcaatgacacctttttgtcgaaggaattcaacccactggtgattgtcgggctttccaaggacggaacagattatatcgagatcatcccaaaggaggaggtgcagtcatccgaggatgattacgccgagatagattacgtgccttatgacgatccctataagacagatgtgagaaccaatatcaactcttccagggatcccgacaacatcgctgcttggtatttgcgctctaataatggtaatagaagaaactattatattgccgcagaagaaatcagctgggattatagcgaattcgtgcagcgggaaaccgacattgaagatagtgacgacattccagaggacacaacatacaaaaaggttgtgttcagaaagtatctggactcaacttttaccaagagagacccccggggtgagtacgaggaacacctgggcatcctcggccccattattcgcgcggaggtggacgatgtgatccaggtgagatttaagaacctggcatctagaccgtattcgctgcacgcacatgggctgtcatacgaaaagtcttccgaaggaaaaacgtacgaagatgacagcccagagtggttcaaggaggacaatgctgtgcaacccaactctagttacacctacgtttggcacgctactgagcggtccggtcccgagtctcctggctctgcatgtagggcatgggcctattattccgctgtaaatccagaaaaagacattcattcaggcctgatcggcccgttactgatctgtcagaaaggaattctccacaaggacagtaacatgccaatggacatgagagaattcgtgttgctcttcatgaccttcgacgagaaaaagtcctggtattacgagaagaagagtcggtccagctggcgtctgacatcttcggaaatgaagaagagccacgagttccacgcaatcaacggtatgatttactccctgcctggtttgaagatgtacgagcaagagtgggtacggcttcacctgttgaacatagggggctctcaggatatacacgtggttcacttccatggacagaccctcttggagaacggtaacaaacagcaccagcttggcgtatggcccctgttgcctgggtcgtttaagacacttgaaatgaaagctagtaagcccggctggtggctgctgaatacggaggtgggggagaatcagcgtgccggaatgcaaacacctttcctaatcatggacagagattgtagaatgcctatggggttgagtacaggtatcatcagcgactcccagattaaagcttccgagttcttgggctactgggaacctagactggcacgactcaataatggaggatcctataacgcatggtcagtggagaaactcgccgctgaattcgcttctaagccgtggatacaagtcgacatgcagaaagaggtgatcatcacagggatacagacccagggcgccaaacattatctcaaatcatgctacacgaccgagttttacgtggcctactcgtcgaatcagataaattggcagatttttaagggcaactctacgcgcaacgtcatgtactttaatggtaattccgacgcgtccaccataaaagagaaccagttcgacccacccattgtcgcaaggtacatccggatctcaccgacacgggcctacaataggcctacactcagactggaattacagggctgcgaggtgaatgggtgtagtacccccctgggaatggagaacggaaaaatagaaaacaagcagattacagcgagctccttcaagaagagctggtggggcgactattgggagccattcagggcacggcttaatgcccaagggagggtgaacgcatggcaggcgaaggccaataataataagcaatggctggaaatcgacctgctgaaaatcaaaaagatcacagctatcatcactcaggggtgcaaatcactgtcgtccgagatgtatgtgaagagttacactatccactacagcgagcaaggagttgaatggaagccttataggctcaaatcatcaatggtcgataagatctttgaagggaacaccaacacaaaaggccatgtgaagaacttctttaacccccctatcatctctcgttttattagggtcatccccaaaacatggaaccagtccatagccctgcgtctggagcttttcggatgtgacatctac

SEQ ID NO: 9105 - DNA, 6672 bp, synthetic construct
  misc_feature 1..6672: note = source = /note="Description of Artificial Sequence: Synthetic coding sequence"
  source 1..6672: mol_type = other DNA
atgtttcctggctgcccgagactttgggtgctggttgttctgggcacgagctgggtgggctggggatcccaggggacagaagccgcccagctgagacagttttatgtggcagcccaggggataagctggtcttataggccggagcccactaatagttccctcaatctgtctgtgaccagcttcaaaaagatagtataccgagaatacgagccctatttcaagaaggaaaagccccagtccacgatctccgggctattaggacctactctgtacgctgaggtcggcgatatcatcaaagtccacttcaaaaataaggcggacaaacctttgtccattcatccccaagggataagatatagcaagttaagtgagggcgcgagctacctggaccatacctttcccgcggagaagatggatgatgcagtggcgcccggccgagaatatacttacgagtggtctatctccgaagactccgggcccacccacgatgatcccccctgcctgacacacatctattatagccatgaaaatctgatcgaggactttaactccgggctgatcggtcctctcctcatttgtaaaaagggtacacttaccgaagggggcacccagaaaaccttcgacaagcagattgtgttgctattcgccgtcttcgacgagagcaagtcttggtcgcaatcctcatccctgatgtacactgttaacggatacgtgaatggcacaatgccagatattacagtctgtgcacatgaccacatttcctggcacctgctcgggatgtctagtggccctgagctctttagcatccacttcaacggtcaggtgctagagcagaaccaccataaggtgtctgcgataactctagtgagcgcgacaagcaccacggcaaatatgaccgttgggcctgaaggcaagtggataataagttctttgacacctaaacatctgcaagcaggaatgcaggcttatattgatattaagaattgtccaaaaaagacaagaaatttgaaaaagatcacaagagagcagagacgtcatatgaagaggtgggagtattttatagcagcggaagaagtgatctgggattacgccccagtgatccctgctaatatggacaagaaatataggagccagcatctggacaacttctccaatcagatcggaaaacattacaagaaggtgatgtacacgcagtacgaagatgagtcattcactaagcataccgtgaatcccaatatgaaggaggacggaatcttaggtccgataatccgagcccaggtgagggacaccctaaagatcgtcttcaaaaacatggccagcaggccctacagtatttaccctcacggagtcaccttctcaccttacgaggacgaagtgaacagctccttcaccagcggtcgcaacaacaccatgatcagggcagtgcagcctggtgaaacctatacttataagtggaacatcttggagttcgacgaacctacagaaaacgacgcccagtgtctcactaggccatactattctgacgtagatattatgcgggacatcgcctccggcctgattggactcctcttaatctgtaagtcgcgatccctggaccgaagagggatccaacgagccgcagacatagagcagcaagctgtttttgctgtcttcgacgagaacaaaagttggtacctggaggacaacattaataaattctgtgagaaccccgatgaggtgaaaagagatgatccaaagttctacgagagtaacatcatgagcacaattaacggctacgtcccagagagcataactaccctcggattttgcttcgatgacaccgtgcagtggcacttttgttctgtaggcacccagaacgaaattctcacaattcacttcacaggccattcttttatctacggcaaaaggcacgaagataccctcactctgtttcctatgaggggagagagcgtaactgtcactatggataatgtgggaacatggatgctgaccagcatgaatagttcaccccgaagcaaaaagctgagactgaagttccgagatgttaagtgtatacccgatgacgacgaggacagttatgaaatctttgaaccaccagaatctacagtgatggccactaggaaaatgcacgatcggctggagcccgaagatgaggagagtgacgccgactatgattaccagaaccgactagccgccgccctgggtataaggtcgttccgtaacagctcgcttaatcaagaggaggaggaattcaatctcacagcattagcgctagaaaatgggaccgaattcgtctcgagcaatacagatatcatcgtcggtagcaactattcctccccctcaaacatctcaaaatttacggtgaacaatctagccgaacctcaaaaagccccctcacaccagcaagccaccacagcaggtagccctttaagacacctgattgggaagaattcagttctcaatagctcgaccgcagaacatagcagtccttatagtgaagatcccattgaggacccccttcagcctgacgtgacaggaatccgactactgtcccttggggcaggcgaatttaaatctcaggagcacgctaagcataaggggccaaaggtggagagagaccaggctgctaagcatcgattttcctggatgaaacttctagctcataaagtgggaagacacctttcccaggataccgggtccccctcaggtatgcgaccatgggaggatctgccatcccaagatacgggctcaccatccaggatgcgaccctggaaggaccctcccagtgatctgctactgcttaagcagtcaaattccagcaagatccttgtgggccgatggcatttggcctctgagaagggctcctacgaaatcatccaagacaccgatgaagacacagccgtgaacaactggctgataagtccacaaaatgcgagtcgggcctggggcgaatctactccacttgccaataagccaggaaagcagtccggccacccaaaatttccacgcgtgaggcacaagagtttgcaggtcaggcaagatggcgggaagtctcgactgaaaaagtcgcagttcctgattaaaacccgaaagaagaaaaaagaaaagcatactcaccatgcccctctatcaccacgaacgtttcatcctcttaggagtgaagcctacaacaccttctctgaaagacggttgaaacatagcctagtactgcacaagtcgaatgagacatcgctccccaccgatctcaatcagactcttccctcaatggatttcgggtggatcgcctctctgcccgaccacaatcagaacagttccaacgacacagggcaggcttcttgcccgcctgggctgtatcagacagtgcctccggaagaacactatcagacttttcccattcaggaccctgatcaaatgcatagcacgagtgacccatcacatcggtcgagtagtcccgagctatcagagatgctggaatacgatagatcccacaagtccttccccacagacatctctcagatgagtccatccagcgagcacgaggtatggcagaccgtcatctctccggatctgtcacaggtgacccttagccccgagctgtctcagaccaacctcagccctgatctgtcccacacgacactgtcccccgaattgatacagagaaacctaagtccagctctgggacagatgcctataagtcctgacctctctcacaccaccctgtccccagatttgagtcacaccacactgtctttggatttgagccagactaacctgtctcccgaactgtctcagacaaacctgtcgcccgcattggggcaaatgccattgtcccccgacctcagtcacacaacactgtccctggatttcagtcagacaaatctctccccagagctgagccacatgaccctctcacccgaactaagtcagaccaatttgtcccccgcacttggccagatgcctatttcccctgacctaagccacaccacactgtctctggatttttcacagaccaacctttcacccgagctgtcgcagacgaatctgtcacctgctctcggtcagatgccattgagtccggatccttctcacacaaccctgtctctcgatctgtcccaaacaaacttgtccccggagctatcacaaacgaatctgagccctgatttgtctgagatgccgctgttcgcagatctaagccagataccgctgacacctgatttggaccaaatgacgctctcccccgatttaggagaaacagacttgtcacctaattttggccaaatgtccttgagcccagacttgtcccaagtgaccctgagccccgacatcagtgacaccaccctgctgcccgacctgtctcagatttccccacccccagatctcgatcagattttctatcccagtgagagctcccaatctctgttgctgcaggagtttaatgagagtttcccatatcccgacctcgggcaaatgccatcccccagctctcccaccctcaatgacacattcctgtccaaggagtttaaccccctggtaattgtgggcctgtctaaggacggaaccgactatattgagattattccgaaagaagaggtccagagttccgaggacgactatgccgaaatcgattacgtcccatatgatgacccttacaagacagacgtgaggacaaatatcaatagctccagggaccccgataatatcgcggcttggtatctccgttctaacaatggaaacaggcggaattattacatcgccgccgaggagatcagctgggattacagcgagtttgtgcagcgagagactgatatcgaggatagtgatgatattccagaggatacaacgtataaaaaagtcgtattcaggaaatatctggatagcactttcaccaaacgggatcctcgaggggaatatgaggaacacctgggcattttggggcccatcataagggcggaagtagatgatgtgattcaagtccgatttaaaaatttggccagccgtccttattccctgcacgcacatggcctgtcctatgagaagtctagcgagggcaagacatacgaggatgacagccctgagtggtttaaggaggataacgccgtccagcctaattcctcctacacatacgtctggcatgcaacagagcgatcaggaccagagtctccaggtagtgcctgcagggcgtgggcttactattcagcggtgaatcccgagaaagacatccattctggactgattgggccactgcttatctgtcagaaaggtattctgcacaaagactcgaacatgccaatggatatgcgggagtttgtgctcttatttatgacctttgacgaaaaaaagtcttggtactatgagaaaaagtctcggtccagctggaggctgacatcttcagaaatgaagaaaagccacgaattccatgcaatcaacggcatgatatactccttgcctggtctgaagatgtacgagcaggaatgggtgcggcttcacctgcttaatatcggcgggagccaggacatacacgtagtgcattttcatggacagacactactcgaaaacggtaataagcagcaccaattaggggtgtggccactgctaccaggcagcttcaagaccctcgaaatgaaagccagcaagccggggtggtggctgctgaacacagaagtaggggaaaatcagagggccggaatgcagacgccttttcttatcatggatcgagattgccggatgcctatggggctgtccacagggataatttccgacagccagataaaggcctctgagtttctcggctactgggaacctcgtctagccaggctgaataacgggggatcctacaacgcttggagcgtagagaagctggctgccgagttcgccagtaaaccttggatccaggttgatatgcaaaaggaagtgatcatcacagggattcaaacgcagggagccaaacactatcttaaatcttgttacactacggagttttacgtggcgtactctagcaaccaaattaattggcaaatcttcaaagggaactctacccggaacgtgatgtactttaatggcaattccgatgcttctactataaaagagaaccagttcgacccaccgatcgtcgccagatatattaggatcagccccaccagagcctataaccgacccactctccgcctggagctgcagggctgcgaggtcaacggatgttcgacacccttgggcatggaaaacggcaagatcgaaaacaagcagatcaccgcatccagctttaagaagtcctggtggggagactattgggagcccttccgggcacggcttaacgcacagggcagggtcaatgcctggcaggccaaggctaacaacaataagcagtggctggagatagacctattgaagattaagaaaataaccgccatcatcactcaagggtgtaaatctctgagctcggagatgtatgtcaagtcttataccatccattattccgagcagggtgtcgagtggaagccctatcgtctgaaatcctcgatggttgataaaatattcgaagggaacacaaacacgaagggccatgtgaagaattttttcaaccctccgatcattagcaggttcatccgcgtgattcctaaaacctggaatcagagcatagccctcaggttagaactctttgggtgcgacatatac

SEQ ID NO: 9106 - DNA, 6672 bp, synthetic construct
  misc_feature 1..6672: note = source = /note="Description of Artificial Sequence: Synthetic coding sequence"
  source 1..6672: mol_type = other DNA
atgttcccaggctgccccagactctgggtgctagtggtgctgggcacgtcatgggtcgggtggggctctcagggcaccgaggctgcacagctgcgccagttttacgttgctgctcagggcattagttggagctatcggcccgagcccacaaacagctctctgaacctgagcgttacttctttcaaaaagatcgtgtaccgtgagtatgagccttattttaagaaggaaaagccacaaagtaccattagtgggttgcttggcccgacactatatgccgaagtcggagacattataaaggtgcatttcaaaaacaaggctgataaacccttgagtatccacccccagggcatccggtactcaaagctctctgaaggggccagttacttggaccacacttttcccgctgaaaagatggatgatgccgtagcgccagggagggaatacacatacgagtggagtattagtgaggactcagggccgactcacgatgatcccccctgtctgacacacatttactacagccacgagaatctcattgaagacttcaactctggtttgattggtccattgttgatttgtaagaaaggcaccttgaccgaaggaggaacacaaaagaccttcgacaaacagatcgtcctgctgttcgcagtgtttgatgagtccaaaagttggtcacagtcttctagtctgatgtataccgtcaatggatatgtcaacggaactatgcccgatataactgtgtgtgctcacgaccacatcagctggcaccttctcgggatgtctagtggccctgaactatttagcatccactttaacgggcaggtgctggaacagaatcaccacaaagtaagcgcgatcacactggtctccgctaccagtactacggccaatatgaccgtcgggcccgaggggaagtggataatctcctcactgactcctaagcacctgcaagccgggatgcaggcgtacatagacataaagaactgtcccaaaaagaccaggaacctaaagaagattacccgcgagcagagacgccacatgaagaggtgggaatacttcatcgccgccgaagaggtcatatgggactatgctccggtaattccggctaatatggataaaaagtaccgcagtcaacacttggacaacttttcgaaccagatcgggaaacactacaagaaggtgatgtacacacaatatgaagacgagtcttttactaagcacaccgtgaaccctaacatgaaggaggatggcattcttgggcctataatccgcgcccaggtgcgggacacgttaaagatcgtttttaaaaacatggcgtcaaggccttattccatctatccccatggggtgactttctctccttacgaggatgaggtgaactcatctttcactagcgggcggaacaatacaatgatccgcgctgttcagccaggagagacatacacatataaatggaatattctcgagttcgatgaacccacggaaaacgacgcccagtgcttgaccagaccttactatagcgatgtcgatatcatgcgagatatcgcaagtgggctcataggcctgttattaatctgtaagagcaggagtctggacaggaggggaatccagagagcggcagacatagaacagcaggcagtgtttgccgttttcgacgagaacaaaagttggtacctcgaggacaatatcaacaaattttgcgagaaccctgatgaagtgaagcgtgacgacccaaaattttatgagtcaaacatcatgtcaactatcaatgggtacgtccctgaatcaatcaccactttaggcttctgcttcgacgacacagtgcagtggcacttctgctcagtcggtactcagaacgaaatcttaaccatacattttacaggacattccttcatctacggcaaaaggcacgaagataccctcacccttttcccaatgcgtggggaatcagtgactgtcacaatggacaatgtgggaacttggatgctgacctctatgaactcctctccgcgttcaaagaaacttagactgaaattcagagacgtgaaatgcatccctgatgatgatgaggattcttacgagattttcgagcctccagagtctaccgtgatggccacgcgaaaaatgcacgacagactcgaacccgaggacgaggagagcgacgcagattacgattaccaaaatcgcctagcagcagccctaggcatcagaagcttcaggaacagctcactgaaccaagaagaagaggagtttaatctgaccgccctggcacttgaaaacgggacagagttcgtgtccagtaatacggatatcatcgtgggttcgaactattcctctccttcaaatatctccaagttcaccgtgaataatcttgccgagcctcagaaggccccatcgcaccagcaggccactacggctggatccccactgcgacacctgattggaaagaatagtgtgctcaactcttccaccgctgaacactcctcgccctactccgaagatcccatcgaggatccgttgcaaccagatgtaaccggcatacggctgctgtcactaggagccggggagtttaaaagccaggagcatgcaaagcacaagggcccaaaagtggagcgcgatcaggctgcaaaacaccggttctcatggatgaaattgctcgcacacaaagtaggacgtcatttgtcacaggacacaggatccccttctggaatgcgtccctgggaagatcttccaagccaggatacaggaagcccctctagaatgcggccatggaaagatcccccaagcgatctgctgctgcttaagcaatctaactcctccaaaatcctggttggccggtggcatttggccagtgagaagggatcatatgaaataatccaggacacagacgaggacactgctgtgaacaattggttgatcagtccccaaaacgcgagtagggcctggggagagagcacgccattggcgaataagcccgggaaacagtccggtcatccaaagtttccaagggtgaggcacaagtccctgcaggtccgccaggacgggggaaagagcagattgaagaaaagccagttcctgattaagacccgcaaaaaaaaaaaggagaaacatacccaccacgcacccctgagcccccgcacctttcaccccttaaggtcagaagcctataacactttctcagaacgcagattaaagcactccttagttctgcacaagtccaatgaaacaagcttacctaccgacctgaatcaaactttaccaagcatggattttggctggatcgcatccctgcccgatcacaatcagaattctagtaacgataccgggcaggctagctgcccccccgggctctaccagactgttccccctgaagagcactaccaaacatttccaatccaggaccctgaccagatgcactcaaccagcgacccgtcccatcgcagcagcagccctgaactgtccgagatgttagagtatgatcgttcgcataagtcattccccaccgatataagccagatgtctccaagcagtgaacatgaggtttggcagaccgttatctctccagatctttcccaggtcactctctctccggaattgtcccagaccaacctcagccccgatctctcccataccacactatccccagaactaatccagcgcaatttatcacctgccttgggccagatgcccatcagtccagatctgtcccacaccacattatcgcctgacctgagccacacaaccctgtctctcgatctgtcgcagaccaacctatccccagaactgagccaaactaaccttagccctgcgctcggacagatgcctctgtcccccgacttgtcgcataccactctgtctttagatttcagccagaccaatctgtcccccgagttgtcccatatgacactgagtccggagctgagccagacaaatctctctcctgcgctaggacagatgcctattagtcctgacctgtctcatactacactgagcttggacttcagccagacaaacctctcgcccgaattgtcacagactaatctgagccctgctctggggcaaatgcctctcagtcctgacccatcccacacaacactaagtctggacctgagccagaccaacctgtctcctgaactgagccaaaccaatctgtctcccgacctttcagaaatgcccctctttgcggatctctcacagataccactgacaccagacctggatcaaatgaccctatcccctgacctgggagagaccgatctgtccccaaacttcgggcagatgtctttatctcccgaccttagtcaggtaactctgtcaccggatatttcagacaccaccctgcttccagatctgtcccagatatcaccaccacccgaccttgaccagatcttctacccctcagagagcagccagtccttgctgctgcaggaattcaacgagagctttccttaccccgaccttggacagatgccgtccccgtcttctcccacactcaacgatacttttctctcgaaggaattcaatcccttagttattgtgggattgagcaaagacggtacagattacattgaaatcattcctaaggaggaggtgcagagttccgaagatgattacgcagagatcgactatgtgccctacgatgacccttacaagaccgatgtgagaaccaatatcaacagctctcgggatcctgataacattgccgcctggtacctccgatcgaacaacggcaatcgaaggaactattacatagcagcggaggagattagttgggattattcagaatttgtccagagggagactgacatagaagacagcgatgacatccctgaggatactacctataagaaagtcgtctttcgcaagtacctggactcaacctttaccaagcgggatccaaggggtgaatatgaagaacatctcggtattctagggcctatcatccgagctgaagtcgatgatgtgatccaagttcgtttcaagaacctggcgagcaggccctatagtttgcacgctcacgggttgtcctatgagaagagtagtgaagggaagacttacgaagatgattcacctgaatggtttaaagaggacaatgcagtgcagccaaactcctcctatacctatgtgtggcatgctacagagcgcagcggtcctgagagcccaggctctgcctgcagggcatgggcatattattccgccgtcaaccctgagaaggacattcactctggtctgatcggcccgctgctgatatgccagaagggaatcctccataaggactctaatatgccgatggacatgagggaattcgttctgttattcatgacttttgatgaaaagaagagctggtattacgagaaaaagagtcggtcctcttggaggttaacttcgtcggagatgaaaaaaagccacgagtttcatgccattaatggcatgatctacagcttacctggtctgaaaatgtatgaacaggagtgggtcagactgcatttactcaatatcgggggttctcaggacattcacgtcgttcacttccatggacagactttgcttgaaaatggcaacaaacaacatcagcttggcgtttggcctcttttgcccggttcctttaagacattagaaatgaaggcctcaaagccaggatggtggctgctgaacactgaggtgggagagaatcagagggccggcatgcagacccctttcttaattatggatcgcgactgccgcatgcccatgggtctgtccactggaatcatctctgattcccaaatcaaggcaagtgagttcctcggctattgggaaccaaggttggctcgactcaacaacggtggctcttacaatgcttggtccgtggaaaagctggcagcggaatttgcttcaaaaccctggatacaggtcgatatgcagaaagaggtgataattactggcattcagacccaaggagccaaacactacctgaagagttgttataccacggaattttacgttgcttattcaagtaatcagatcaattggcagatatttaagggcaacagcactcgaaatgtcatgtatttcaacgggaactcagacgctagcaccatcaaagagaatcagttcgaccccccaattgtggctagatacataaggatttcgcctacacgggcctacaacaggcccaccctgagactcgagctgcagggctgtgaggtcaatggctgttccactccgttagggatggagaacgggaagattgaaaataaacagattactgcgtctagttttaaaaaatcctggtggggcgattactgggagccttttcgagcccgactaaacgcccaggggcgtgtgaatgcatggcaggccaaggcaaacaacaataagcaatggctggagatcgacctgctcaagatcaaaaaaattacagctattatcactcaggggtgtaagtccctgtccagcgagatgtacgtgaaatcctatacgatccactattctgaacagggagtggaatggaagccataccgactgaagagctcgatggtggacaaaatttttgaggggaacactaacactaaggggcacgtgaaaaacttttttaatccgcccataatctcccggtttatcagggttatccccaagacctggaaccagtcaattgcgctgaggttggagctcttcggatgcgatatttat

SEQ ID NO: 9107 - DNA, 6672 bp, synthetic construct
  misc_feature 1..6672: note = source = /note="Description of Artificial Sequence: Synthetic coding sequence"
  source 1..6672: mol_type = other DNA
atgttccccggatgccccagactgtgggtgctggtcgtcctgggcacttcctgggtaggctgggggagccagggaaccgaagccgctcagctgaggcagttttatgtggcagcccaaggcatttcatggtcctaccggcccgaacccaccaattccagcctgaacctgtcagtaacatctttcaagaagatcgtgtacagagaatacgagccatatttcaagaaagagaagccgcaaagtaccattagtggccttcttgggcctactttgtacgctgaggtgggtgatataataaaggtccacttcaagaacaaggccgacaagcccctgagcatccacccccaggggattaggtactctaagctgtccgagggcgcgtcttacctggaccacacattccccgctgaaaagatggatgacgctgtggccccaggcagggagtacacctacgaatggagtatctcagaagactcaggcccaacccatgatgaccccccatgcctgacccacatatactattcccacgagaatctgatagaggatttcaacagcggacttatcggcccactgctcatctgcaaaaagggcacactcaccgagggggggacccagaagaccttcgacaaacagatagttctgctcttcgccgtgtttgacgagtcaaagtcctggagccaaagcagttccctgatgtatacggtcaacggatacgtcaacggcaccatgccggacataacagtttgtgctcacgaccatatctcttggcacctgctcggcatgtcttccgggccggagctgtttagtatccatttcaatgggcaggtgctcgagcagaatcatcacaaggtttcagctataactttggtctctgctactagcacaacggccaacatgaccgtaggtcccgaaggcaagtggatcataagcagcctgaccccgaagcatcttcaagccgggatgcaagcatacatcgacattaagaactgcccgaaaaaaactcgcaacctgaagaagattacccgcgaacaacgacgacatatgaagcgctgggagtacttcatcgctgccgaagaggtgatctgggactatgctcccgtgatacccgctaacatggataagaaatacaggtcccagcatctggacaacttttccaatcagatcggcaagcattataaaaaggttatgtatacccagtacgaggacgaaagcttcaccaagcacacagttaaccctaatatgaaggaagatggaatcttgggccccataatccgcgcccaggtgcgcgacacacttaaaattgtattcaaaaatatggcttctagaccttattctatatacccgcatggagttactttttctccctacgaggacgaggtcaattctagttttacatcaggtcgcaataacactatgatccgggccgtacagccaggcgagacctacacatacaaatggaacatccttgagttcgacgaaccgaccgagaacgacgctcagtgcctgacaaggccatattactctgacgtcgacatcatgcgcgacatcgcatccgggctgattggactcctgctcatatgtaagtcaagaagcctggacagaagaggaatccagcgagccgccgacattgagcaacaggcggttttcgctgtgtttgatgaaaacaagtcctggtacctggaggataacatcaacaagttttgtgagaatcctgacgaggtaaagagggatgatccaaaattttatgagagtaacattatgtcaacaattaatggttatgttccagagtccataaccaccctgggtttctgtttcgacgatacagtccaatggcatttttgcagcgtgggcacccagaacgaaatcctcacaatacactttacgggccactctttcatctacggtaaacgacacgaggatacgctgacactttttccaatgcgcggcgaatctgtgacggtcacaatggacaacgtaggaacgtggatgctgacctccatgaactcctcaccacggtcaaagaagctgagactcaaatttagggacgtgaagtgcatccccgatgacgacgaggattcatacgagatcttcgaacctccggagagtaccgttatggccacccgaaaaatgcacgaccggctcgaacccgaggacgaggaatcagatgccgactatgattaccagaatagacttgctgcggctctgggaatccgatccttccggaactcaagcctgaatcaggaagaggaggaatttaacctgacagctctcgcactggaaaacggcaccgagttcgtgtctagtaatacagacatcatagtaggtagcaactatagttctccctccaacatttcaaaattcactgtaaacaatttggctgagcctcagaaggctccatctcaccaacaagctacaactgccggttccccattgaggcatcttatagggaaaaacagtgtgctgaatagctccaccgctgaacattccagcccttatagtgaggatcctatcgaagatccactccaacccgacgtgacaggcattcgactgctctctctgggtgctggcgagtttaagagccaggaacacgccaagcacaaaggacccaaggtggagagagatcaggccgcaaaacatcggttctcttggatgaaactgctcgcccacaaggtcggcaggcacctctctcaagatacagggagcccatccggtatgaggccatgggaagatctgccctcacaggacactgggtctccctcccggatgcgcccctggaaagacccaccatctgacttgctcctgttgaaacagtccaattcctccaaaattctggtcggaagatggcacctcgcctccgaaaaagggtcctacgaaatcatccaggatacagacgaagatacagcagtgaacaactggcttatctctccacagaatgccagcagggcttggggggagagtacgcctttggccaacaaaccaggcaagcagtccggtcacccaaaattccctcgagtgcggcataagagcctgcaggtgcgccaggacggcggaaaaagcagactgaagaaatcacagttcctgatcaagactcgaaaaaaaaagaaggaaaagcatacccaccatgcacccctgtcaccccgcacttttcatccactgcgctccgaagcctacaatactttttctgaacgaaggctgaaacatagcctggtgctccacaagtcaaatgagactagcctgcctacggacctcaatcagacactgcccagtatggactttggatggattgccagtttgcctgaccacaatcagaacagcagtaatgacacagggcaagcctcctgtcccccaggcctgtaccaaaccgtcccccctgaagagcactaccagacatttccaatccaggatccagaccagatgcattcaacgagtgacccaagccaccgctcttcatcccccgagttgagcgaaatgctggagtatgataggagtcataagtcattccccactgacatcagtcagatgtctccctccagcgagcacgaggtgtggcagaccgttataagtcccgatctcagtcaggtgacactgagtcccgaactcagccagaccaacttgtctcccgacctcagtcacaccaccctgagcccagaattgatccaacgcaatctttcacccgcactgggtcagatgcctatctctcccgatctgagtcacactacactcagccccgatctgtcccataccactctgagtctggaccttagtcaaactaaccttagcccagagctctcccaaacaaacctgtctcccgcccttggccagatgcccctcagccctgatctgtcccacacaactctgagtctggactttagccagacgaacctcagtcccgagctgagccatatgacgttgtctcctgaactcagtcagacaaacctgtctccagctcttggccagatgccaataagccccgatctgagccacactaccttgtcactggacttttcacagacaaacctgagcccagaactgagccaaacaaacctgtcccccgccttgggccagatgcctctcagcccagatccatcccacacgactctttctctcgacctgtcccagacgaacttgagccccgagctctctcagactaatctgagtccggatctgagtgagatgcccctgtttgcggacttgtctcagatcccgttgacccccgacttggaccagatgacgcttagcccggacctgggagagaccgacctgtcaccaaacttcggacagatgtccctgtcccctgacctcagtcaggtcaccttgagcccagatatctccgacaccacactgctgccagatcttagccagatatctcccccccccgatctggatcagatcttctacccttcagagtcctcccagtccctgcttctgcaggaattcaacgaaagcttcccctatccagacctgggtcagatgccatcccccagcagccctacactgaacgatacgttcctgtcaaaagagtttaacccgctggtgatcgtcggcctgagtaaggacggtaccgactacatcgagatcatccctaaggaggaggttcagtcaagcgaggacgactacgcggaaatcgattacgttccctacgatgacccttacaagacagacgtgcgcaccaacatcaacagctccagggatcctgacaatatcgctgcctggtacctgagaagcaacaacggcaatcggcgcaactactatatcgcagccgaggagatcagctgggactacagcgagttcgtccagcgcgagacggatatcgaggatagcgatgatatcccagaagacaccacctataaaaaggtggtattcagaaagtatctggactcaacgttcactaagagagatcctagaggagaatatgaagaacatctcgggatactcggccccatcatcagagccgaggtagacgacgtgattcaggtacgattcaagaacctggccagccgaccctactctctgcatgcacacggcctttcttacgagaagtcttctgagggcaaaacatacgaggacgattctcccgagtggttcaaagaagacaatgcggtccagcccaacagctcctatacatatgtgtggcacgcaacagagaggagtgggccggagtcccctggctcagcctgtagagcgtgggcatactattcagctgtgaatcccgaaaaggatattcattctggcctcatcgggcccttgctcatctgccagaaggggatcctgcacaaggattccaacatgcccatggacatgcgggagttcgtccttctgttcatgacgtttgatgagaagaagtcttggtattacgaaaagaaatctcgctcttcctggcggctgacgagtagcgagatgaagaagagccatgaatttcacgccatcaatggtatgatctactccctgccggggctgaaaatgtatgagcaggagtgggtgcgactgcacctgctgaacatcggtggaagtcaggacattcacgtggttcactttcacggacagactctccttgaaaacgggaacaaacaacaccaactgggcgtgtggccactgctgcctgggagcttcaaaacgctggagatgaaggccagcaagcccggttggtggcttctgaatactgaagtgggcgaaaaccagagggctgggatgcaaacacctttcttgatcatggacagagactgcaggatgcctatgggtctcagcacggggattatcagtgactctcagattaaagcaagcgagtttttggggtattgggaacctcggttggcccgcctgaataacggaggctcttacaatgcctggtctgtggaaaagctggccgccgagtttgcttcaaaaccttggatacaggtggatatgcagaaagaggtaatcatcacggggatccagacacagggcgctaaacattacctcaagagctgctatactaccgaattttacgtggcgtactcatctaaccaaattaactggcagatatttaagggcaattctacaaggaacgtcatgtatttcaatggaaacagcgatgcctctactatcaaggaaaatcagtttgatccccctatcgtcgcacggtatatcaggatttctccgaccagggcttacaaccgcccaaccctgaggctcgaactgcaaggatgcgaagtcaatggctgtagcactcctctcggcatggagaacggcaaaatcgaaaacaagcaaataacagctagtagcttcaagaagagttggtggggtgattattgggaaccctttcgggcgaggctgaacgcccagggcagggtgaacgcttggcaagccaaggctaataataataaacaatggctcgaaattgatcttctgaaaatcaagaaaattactgccatcatcactcagggttgtaagtccttgagttccgagatgtatgtgaagagctatacgatacactacagcgaacagggggtggaatggaaaccatataggctgaaatcttccatggtggacaagattttcgagggcaacacaaatacgaaaggacatgtgaaaaatttcttcaacccccccattattagcagattcatcagggtgattccaaagacctggaaccagtctatagctctgaggctggagttgttcggttgtgacatctac

SEQ ID NO: 9108 - DNA, 6672 bp, synthetic construct
  misc_feature 1..6672: note = source = /note="Description of Artificial Sequence: Synthetic coding sequence"
  source 1..6672: mol_type = other DNA
atgtttcccggatgcccacgattatgggtactagtggtccttggaactagctgggttgggtggggctcccagggcaccgaggccgcacaacttagacagttctacgttgccgcccagggcatatcatggagttaccgtccagagcctacgaatagttccttaaatctgagcgtcactagcttcaagaagattgtctaccgagaatacgagccttacttcaagaaggaaaagccacaatcaaccatctctgggttgctgggcccaacactgtacgccgaggtgggagacatcataaaggttcatttcaagaacaaagcggataaaccacttagtatccacccgcagggaatcagatacagcaaattgtccgagggggcctcttacctggaccacacctttcccgccgagaaaatggacgacgccgtcgcgcccggacgggaatacacttacgagtggtccataagcgaggattctgggcccacacatgacgatcctccatgtctcacacacatctactactcccacgagaacctgatcgaagacttcaattcaggcctgattgggcccctacttatttgtaagaaaggcactctcaccgaggggggaactcagaagaccttcgacaaacagattgtcttgctgtttgcagtctttgacgaaagcaaaagctggagccaaagttccagtctgatgtataccgtcaacggctatgtcaacggcacaatgcccgatataactgtgtgtgctcacgatcacatcagctggcatttgctgggcatgtctagcggacccgagctgttttccatccactttaatggtcaggtgctggagcagaaccaccataaggtgtcggctatcacactggtgtctgctacctccacaactgcaaatatgaccgtggggcctgaagggaagtggattatctcatcactcactcccaagcatctgcaggctggaatgcaggcctatattgacatcaaaaattgtccaaagaaaactcggaatctaaaaaaaatcaccagagagcaaaggcgccacatgaagagatgggagtattttatcgcggccgaagaagtgatctgggactacgccccggtcatccctgcgaacatggacaagaagtatcgaagtcagcatttagacaatttctccaaccagattggcaagcactacaaaaaagtaatgtatacgcagtacgaagatgaatcattcaccaagcatactgtgaatccaaacatgaaggaagacggaatcttgggacccatcatacgggcacaagtgcgcgatacccttaaaattgtctttaagaatatggcctccagaccatacagcatttacccccatggggtgacctttagcccatacgaagatgaggtaaactcttcattcacctcaggaagaaataacacaatgatccgcgccgtccaaccaggcgagacctacacttataaatggaacatcttagagtttgatgaacctactgagaacgacgcccagtgtctgacgaggccatattatagcgatgtggacatcatgagggatattgcgagtggattgataggactccttctgatttgtaagtctaggtcccttgatagaagaggcattcagcgagctgccgacattgaacagcaggcggtatttgcagtcttcgacgaaaataaaagctggtatcttgaggataacataaataagttttgtgagaatcccgatgaagtaaagcgcgacgaccccaaattttatgagtcaaatataatgagtactatcaacgggtacgtgccggagtcgataacaaccttgggcttctgtttcgacgacacagtgcagtggcacttctgcagcgtaggaacccaaaacgagattctgaccattcacttcaccggacatagcttcatatacggaaagcggcatgaagacaccctgactctttttcccatgagaggtgagagcgtgaccgtcacaatggacaacgtgggaacatggatgctgacatccatgaacagtagccccagaagtaaaaagctgcgacttaagtttcgcgatgtaaagtgtatacctgacgacgatgaagattcatacgagatcttcgagccccccgagtctaccgtcatggccacaagaaagatgcacgacagactagagcccgaggacgaagagtcagatgccgattacgactaccagaaccgcctggccgctgctctggggattcggtccttcagaaattcttcacttaaccaagaggaggaggagttcaaccttaccgcccttgcattagaaaacggaaccgagtttgtgagcagtaataccgatatcatcgtcgggtccaactactcctctccaagcaacatcagtaagttcactgtaaacaacctcgccgagccgcagaaggccccgagccaccagcaggcaaccaccgccggcagcccgcttcgacatctcataggcaaaaactctgtccttaattcaagtactgcagagcattcttccccttattccgaggaccctatcgaggaccctctgcagcccgatgtcacgggcatcaggctgctctccctcggcgcaggcgaattcaaaagccaagaacacgccaagcataaaggacctaaggtggaaagagaccaggccgcaaaacaccgattctcctggatgaagctcctggcccacaaagttggtcgtcacctgtctcaggatacgggaagccccagtgggatgcggccatgggaagacctccccagccaggacacagggagtcctagtcgcatgcggccatggaaggatcccccctctgacctcttgctgcttaaacagtctaatagttcgaaaatcctggtaggtcgatggcatttggcctcggagaaaggaagctatgagatcatccaagatacagatgaagacacagctgttaataactggctcatcagtccccagaatgcttccagagcctggggcgagtcaaccccactggccaacaaacctggtaagcagagcgggcatcccaagtttcccagggtgcgtcataagtctctccaggttcgccaggatggtggcaagagcaggctgaagaagtcccagtttcttatcaagaccaggaaaaaaaagaaggagaagcacacccatcacgcccccctgtctcctagaacattccatcctctccgtagcgaagcttacaacacgttttctgagcggcgcctgaaacacagtttggtcctccacaaatccaatgagaccagtttgccaaccgatttgaatcaaaccctgccctccatggatttcggctggatagctagtctgccggaccacaatcagaatagttcaaacgacacgggccaggcatcttgcccccccggtctgtaccagactgtgcctcccgaagagcattaccaaacctttcctatccaggatcccgatcagatgcactcgaccagcgaccccagccacaggtcctccagtccagaactcagtgagatgctggagtatgaccggagtcacaagagctttcccacagatatttcgcagatgtccccttcttccgaacacgaggtctggcagacggtcatttcacctgatttgagccaggtgaccttgagtccagaactctcccaaaccaacttatccccagacctctcacatacaaccctgtcaccggagcttattcagcggaatttgtcccccgctctgggccagatgcctatttcacctgacctgagccacacgaccctgtccccagacctgtcccacacaacccttagcctggacttgtcacaaacaaacttatctccagagctcagtcagactaatctatccccagccctcggacaaatgccattgagccctgacctctcacacactaccctgtctctggacttctcccagacgaacttatccccggaattgtcgcacatgacattgtcaccagagctgtcgcagacgaacttgagtcccgccctaggacaaatgcccatatcccccgatctgagccataccactttatctctggacttctctcagactaacctgagccccgagctctcacaaacgaacctgagcccagcgctggggcagatgcctcttagcccggaccctagccacaccacactttccctggatctttcacagactaatttgtcgccggagctgtcacagactaacctctcccctgacctgtctgagatgccactgtttgcagacctttctcagatccctctgacccccgatttggaccaaatgactctgtctcccgaccttggtgagaccgacttgtctccaaatttcggccagatgagcctatctcctgatctgtcccaggtcaccctgtccccagacataagcgacacaaccctgttgccagatctgtcccaaataagccccccgccagatctggaccagatcttttatccaagtgagtcttctcagagcctactgcttcaggaattcaacgagagctttccctacccggatcttggccagatgccttcccccagttctccgacattgaacgacaccttcctgagcaaggaattcaacccccttgtgatcgtagggttgtccaaggatggcacagattatatcgagattattcccaaggaggaagtccaatcttccgaagatgactacgccgagattgattacgtcccatatgacgatccatacaagaccgacgtacggactaacattaattcctcacgggatcctgacaatattgctgcctggtatctgcgctctaataacggcaatcgcaggaattattacatcgctgccgaagagatcagctgggattatagtgaatttgtgcaaagggagacagatattgaggactccgacgacattcccgaagacacaacctacaaaaaagtagtatttcgcaaatatctggactccacttttacaaaacgggatcccagaggcgagtacgaagagcacttgggcatcctcggccccatcattcgggcagaagtcgacgacgtaatccaggttcggtttaagaacctggcctccaggccgtactccctgcatgcccacgggctgtcctatgagaagtcgtctgaagggaagacctacgaggacgattcaccagaatggtttaaggaagacaacgccgtccaaccaaacagctcttacacgtatgtgtggcatgccacagagaggagtggtcccgaatcacctggctctgcttgccgtgcctgggcttactacagtgctgtcaatcctgaaaaagacattcacagcggtctgattggtccgctgctcatatgccagaaggggatcctgcacaaggattctaacatgcctatggatatgcgcgaatttgtactcctctttatgacctttgatgagaaaaagtcttggtactacgagaaaaagtccaggagttcttggcgtctgacaagcagtgagatgaagaagtcccatgagttccatgctattaacggtatgatttattcccttcccggcctgaaaatgtacgagcaggaatgggtgcggttacatcttcttaacatcggtggttcccaggatattcacgttgttcactttcacggccagactttgctagagaatggcaacaaacagcatcagctgggtgtatggcccttgttacccggctcattcaaaacattagaaatgaaagccagcaaacctggctggtggctgttaaataccgaggttggcgaaaatcagagagctggcatgcagacaccttttctgataatggatcgtgattgtagaatgccgatgggcttgtccaccggaataattagtgactctcagattaaagccagcgagttcttggggtattgggaacctcggctcgcccgtttgaacaatgggggctcttacaatgcatggagcgtggagaaacttgccgctgaattcgcctccaagccttggattcaggtggatatgcagaaggaggtgattattacgggtatccagacccagggcgctaagcactacctaaaaagttgttatactactgagttttacgtcgcctactctagcaatcagatcaattggcagattttcaaagggaactctacgcgcaatgtgatgtattttaatggtaacagcgacgcttccaccattaaagaaaaccagtttgatccccctattgtcgcccgctacataagaataagccctacgcgtgcgtataaccgccccaccctgcgcctggaattacaggggtgtgaagttaatggatgttctacacccttgggcatggagaatggaaagatcgaaaacaagcagattaccgccagtagtttcaaaaagagctggtggggcgactactgggagcccttccgcgccaggcttaacgcccagggccgggtgaatgcttggcaggcaaaagcaaataacaacaagcagtggctggagatcgatctgctgaaaattaagaaaatcaccgcgattattactcagggatgcaagtctttgtcaagtgagatgtacgttaaatcttacaccatccattactccgaacagggtgttgagtggaagccctataggttaaagagctctatggtggacaaaatctttgagggaaacaccaatacaaaggggcacgtcaagaacttctttaatcctcctattatcagtcggtttatccgggttatcccaaaaacctggaaccagtctatcgccctaagactggagttattcgggtgtgacatctac

SEQ ID NO: 9109 - DNA, 6672 bp, synthetic construct
  misc_feature 1..6672: note = source = /note="Description of Artificial Sequence: Synthetic coding sequence"
  source 1..6672: mol_type = other DNA
atgtttccgggttgtccaagactttgggttctggtggtcctgggcacctcatgggttggttggggttcacagggaaccgaagcggcccagctccgacagttttacgtggcagcccaaggtatttcctggagctaccgtccagaaccaaccaatagctctttgaacttgagcgtgaccagcttcaagaagattgtctaccgtgaatacgaaccctattttaaaaaagagaagccgcagagcaccatttccggactgctcggtcccacgctctacgcagaggtgggcgacatcataaaagtccacttcaagaacaaagccgacaaacccttgagcattcatccacaaggaatccgctacagcaagctaagcgagggggccagctatctggaccatacgttcccggccgaaaaaatggacgacgctgtggctccaggccgcgaatacacctacgagtggtctatctcagaagattctggtcctacccacgatgacccgccatgcctgactcacatatattatagccatgagaatctgatcgaggatttcaacagcggtctgatcggcccgctgctgatctgcaaaaaaggtacactgacagagggcggcacccagaagacgtttgacaaacagatcgtcctgctgttcgccgtcttcgatgagtctaagagctggtcccagagcagctccctgatgtataccgtgaatggatacgtcaacggaacaatgcccgatatcacggtctgcgctcacgaccacatcagctggcacctcctcgggatgagcagcggccccgaacttttctctatccattttaatggccaggtcctagagcagaatcaccacaaagtgtcagccatcacgctggtgtctgccacttctactactgccaacatgacggtgggtcctgagggtaagtggattatcagctcgctgacgccgaaacatctgcaggcgggaatgcaggcgtacatagacattaagaattgtccaaaaaagacgcgaaatttgaaaaaaattaccagggagcagcgcagacacatgaaacgctgggaatacttcattgcagctgaggaggtgatatgggattatgcccctgtcatccctgctaatatggataagaagtatcggtcccagcacctggataatttctcaaatcagatcggtaaacactacaaaaaggtcatgtatacgcagtatgaagacgaatcctttaccaagcatactgtcaatccgaatatgaaagaggatgggatcctgggtccaatcatccgagcccaggtccgcgacacgttgaagatcgtctttaagaacatggctagccgcccatatagcatctacccgcacggcgtgacattctccccgtacgaggacgaggttaacagctcgttcacttcaggtcgcaataataccatgatcagagcggtgcagccgggcgaaacctacacgtataaatggaacattttggaatttgacgaaccgacagagaacgacgctcagtgtctgacccgcccgtactacagcgatgtcgatatcatgcgcgacatcgctagcggcctcatcggtctgctgcttatctgcaaaagccgcagtctagatcgccgaggcatccaacgggcggctgatatcgagcagcaggcagtgtttgccgttttcgacgaaaacaaatcttggtacctcgaggataacattaacaaattttgcgagaatccggatgaggtcaaaagggatgatccgaagttctatgaaagtaacataatgagcactatcaatggatatgttcctgaaagcattaccacactcgggttctgtttcgacgataccgttcaatggcacttttgcagcgttggtacgcagaatgaaatcctgaccatccactttacgggacacagctttatctacggtaaacggcatgaggatactttgactttgttcccgatgcgtggagagtctgtgactgtaaccatggataacgtcgggacctggatgctgacctcgatgaattcctctccgcgcagcaagaaactgagattgaagttccgcgacgtgaaatgcatcccggacgacgatgaggattcttatgagattttcgagccgccggagagcactgtgatggccacccgtaagatgcatgatcgcctggagccggaggacgaggaatcagatgcggactacgattaccaaaatcggctggctgcggccctgggcatccgcagctttcgcaacagctcgctgaatcaagaggaagaggagttcaacctgaccgcgttggcattggaaaatggcaccgaattcgtttctagcaacacggatatcattgtaggctccaactacagctctccatccaatatcagcaagttcaccgtaaataatctggcggaaccacaaaaggcgccatcccatcagcaggcgaccaccgccggctcgccactgcgacacttgattggcaaaaacagcgtgctgaacagcagcacggccgagcactcttcgccctacagtgaggatcctatcgaagaccctttgcaaccggatgtcaccggcatccgtctgctgagcctgggtgcaggcgagtttaaatcgcaggaacatgcaaaacataaaggtccgaaagtggaacgggatcaggccgccaaacaccgattctcttggatgaaactgctggcccataaggtcggccgccacctctctcaggacacgggctcgccgtccggcatgcgcccttgggaggatttgccttctcaggacaccgggtcacctagccgcatgcgaccgtggaaagaccctccgagcgatctgctactgttgaaacagagcaacagctctaaaatcctggtgggtcgctggcacttggcgagcgagaagggcagctatgaaatcattcaggacacggatgaagacactgctgtcaacaactggctgattagcccgcagaatgcttcaagggcatggggcgagtctacccctctggccaacaaaccaggtaaacaatccgggcatcctaagtttccacgggtgaggcacaagtccctgcaggtgcgccaggacggaggcaagtcccgcttaaaaaagagtcagtttttgatcaagacaagaaagaagaagaaggagaaacatacgcaccatgcacctctgagccctaggactttccacccattgcgcagcgaggcctacaataccttcagcgagcgccgtttgaagcactctctggtactgcataaatcaaacgaaactagcctgccgacggatctgaatcaaacgttgccaagcatggattttgggtggatagcgagtctgcccgatcacaaccagaacagctccaacgacacaggccaggcgtcctgtccgccgggtctgtaccagaccgttccgcccgaggaacactaccagaccttccctatccaagatccggaccagatgcactcgacaagcgacccaagccacaggtctagcagcccagagttgtccgaaatgttagagtatgatcgctcgcacaagagcttcccgaccgacatctctcagatgtctcctagttcagaacatgaggtatggcagactgtgatcagcccagacctctcccaagtgacgctgagtcccgaactgtcccagacaaatctgtccccagacttatcccacaccaccctgagtccggaattaattcaacgcaacctttcgccagcgctgggccagatgccgatcagcccggatctttcccacacaaccctttcgccagatctcagccacacaactctgagtctggatctcagccagacgaatctgagcccagagctctcacagaccaacttgagtccggctttgggtcagatgccactcagccctgatctttctcacaccactctgagcctggattttagtcagacgaatctgagcccagagctttcacatatgacactgagtcctgagctttcacagactaacctgagccccgccctgggacagatgccaatcagtcctgacctgagccacaccaccctgagcctggatttctcgcagactaacctgtcccctgagcttagccagactaatctgtcccctgccttggggcagatgcctctgtccccagacccaagccacaccaccctgagcctggatttgtcccagaccaatttaagccctgaactgagccagaccaacttgtcgccggacttgagtgagatgccgctgttcgctgatctgagccagattccgttgacccctgacttggatcagatgaccttgtccccagatctgggtgagaccgatctgagccctaattttggtcagatgtccctgagcccagatctgtctcaggtgaccttgtccccagacattagtgacaccaccctcctgccggatctgagccagattagtcctcctcctgacctagatcagattttctatccgtccgagagcagtcaaagcctgctgctgcaggaattcaacgagtctttcccatatcctgacttaggtcaaatgcctagcccctccagccctacccttaacgatacctttctgagcaaagaatttaatccgctggtcatcgttgggctgagcaaggatggcaccgattacattgaaatcattcctaaagaagaggttcagagctcagaggacgactacgcagagatcgactacgtcccttacgatgatccgtacaagaccgatgttcgcaccaacatcaatagctcccgagaccctgacaatattgcggcctggtatttgcgcagcaataacgggaatcgcagaaactattatatcgccgctgaagagattagttgggactactcggagttcgtgcagcgtgaaaccgacatcgaagactccgacgacattcccgaggacaccacttacaagaaagtggtctttcgaaaatacctggattctactttcacaaagcgagatccacgaggcgagtatgaagaacacctgggcatcctgggccctatcatccgcgcggaggtggacgacgtgattcaggttcggtttaaaaatctagctagccgaccgtatagcctgcacgctcatggtctgtcatatgagaagtcttctgagggtaagacctacgaggacgacagcccggaatggttcaaggaggataatgccgtacagccgaactctagctatacctacgtctggcacgctaccgaacgcagcggcccggagtctcccgggagtgcatgccgtgcgtgggcctactactctgcggttaaccccgaaaaggacatccattctggcttgattggcccactgctgatctgtcagaagggtattcttcacaaagatagcaatatgcctatggacatgcgcgagtttgttctgttgtttatgacgttcgatgaaaaaaagagctggtactatgaaaagaaatcccgcagctcctggcgattaacttccagcgagatgaaaaaatcccacgagttccacgctattaatgggatgatttattcattaccagggctgaagatgtatgagcaagagtgggttcgcctgcatcttctgaacatcgggggctctcaggatattcatgtggtacacttccacggtcagaccctgttggagaacgggaacaaacagcatcagctgggtgtatggccgctgctgcctggtagcttcaagaccttggagatgaaggcctcgaaaccaggttggtggctgttgaacactgaagtcggcgagaaccagcgtgccggtatgcagacccccttcctgatcatggacagagactgccgcatgccgatgggtctgtccacgggtatcatcagcgacagccaaattaaggccagcgagtttctggggtattgggagccccgcttggcgcgcctgaataatggtggcagctataacgcgtggagcgtggaaaaactcgccgccgaattcgcctctaaaccgtggatccaggtggatatgcagaaagaggttattatcacgggtattcaaactcagggtgccaagcattatcttaaaagctgctacaccactgaattctacgtggcatacagcagcaatcagatcaactggcagatttttaaaggtaactccaccagaaacgtgatgtactttaacggaaactccgatgcgagcaccatcaaagaaaatcagttcgatccccccattgtggcccgctatattcgcatcagcccgaccagggcatacaaccgtccaacgctccgtctggagctgcaggggtgtgaggttaatgggtgctccactccactcggtatggagaacggaaagattgagaacaaacagatcacggcgtcctccttcaagaagagctggtggggcgattattgggagccgtttcgagcgcgcctgaacgctcagggtcgggtgaatgcctggcaagctaaagcgaacaataataaacaatggctggagattgacctgctgaagattaagaagatcacggctataatcacccagggctgcaaaagcctgagctccgagatgtacgtcaaaagctataccatccattacagcgaacaaggcgtcgagtggaaaccatatcggttaaagagcagtatggtggacaagatcttcgaaggtaacaccaacactaaaggccatgtgaaaaacttttttaatcccccaatcatttctagatttatcagagttatcccaaaaacctggaatcagtctatcgctctgcgcctagagctgttcggctgtgatatctac

SEQ ID NO: 9110 - DNA, 6672 bp, synthetic construct
  misc_feature 1..6672: note = source = /note="Description of Artificial Sequence: Synthetic coding sequence"
  source 1..6672: mol_type = other DNA
atgttcccaggatgtccaagattatgggtcctggttgtgctggggactagttgggtcggctggggctcacagggcaccgaggcagcccagttgaggcaattctacgttgctgcccagggaattagttggtcctaccgccccgagccaacaaactccagcttgaacctatccgtaacatccttcaagaaaatcgtgtaccgcgagtacgagccatacttcaaaaaagaaaagccgcaatctacgatttctggactcctggggcctacgctgtacgctgaagtgggagatattataaaggtgcacttcaagaacaaagcagacaagccattgagcatccatccacaaggtatccggtactccaagctgtcagagggagcttcttatttggatcacactttccctgcagagaaaatggacgatgcagtggcacctggtcgcgaatatacatatgaatggtccatctcagaagattccggtcctacccatgatgaccccccgtgtctcacacacatctactacagccatgagaacctgatcgaggacttcaatagcggtctcatcggaccgctgcttatttgtaaaaaaggaacactcacggaaggaggcacccagaagactttcgacaaacagattgtgctgctctttgccgtcttcgacgagagcaaatcgtggtctcagtctagttccctgatgtacactgtaaacggctatgtgaatggaaccatgccagacataacagtttgtgctcatgaccacatcagttggcacttgttggggatgtccagcggccccgagctgttttccatccacttcaatggccaggtcttggaacagaatcatcacaaggtgagcgcaatcaccctagtgagtgcaacaagtactacggcgaacatgacagtgggcccagaaggtaaatggatcatctcttcccttacgccgaagcatctgcaagctggcatgcaagcctatatcgacataaagaattgccccaagaagacacgaaacctgaagaaaattacaagagaacagcggcgacacatgaagaggtgggaatacttcattgctgccgaagaagtgatctgggactacgcacctgtcataccggcaaacatggacaaaaagtaccggtctcagcaccttgataatttttcaaatcagattggcaagcattacaaaaaggtcatgtacacccagtacgaggatgaatcctttacaaagcacacggttaacccaaatatgaaggaggatgggatattggggcccatcatccgagcccaggtgcgggacaccctaaagattgtattcaagaatatggctagcagaccgtactccatatacccacacggtgtgaccttcagtccatacgaggatgaagtgaattcgtctttcacgtctggacggaacaataccatgatccgcgccgtccagcccggcgagacctacacctacaaatggaacatcctggaattcgatgagcccaccgaaaacgatgcccagtgcctgacacgcccatattattctgatgtcgacatcatgcgcgatattgcctccggcctgatcggactgctcctcatttgtaaatcaaggtcactggacagacgtggcatccagagagccgccgacatcgaacagcaggcggttttcgccgtcttcgacgaaaacaagtcttggtacctggaggataacattaataaattctgcgagaaccccgacgaagtcaaacgggatgaccccaaattctatgagtcaaatattatgagcaccattaatgggtacgtcccagaatccattacaacgctcggtttctgcttcgatgacacagttcagtggcatttctgtagcgtcggaactcaaaacgagattctcactatccacttcacagggcacagcttcatttacggaaagaggcacgaagacacattgacactgtttccaatgcgcggcgagtctgtcaccgtcacaatggataacgtcggaacatggatgctcacctccatgaactcaagccccagaagcaagaagctccggctcaaattccgggacgtgaagtgcatcccagacgatgacgaggattcttatgaaatcttcgagcctcccgagagcactgtgatggctacccgcaaaatgcacgacaggctcgaacccgaagatgaggagtctgacgcggattacgactaccagaaccgactcgctgctgcgctgggcattagatcatttaggaacagtagcctgaaccaggaagaggaggagtttaatctgaccgcactggctctcgaaaatggaactgagtttgtatcatctaatacggacattattgttggcagtaattacagcagcccttccaacatctccaagttcactgtcaacaatcttgccgagccacagaaggctcctagccatcaacaggctacaaccgccggaagtccacttcgccacctcattggaaaaaacagcgtcctaaactcatcaactgcagagcatagtagcccctattcagaggaccccatagaggatcctcttcagccagatgtcactgggatcaggttgctgtcactcggagcaggggaatttaagtcgcaagaacatgccaaacacaaaggtccaaaagtggaaagggaccaggccgctaagcatcggttttcgtggatgaagctcctggcacataaagtgggaaggcacctgagccaagatacaggctcaccctctggaatgcgcccttgggaggatctcccaagccaagatactggatccccttctcgcatgcgtccatggaaggacccaccctctgaccttctgcttcttaaacagtcaaatagtagtaaaatcctggtaggccgatggcatctcgcctcagaaaaggggagctacgagattatccaagacactgacgaggataccgcagttaataactggcttatctccccccaaaacgcctctcgggcctggggcgaatcaaccccactagcaaacaagcccggtaagcagtccggtcaccccaagtttccaagggtgagacacaaatcactgcaggtcaggcaagatgggggtaagagccgattgaagaaatctcagttcctgattaagacgagaaagaaaaaaaaagaaaaacacacgcatcatgcacctctgtccccacgaaccttccatccactcaggtcagaggcttacaacaccttttccgagagacgcctgaaacatagtctggtgctgcacaaatccaacgaaacctccttgcctacggatcttaaccagacactgccctccatggatttcgggtggattgcttccctgcccgaccataatcagaattcctccaatgatactgggcaggctagttgcccccccggcctgtaccagacagtgccccccgaagaacactaccagacctttcccattcaggatcccgaccagatgcactccactagcgacccttcccaccggtcatcttctcccgaactctcagagatgctagagtacgatcggtctcacaaaagctttccaactgacatatctcagatgtcaccaagcagcgaacatgaggtatggcagaccgtgatcagtcccgacctgagccaagtgacactatcgccggagctgtctcaaaccaacctgagccccgatctaagccacaccaccctcagccctgaactcatacagaggaatttaagtcctgcgctgggccagatgcccatctccccagatctgtcgcatacaaccctttcgcccgacttaagccataccacactgagcctggacctctcacaaactaacctttctcctgagctgtcccagaccaaccttagtccggccctgggacagatgccactctcacccgatctgagtcacaccactctgagtctggattttagccaaacgaatttatcaccggagctgagccacatgaccttaagcccagagttatcacagacaaacctttcgccagctctggggcagatgccaatcagtcctgacctatcacacaccacgctcagtctggacttttcccaaactaacctctcaccagaactgagtcaaacaaatctgtcgcctgccttgggtcagatgcctttgtcacctgaccccagtcacacgacactttcgttggatctatcgcagacgaatctgagtcctgagctctctcaaaccaatttatcacccgacctgtccgaaatgccgctgttcgccgatctgagtcagatccctctgacacctgatctggatcaaatgacgctgtcccccgacctaggggaaactgatctgtctcccaatttcgggcagatgtctctgtcccccgacctgagccaagtgactttgtcgcctgacatctcagacaccaccctcctccctgatctgagtcagattagccccccccccgatctggaccagatcttctatccatccgagagcagtcagtcgctgctccttcaagagtttaacgagagcttcccctatcccgatctagggcagatgcccagccccagctcacccaccctcaatgatacgttcctctcaaaggagtttaaccctttggtcattgtaggccttagcaaggatggaaccgactatatcgagatcatccctaaagaagaagtacagagcagcgaggatgactatgctgaaattgattatgtgccgtatgacgacccctataaaaccgatgtgcgcactaatattaatagcagccgggaccctgataacattgccgcatggtacttacgcagcaataacggcaaccggcggaattattacattgctgccgaagaaatctcttgggactactccgaatttgtacagagggaaacagacatcgaggatagcgatgacatcccggaggatacaacctacaaaaaagtcgtctttcggaagtatctggactcaacgtttaccaaaagagatcctcgtggagagtacgaggagcatctcggcatcctgggccctattatacgggctgaagtggatgatgtcatccaagtgaggttcaagaacctagcctcccggccctattccctgcatgctcacggtcttagctatgaaaagtccagcgaggggaagacatatgaagacgatagtccggagtggttcaaagaagacaatgcagtgcagcctaacagttcttacacctacgtgtggcacgctacagaacggtccgggcccgagagccctggctccgcttgccgcgcatgggcctactactccgcagtgaaccccgaaaaagatatccactcaggactgataggccccctactgatctgtcagaaaggtatcctacacaaggattcgaacatgcccatggacatgcgagaattcgttcttttattcatgacttttgacgaaaagaagtcatggtactatgagaaaaagagcaggagctcctggcgactgacctcttctgaaatgaaaaagagccacgagtttcacgcaatcaacggcatgatctattccctccctggactgaaaatgtacgaacaggagtgggtgcggttacacttgttgaatattggcggtagccaggatattcatgtggtgcacttccacggacaaaccctcctagagaacggcaataagcagcatcagctgggggtgtggccactgctgcccggtagtttcaagactctcgagatgaaagcatcaaagcccggctggtggctgctcaacaccgaagtgggtgagaaccaacgcgcaggtatgcagaccccttttttaatcatggaccgggattgtcgtatgcctatgggcttatccaccggcatcatttccgactcacagattaaggcgagcgagtttctgggttactgggagcctcggctggcacgcctcaataatggcgggtcctacaatgcttggtccgtcgagaagctggcggctgaatttgctagcaaaccctggattcaggttgacatgcagaaggaagtcatcataactggaattcaaacccaaggtgctaaacactatctgaaatcgtgttataccacagaattctacgttgcttactctagtaaccagatcaactggcaaatctttaaaggaaatagcacccgtaacgtgatgtattttaacggcaacagtgacgcctcgaccatcaaggaaaatcaattcgatccacccattgtggccaggtacatccgcatctcccccacccgtgcttataaccgaccaactctccgacttgagctccaggggtgtgaagtgaacggctgtagtactcccctggggatggagaatggaaagattgaaaacaaacaaatcaccgccagcagtttcaagaagagctggtggggcgattattgggagccctttcgagccaggcttaacgcccaaggcagagtcaacgcttggcaagctaaggctaataataacaaacaatggctggagatagatttgttaaagatcaagaagattacagccatcatcacccaggggtgcaagagcctctcttcagagatgtatgtcaagagttacaccatccactattctgaacagggggttgaatggaagccctatagactcaaaagcagtatggtggataaaatattcgaggggaacaccaacaccaagggccacgtgaaaaacttctttaatccccccattatcagtagatttatccgtgttatcccaaagacctggaaccagagcattgccctgcgactggagctatttgggtgtgatatctat

SEQ ID NO: 9111 - DNA, 6672 bp, synthetic construct
  misc_feature 1..6672: note = source = /note="Description of Artificial Sequence: Synthetic coding sequence"
  source 1..6672: mol_type = other DNA
atgttccctggatgtcctaggctctgggtgcttgtagtgcttggcactagctgggtcggctggggctcgcaggggaccgaagcggcccagctccgccagttctatgtagctgcacagggcatatcatggtcttatagaccagaaccaaccaactcctctcttaacctttctgttactagcttcaaaaagatagtgtatcgcgaatatgagccttattttaagaaagaaaagccccagtctaccatcagtggcctgcttggaccaaccctgtacgcagaggtcggcgacatcattaaggttcacttcaaaaataaagctgacaaaccactgagcattcaccctcagggcattcgctattcgaagctgtccgaaggtgccagttacctcgaccacactttccccgcagagaaaatggacgatgctgtggcccctggtagagagtatacctatgaatggtctatcagcgaagacagcgggcctacgcacgacgatccgccctgtcttacccacatatactattctcacgaaaaccttattgaggactttaactccggcctgatcgggcctctgctaatctgtaaaaaaggcaccctgacggagggaggtactcaaaaaacctttgacaagcaaatagtgctactgtttgcggtgtttgatgaatcaaaatcgtggagccagtcgtctagtctaatgtacacagtaaatggctacgtgaatggcacgatgccagacattaccgtgtgcgcacacgatcacatcagttggcatttgctggggatgtccagtggccctgagctgttttccatccactttaacgggcaggtgctcgaacagaaccaccacaaagtgagcgccattacactggtctcagcgactagcaccaccgcaaatatgaccgtcggtccagaaggcaaatggattatttcctctctaactccaaagcacctccaagccggcatgcaagcatacatcgacatcaagaattgtccaaagaagacgcggaacctgaagaagatcactagggaacagcggcggcatatgaaaagatgggagtatttcatcgctgcagaagaagtcatctgggattatgcgcccgtgatacctgcaaacatggataaaaagtacaggagccaacacctggacaacttctcaaatcagataggcaagcattataaaaaggtgatgtacacgcaatacgaagacgagtcattcacaaaacatacagtgaatcccaatatgaaggaagatggtatactgggtccaatcatccgggctcaagtaagagatacattgaagattgtgtttaaaaatatggccagtagaccgtatagcatttaccctcatggggtcacatttagtccttacgaagatgaggtcaattcctcttttaccagcggacgtaacaatactatgatccgagccgtgcaacctggcgagacttacacatataagtggaacattctggaattcgatgaacccacagaaaacgatgcccaatgtcttacccgcccgtattattctgacgtggatatcatgcgggacatagcatcagggctgatcggcctcctgctgatctgtaagtccagaagtctggaccgaagaggaattcagagggccgccgacatcgagcagcaagcagttttcgccgtgtttgatgagaacaaaagttggtatcttgaggacaacattaacaaattttgtgaaaaccccgacgaggtcaagcgtgacgacccgaagttctatgagtcaaacattatgtcgaccatcaatggctatgtacccgaatcgatcacgacactcggtttctgcttcgatgacacagtgcagtggcatttctgctctgtcggcactcagaatgaaatactcaccatccattttaccgggcactcattcatctatggaaaacgccatgaggatactctgaccttgttcccgatgcgcggtgagagcgtcactgtaacgatggataacgtggggacttggatgcttacctctatgaattcgtcaccgagatcgaagaaactgaggcttaaattccgagacgtgaaatgtataccagacgacgacgaggatagttatgaaatttttgaaccccccgagtcgacagtgatggccacccgaaagatgcatgacaggcttgagcccgaggacgaggagtctgacgccgactatgactatcagaatcggctagccgcagccctcgggatccggtcattccgcaatagcagtcttaatcaggaagaggaagaatttaaccttacagcactggcgctcgaaaatggcactgaattcgtgtcttcaaataccgatattattgtgggatcgaactacagctccccatctaacatctccaagtttacagtgaataacctggcagagccccagaaggctccgtcgcaccagcaggctactactgcaggcagcccgcttcgccacctcattggtaagaacagcgtgttgaactcttcgactgccgaacacagcagcccctacagcgaagaccccattgaggatccccttcagcctgatgttacaggcatccgcctactcagcttgggggcaggagagtttaagtcacaggaacacgcaaagcacaaaggacctaaggtggagagggaccaggccgctaagcatcgattctcctggatgaagctcttggcccacaaggtggggcgacacctgtcccaggacacaggatctccttctggaatgcggccatgggaagaccttccctcacaggacacgggcagtccatcccgtatgagaccttggaaagatccgcctagtgaccttctgctccttaaacagagtaactcttcaaagattctggtgggaagatggcacttagcgagcgaaaaagggagttatgagattatccaggacacagatgaggataccgcggttaacaactggctgattagcccacagaacgccagccgcgcctggggcgagtccacacccttagcaaacaagccaggcaagcagtccggccaccccaaattcccaagggtgagacacaagagcctccaggtgagacaggatggggggaagtctcgactcaaaaaatcccaattcctgataaagaccaggaagaaaaagaaagagaaacatacccatcacgcccccttgtcgcctcgcaccttccatcctcttagatccgaggcatacaacacattttcggaacgaagactcaagcattctctggtgctgcataagtccaatgagacctcgctgcccaccgacctaaatcagacattgccaagcatggatttcggctggatcgccagcctaccagaccacaatcagaattcctcaaacgacactggccaggcttcctgcccccccggcctgtaccagactgtgcctcccgaagagcactatcaaactttcccaatccaagaccctgaccagatgcacagcacaagtgacccatctcatcgaagtagctctcccgaactgagtgagatgctcgagtacgacaggagccacaagagctttccaactgacatcagtcagatgagtccctctagcgagcacgaggtgtggcaaaccgtaatttctcctgatctgtcacaggttaccctctcccccgagctctcacagacgaacctgtctcccgatctttcacatacaacactcagccctgaactcattcagcggaatctaagtccagctcttggtcagatgcccatctctcccgatttgagccatacaacactgtctcctgatctgtcccacactacgctttcactcgacctatcccaaactaacttgtcacctgaactcagccagaccaatctgtctcctgcactgggacagatgcccctcagccctgatttgagtcatactactctcagcctagatttctcccagacgaaccttagccctgagctgtcacatatgacactgtctcccgaactgtctcagacaaacctttcaccagctttgggacagatgcctattagccccgacctctcacataccactctgtcacttgatttcagccaaactaacctgagccctgaacttagccagaccaacctgtcacccgcgcttggccagatgccattgtcacctgatcccagtcacactactctctcactggacttgagccagacaaacctaagccctgagcttagccagaccaatctctccccagatctatcagaaatgcccttatttgctgatctgtcacagatcccactaacaccagatctcgaccagatgactctgtcacccgatttgggggaaacagacctctctcctaattttggacaaatgtccttgagtccagacctctcccaggtgactttatcgccggatataagcgatactactctactccctgacctcagccagatatcccctcccccagacttggaccagatattttaccccagcgaaagtagtcagtcactgttgctccaggaattcaatgagagctttccctaccccgacctgggccagatgccctcaccctcttcccccacgctgaacgataccttcctgtcaaaggaatttaacccacttgtaatcgtgggtctctccaaagatgggacagattacatcgagattatccctaaagaagaagtccagtcttccgaggacgactatgcagaaatagactatgtgccctacgatgatccatacaaaacggacgtgcggacaaacattaactcctcccgggacccagataatatagcagcatggtaccttcgctctaacaatggaaacaggcggaactactatatcgccgccgaagagatctcatgggattattccgagttcgtccagagagagacagatatcgaggactcagatgacattcccgaggacacaacttacaagaaggtggtttttcggaagtacctggactccacttttaccaagcgagacccaagaggcgaatacgaggagcacctgggcatcttggggcctattatcagggctgaagtggatgatgttatacaagtacgttttaaaaacctcgcttccagaccttactcgctacatgcccatgggctgagctacgaaaaatccagcgaaggcaagacctacgaggacgatagcccggaatggttcaaagaggacaacgcagtccagcccaattcgtcctatacgtatgtttggcatgccacagagaggtctggtcctgaatcccccgggtcagcttgccgagcctgggcttattacagcgccgttaaccctgagaaggacatccattctggactgataggccccttgctgatttgccagaaaggcatcttacataaagactcaaacatgccaatggatatgcgcgaattcgtgctgttgttcatgacattcgatgagaagaagagttggtactacgaaaagaaatcccggagcagctggcgcttaacaagttcggaaatgaagaaaagtcacgaatttcacgcaatcaacgggatgatttattcactgcctggtttgaaaatgtatgagcaagaatgggtgagactgcacctcctgaatatcggagggtctcaggatattcatgtggtgcactttcacggccagacattgttggagaatggaaataaacaacaccagttaggcgtctggccgctgctgcccggttccttcaagacactggaaatgaaagcgtcgaaacctggatggtggcttctgaacactgaggtgggggaaaatcaaagagcaggcatgcagacccccttccttatcatggatcgagattgccgcatgcccatgggcttatcaaccggcatcataagtgacagtcaaataaaggcatccgagtttttgggttattgggaaccacgactggcacgcctgaataacgggggaagctataacgcctggtccgtggagaaattggcagccgagttcgcttccaagccctggattcaggtggatatgcaaaaagaagtgatcattaccgggatccagacacaaggggcaaagcattatcttaaatcatgctatacaacggagttctatgttgcttactccagcaatcagataaactggcagattttcaaagggaactctacaagaaacgtgatgtactttaatggcaactccgatgcatctaccattaaagagaaccagttcgatcctcctatcgtcgctcggtacattaggatctcccccacgagagcctataacaggccaacactcaggcttgagctgcaaggatgtgaagtgaacgggtgtagtactccacttggcatggaaaatggaaagattgaaaataagcaaatcactgcctcctcctttaagaagagttggtggggagattattgggagcccttccgggccaggctcaacgctcagggccgagtaaacgcgtggcaggccaaggccaacaacaataaacagtggttggagatcgacctcctcaaaattaaaaagattacggccatcataactcagggctgtaaatcactgagttcagagatgtacgtgaagtcgtatacaatacactattccgaacaaggagtggagtggaaaccatatcgcctgaagagctccatggtcgacaaaatcttcgaaggtaataccaacacgaaaggacacgtgaaaaatttttttaatcctccaattattagccggtttattcgcgtcatacccaagacgtggaatcagagtattgctttgagattagagctcttcggctgcgacatctac

SEQ ID NO: 9112 - DNA, 6672 bp, synthetic construct
  misc_feature 1..6672: note = source = /note="Description of Artificial Sequence: Synthetic coding sequence"
  source 1..6672: mol_type = other DNA
atgtttccaggctgcccgcgcctatgggttctcgttgtacttgggacaagctgggtgggctggggtagtcaagggacagaagccgcccagctaaggcaattctacgttgccgcccagggcatcagttggtcttatcggcctgagcccacaaattctagtctgaacctgtccgttacctctttcaagaaaattgtatatagggagtacgagccgtatttcaaaaaagaaaagccccagtccactatcagtgggctgctagggccaactctatatgctgaagtgggagacattatcaaggtgcatttcaagaataaggccgacaagccactttctatccaccctcaaggcatcaggtatagtaaactgtcggaaggagcctcctacctcgatcacaccttccccgcggaaaagatggatgacgcggtggctccaggacgcgaatatacctatgagtggtccattagtgaggatagcgggcccacccacgacgaccctccttgcctaacccatatttattattctcacgaaaacctgattgaggacttcaattctggcctgatcgggcccctccttatctgtaaaaaaggcacgctcaccgagggggggacgcagaaaaccttcgacaagcagatcgtgctgttgttcgctgtgttcgatgagagcaagtcttggtcacaatctagcagcctgatgtacacagtgaacggctatgtgaacggaactatgccagatatcactgtttgtgctcacgaccacatctcctggcacctcctcgggatgtcttctggacccgaactgttttcgatccattttaatgggcaggtgttggagcagaaccatcacaaggtgtccgccatcactctggtgagcgcaaccagtacaactgccaatatgactgttgggcctgaagggaaatggattataagtagtctaacgcctaaacacctgcaggccgggatgcaagcatatatcgatatcaagaactgcccgaaaaagacaaggaacctcaagaaaatcactagagagcaacgcagacatatgaagagatgggaatacttcattgccgcagaggaggtcatttgggattacgctcctgtgattccagcaaatatggataaaaaataccggagccagcacctggataacttctccaatcaaattggcaaacattacaaaaaggtgatgtacacacagtatgaagacgaatcattcaccaaacacactgtgaaccccaatatgaaagaagatgggatactgggccctattataagggcccaggtgagagataccctaaaaattgtctttaagaacatggcttccaggccctatagtatctatcctcacggggtcacattttctccatatgaggacgaagtgaattcttcttttacaagtggaaggaacaacacgatgatcagagccgttcaaccaggagagacatacacatacaagtggaacatattggaattcgatgagccgaccgaaaatgatgcacaatgccttactcgaccctactattccgatgtggatattatgcgagatatcgccagtgggctgatcggacttctgctgatctgtaaaagcagaagcctcgacagacgaggaatccagcgagccgctgatatcgaacagcaggcagttttcgcagtgttcgatgagaataagtcctggtatcttgaggataatattaacaaattctgtgaaaacccagacgaagtcaagcgtgacgacccaaaattttacgaaagcaacattatgagtaccataaatggttatgtcccagagtcgattactacactgggcttttgcttcgacgataccgtgcagtggcacttctgttccgtcgggacccaaaatgaaatcttgacgatacattttactggacattctttcatatacggcaaaagacacgaggatacgctgaccctctttccgatgcggggtgagtccgtgaccgtgaccatggataacgtaggcacctggatgctcaccagcatgaattctagtccgaggagtaagaagttgcgcctgaaatttcgcgatgtcaaatgcataccggacgacgatgaggattcctacgagatattcgaaccgcctgaatctaccgtcatggcaactcgcaaaatgcacgacagattggaaccggaggatgaagaatcagacgccgattatgattatcagaaccgattggccgcagcactcgggatcagaagtttcagaaactcatctttgaaccaggaagaagaggagttcaatctgaccgctctcgcactcgagaacgggaccgaattcgtatcaagcaatacagacatcattgtgggtagcaattattcctctcccagcaatatatccaaatttactgttaataacctggctgagccgcagaaagctccctctcaccaacaggccaccacagctgggtcaccattacgccatttgataggtaagaacagcgttctgaatagttctacggccgaacactcctccccctactccgaagacccaatcgaggaccctctgcagcccgatgtcaccggtatccgcctgctcagtctgggcgcaggtgagttcaagtctcaagagcatgctaagcataaaggaccaaaagttgagagggaccaggctgccaaacacaggtttagctggatgaaactccttgcacacaaggtcgggaggcatttatctcaggataccgggtcaccttctgggatgaggccctgggaggatctgcccagtcaagacactggatcgccatctaggatgagaccatggaaggatcctccttcagacctgctgctgcttaagcagagtaactcatcaaagattctggtgggtcgctggcatttagctagcgagaaaggctcctacgagattatccaggataccgacgaagatactgctgtgaacaattggcttatatcaccgcagaacgcatctagagcttggggagagtctacacctctggccaataaacccggcaagcagtctggtcaccctaaatttccacgagtgaggcataagtctctgcaggttaggcaggacgggggcaaatcacggttaaaaaaaagccagttccttattaaaacccggaaaaagaagaaggaaaagcatacgcaccacgcccccctcagcccacggaccttccatccgctgagatctgaagcgtacaatactttcagtgagcgtaggctgaagcattcattggtcctacacaagtcgaacgagacgagccttcccacagatctcaaccagaccctgccatccatggatttcggctggatcgccagtttacccgatcacaatcagaacagctcaaatgacactggacaggcatcctgcccgcccgggctttaccagactgtgcctccggaagaacattaccagacctttcccatacaggatcccgatcagatgcactctacttcagacccttcccatagatcaagctcaccggaactcagtgaaatgttggagtacgacagatctcacaagtcattcccgacagatatcagtcagatgtcaccatcatctgagcacgaggtctggcagactgtgatcagtcctgatctttcacaggttacccttagtcctgagcttagccagactaatctgtctcctgacctctctcacaccacgctttcaccggagctcattcaacgcaaccttagccccgcactgggccagatgcccatatcaccagatcttagccacaccactttgagtcctgatctgtcccacacgacattatccctcgacctctcacaaactaacctaagccccgagctgagtcaaaccaacttatcacccgccctgggacagatgcccctaagccccgatctgagccacactactctgagtttggacttttctcagacgaatctaagtcctgaactgtctcacatgacactgtcacccgagctgtcacaaactaacctgagtcccgctctgggccaaatgccaatcagtccagacctctcacatactaccctgagcctggatttttcccaaactaatctaagtcccgagctctcacagactaatctgagtcctgctctgggccagatgccgctgtcgccagatccatcacacacgactttgagtctggatctttcacagacaaatctgagcccagagctgagccaaacaaatttatctccggatttgagtgagatgcctctcttcgccgatttgagtcaaatcccacttactccagatctggaccaaatgacactatctccagacttgggtgagacagatctgtctcccaactttgggcagatgtcactgagcccagacttgagtcaagtcaccctgtctccagacatttctgatacaacactgttaccagatctcagtcagatttctcctccccctgaccttgatcagattttctacccaagtgaaagctctcagtctctgctgttgcaggaattcaatgagtcgtttccgtatcctgacctgggtcagatgccctccccatcatcgcccacattgaatgacacattcctgagtaaagaatttaatcctctcgtcattgtaggcctgtccaaagacgggacggattacatcgagataatcccaaaagaagaggtgcagagcagcgaggacgattacgctgagatcgactatgtgccatacgatgacccctacaagactgacgttagaaccaacatcaattcgagccgggaccccgataacatcgctgcctggtatttacgtagtaataacggtaaccgcaggaactactacatcgcggccgaagaaatcagttgggattactcagagttcgtccagcgagagacagatatagaagactccgatgatatcccggaagatacgacctataaaaaggtggtgttccggaaatacttggattccaccttcaccaaacgcgacccccgcggcgaatatgaggaacacttaggtattctgggccctatcatcagagctgaagtggacgatgtgatacaggtgagatttaagaatttagcttcccgcccgtacagcctccatgctcacggcctctcctacgagaagtcatctgaaggaaaaacctacgaagacgacagccctgagtggttcaaggaagacaacgctgtccagcctaatagcagctacacctacgtatggcatgctacagaaagatccgggccagagtcaccgggcagtgcttgcagggcctgggcgtactattctgctgtgaaccccgaaaaagacatccactcaggactgatcggcccgctgcttatctgccagaaaggcatcctccataaggattctaatatgccaatggacatgcgggaatttgtgcttctattcatgacttttgatgagaaaaaatcctggtactacgagaaaaagtctcgctcttcatggagacttaccagcagcgagatgaaaaagagccatgaattccatgccatcaatgggatgatctattcccttcctggcttgaaaatgtatgaacaggaatgggtgcgtctccacctgttaaatatcggagggtctcaggacatacacgtcgtacatttccacgggcagaccctgctcgaaaatggcaacaagcagcaccaactgggcgtgtggcctctgttgcccggcagcttcaagactctggagatgaaggcctcaaagccggggtggtggttgctgaataccgaagtcggcgaaaaccagagggctggaatgcagacgccttttctgatcatggatcgggattgtcgtatgcccatgggactcagcaccggcataatctccgattcacaaatcaaagctagtgagtttctgggttattgggagcctcggcttgccagactgaacaacggggggagttacaacgcttggagtgtggagaagttggctgccgaatttgcttccaaaccatggatccaggtggatatgcaaaaggaggtgataattacgggcatccaaacccagggcgcaaaacactatctgaagagctgttatacaacggagttttatgtcgcctacagttctaatcaaataaattggcagatctttaagggaaattcgaccagaaacgtaatgtactttaatgggaacagcgacgctagcaccatcaaagaaaaccagttcgacccgccaatagtggcgcgctatattagaatttcccctactagggcctacaacaggcctaccctcaggctggaactgcagggatgtgaggtgaacggatgcagtacccccctgggaatggaaaacggcaaaatcgagaacaagcagattacagcatcctcctttaagaaatcttggtggggcgattactgggagccatttcgcgctcgcctgaatgcccaggggcgggtgaacgcctggcaggctaaggctaataataacaaacagtggttagaaatcgacctcttgaagataaagaagatcaccgccataatcacccaggggtgtaagtctctatcaagcgaaatgtacgtgaaaagctataccattcattattccgagcagggggtagagtggaaaccatacagactgaagagcagcatggtggacaaaatctttgaagggaataccaatacaaaaggccacgtgaaaaattttttcaacccccccatcatttcgagattcattcgagtcatccccaaaacctggaaccagagtattgcccttagactggaactgtttggatgcgatatctac

SEQ ID NO: 9113 - DNA, 6672 bp, synthetic construct
  misc_feature 1..6672: note = source = /note="Description of Artificial Sequence: Synthetic coding sequence"
  source 1..6672: mol_type = other DNA
atgtttcctggttgcccacgattgtgggtgttggttgttctcggaacaagctgggtgggctgggggtctcagggcacagaagctgcccagctccgccaattctacgttgctgcacaagggatctcatggagttaccgccctgaaccaactaatagtagcctgaatctgtccgtgacatcctttaagaaaatcgtatatagggagtacgagccatacttcaaaaaagagaagccacagtctacgatcagtggcctccttggtccaacactttacgctgaggttggcgacatcatcaaagtccactttaagaataaagccgacaagccgttgtctattcatccgcagggaattagatactctaaattgtccgaaggcgctagctaccttgaccacacctttcccgctgaaaagatggatgatgccgtggcccctgggagggagtacacttatgaatggtctatatctgaggactcaggcccaacccacgacgatccaccgtgcctgactcacatctattactcccatgagaatctgatcgaggacttcaattctgggttgattggaccactgttgatctgtaagaaagggacactgactgagggaggtacacagaagactttcgacaagcaaatcgtgttgctgttcgctgtcttcgatgagtcaaaaagttggtcccaatcttcatccctcatgtatactgtaaacggatacgtgaacgggactatgcctgacatcacagtgtgtgcccatgatcatatctcctggcatctgctcggaatgtcttccgggccagagttgttcagtatacattttaacggacaagtgcttgagcagaaccaccacaaggttagtgccattaccctcgtgtctgctacatcaacaacagccaacatgaccgtggggccagaggggaagtggattatttcctcacttacacccaaacatctccaggccgggatgcaggcatacatcgacattaaaaactgccctaaaaagacccggaatctgaagaagatcactcgggagcagagaagacatatgaaacgctgggagtattttatcgcggcggaggaagttatctgggattacgccccagtcattccggcaaatatggacaagaaatataggtcacagcacctggataacttttccaatcagatcggaaagcactacaagaaagtaatgtacactcaatatgaggacgagtcctttacaaaacacacagttaacccgaacatgaaagaagatggtattctgggcccaataattcgagcacaggtgcgagatactcttaagattgtcttcaagaatatggctagccggccgtatagcatctacccgcacggagtcactttctctccctacgaggacgaggtgaattccagttttaccagcggccggaataacactatgatcagagccgtccagcccggcgagacttacacctacaagtggaacattctcgagtttgacgaacccactgaaaatgacgcacagtgcctgacaagaccttactacagtgacgtcgacatcatgcgagacatcgccagcggtctgataggcctgctgctcatctgtaagtccagatcactggaccggcgaggcattcagcgggcagccgatatcgagcagcaggctgtattcgccgttttcgatgagaataagtcctggtatctggaagataatattaataaattttgtgaaaatcctgatgaggtgaagcgggacgaccctaagttctatgaaagcaatattatgtccactataaatgggtatgtccccgaatcaataactaccctgggtttttgttttgacgacacggtgcaatggcatttttgctcagtggggacccaaaatgagatcctgacaattcattttactggccacagtttcatctatggaaagcgacacgaggacactcttaccttgttccccatgcggggcgagtccgttacggtgacaatggacaacgttggcacatggatgctcacatctatgaattccagcccccgctctaagaaacttcgactcaagttcagggatgttaaatgtattccggacgatgatgaggatagttacgagatctttgaaccccccgagtctaccgtgatggccacccgcaaaatgcacgatcggctggaaccagaggatgaggagtccgacgccgattatgactatcaaaatcgcctggctgccgccttgggtatacggagctttagaaatagctctttgaatcaggaagaggaggagttcaatctgactgctctggcgcttgagaatggcaccgaatttgtctctagtaatacggacattatcgttggcagcaactactcttctccaagcaatatcagcaagtttaccgtgaacaacctggctgagccacagaaggccccgagccatcagcaggcgacgaccgccggcagccctctcaggcatctgataggcaagaactccgtcctcaacagcagcacggcagagcattcaagtccctattccgaagaccccatcgaggaccctctgcaacctgacgtgaccggaatcagacttctctcccttggcgccggagagttcaagtcacaggagcatgccaaacacaaggggccgaaggttgagcgcgatcaggccgccaagcacagattcagctggatgaagctgctggcgcacaaggtgggccgccacctgtcccaagacactgggtcccccagtggaatgcggccctgggaagacctgccaagtcaagacacaggatcccccagcagaatgagaccttggaaggatccacccagcgaccttctgctcttgaagcagagtaacagttccaagatcctggtcggacggtggcacctggcttctgagaaaggcagctacgaaattattcaggacaccgatgaggacaccgccgttaacaattggctcatttcaccccaaaatgcatccagagcttggggggaatccactcccctcgctaataagcccgggaaacagagcggccaccccaagtttccaagggtgaggcacaaatctctgcaggttaggcaggacgggggcaaatcccggctcaaaaagagccagtttctgataaaaactcggaaaaagaagaaagagaaacatactcatcatgcaccattgagtcccagaacctttcacccactgcgctccgaggcttataataccttttctgagcgacggctgaaacactcactggtcctccacaagtccaatgagacatcactccctaccgatctgaatcagacattgcccagcatggactttggatggatcgctagtcttccagatcacaatcagaattcaagtaacgacacaggacaggctagttgtccacctgggctttaccagaccgtgccgccagaggagcactaccagacttttccaattcaggatcccgaccaaatgcatagcacttccgatccctctcaccgaagctcctctcctgagctcagcgaaatgctcgagtacgatcggagccacaaatcctttcccacggatattagtcaaatgagccccagctccgagcacgaggtctggcagaccgtgatttcccccgacctgtcacaggtgactctctctcccgaactctctcagaccaacctgtctccagacctttcacacaccactctttctcccgagttgatccagagaaacctcagtcccgctcttggacagatgccaatcagcccagacctgagccacacgactcttagcccagatttgtcacacaccactctgtccctcgacctgtctcagaccaatcttagcccagagctgtctcaaactaacctcagtcccgccctcgggcaaatgccactcagccccgacctgtcccacactaccctgagcctggactttagccaaacaaatctgagcccagagttgtcccatatgactctcagcccagaattgtcccagactaatctgagccccgcccttggccaaatgcccatatccccagacctgagccatactaccctgagcctggacttttctcagaccaatctgtcccctgaactgtcacaaaccaacctgagccctgctctgggccagatgccgctgtcaccggatccgagtcatactacactctctctggatttgagtcagactaacctttctcctgagttgtctcagacaaatttgtcacctgacttgagtgagatgcctctgttcgctgacctgtctcaaattcctctcacccccgatctggatcagatgacgctttcccctgatctgggcgagaccgacctttcccctaactttggccaaatgtccctgagtccagacctgagtcaggtgaccctgtcccctgatatatctgataccacgcttctgcccgacctgagccagatcagccctcctccagatctcgatcagatcttttatcccagtgagtcctcacagagtctgcttctgcaggaattcaatgagtcattcccctatcccgaccttggccagatgcctagtccaagcagtcccactctgaacgatacattcctgtccaaagagtttaatcctctcgttatcgttggcctgagcaaggatggcactgactatatcgaaattattcccaaggaggaagtgcagtcaagtgaagatgactatgctgagatcgactatgtgccctacgacgacccctataagaccgatgtgaggaccaatataaactcttctagggatcccgataacatagcagcgtggtacctccggtctaataacggcaacagacgcaattactatatcgcggctgaggagatcagctgggactattccgaatttgtacagcgggagacagatattgaagactcagacgatatccctgaggacacaacatataagaaagttgtttttcggaagtatctcgatagcacctttaccaagcgcgaccccaggggcgaatatgaagaacatttgggtatccttggtccaattatcagggccgaggtggatgatgttatacaggtgagattcaagaaccttgccagtcggccatatagtctccacgcgcatgggctgagctatgaaaagtctagtgaggggaaaacctacgaggacgactcacccgaatggtttaaagaagataatgctgtccagccaaactctagctacacttatgtgtggcatgcaacagagaggtccgggccagagtctccgggaagcgcttgcagggcctgggcctattatagcgccgtgaatcctgagaaagacatacactctggactgattgggccactcttgatctgtcagaaaggcatcctgcacaaagattcaaacatgcccatggacatgagggagttcgtactgctgttcatgacattcgacgagaagaagtcctggtactatgaaaagaaatcacggagcagctggaggctgactagctctgagatgaagaagagccacgagttccatgccataaacggaatgatttactcacttcccggactgaagatgtacgagcaggaatgggtccgacttcacttgctgaatatcggtggcagccaggatatccacgtggtacacttccatggacaaaccctgttggagaacgggaacaagcagcaccaacttggtgtgtggccattgttgccaggatcctttaagaccctcgaaatgaaggcctccaagcccggatggtggctgctgaatacagaggtgggagagaatcaaagagccggcatgcagactccctttctcattatggaccgggattgccgcatgccaatgggcttgagtacgggtattatatcagactcacaaatcaaggcctctgagtttctcgggtattgggaaccgagactcgcccgactgaataacggaggcagttacaacgcgtggtccgtcgaaaagctggcggccgagttcgcaagcaaaccctggattcaagtcgatatgcagaaggaagtaattatcactgggatccagacgcagggtgctaaacactacctgaagtcatgttataccacagagttctacgtggcctactccagcaatcagataaactggcaaatctttaaaggtaacagtacaaggaacgtgatgtacttcaatggaaactctgacgcgtccactattaaggaaaaccaattcgatccccccattgtggctcgctacataagaatctcccctacccgcgcttacaatagaccaacactccggctggagcttcaaggttgtgaggtgaatgggtgttccacaccgctgggtatggagaatgggaaaatcgagaacaagcagatcactgcatcctcatttaagaagtcatggtggggggattactgggagccattcagagccaggctcaacgctcaaggacgcgtgaacgcatggcaggctaaggcgaacaataacaaacagtggttggagatcgacctgctgaagataaaaaagattaccgcaatcatcacacaggggtgcaagtcattgagtagcgagatgtacgtgaaaagctacacaatacactactcagaacagggcgttgagtggaaaccatataggctgaaatcctctatggttgacaagatcttcgagggaaacaccaacacaaaggggcatgtgaaaaacttttttaatcctcccattatcagccggtttatccgcgtcatccccaagacatggaatcagagcatagccctccgcttggaactgtttgggtgcgacatatat

SEQ ID NO: 9114 - DNA, 6672 bp, synthetic construct
  misc_feature 1..6672: note = source = /note="Description of Artificial Sequence: Synthetic coding sequence"
  source 1..6672: mol_type = other DNA
atgttccctggatgcccaagattatgggtgttggtggtgttgggaacttcatgggtagggtggggatctcagggaactgaagcggcccagctgaggcagttctacgtggcggctcagggaatatcttggagttatagacccgaacccacaaattcttccctaaatctctcagttacatcttttaaaaaaatagtttatcgcgaatacgaaccatattttaaaaaagaaaaaccacagtctacaatctctggacttctcggacccacactttacgctgaagttggagatataattaaagtacattttaaaaataaagccgataagcctctatctatacatcctcagggaatccggtatagtaaactctctgaaggagcatcatatcttgatcatacattccctgccgaaaaaatggatgatgccgtggctcctggaagggagtatacatatgaatggagtatctcggaagattctggaccaacacacgatgatccaccttgcttaacacatatctattattctcacgaaaatctaattgaagatttcaacagtggactcatagggcctcttctaatttgtaaaaagggaacactaactgaaggagggactcagaaaacttttgataagcagatcgtattgctcttcgccgtgtttgatgaatctaaatcatggtctcagagttcaagtcttatgtatacagtgaatggatatgtgaatggaactatgccagacatcactgtctgcgcgcacgaccatatttcatggcatctgctgggaatgtcatctggacccgaattattttcgattcatttcaatgggcaggtgcttgagcagaaccaccacaaggtctcagcaatcacactcgtgtctgcaacatccactacagcaaatatgacagtagggcccgaaggaaaatggataatctcatccctcacaccaaaacatttacaggcagggatgcaggcatatatcgacatcaagaactgtcccaagaaaacaagaaatcttaaaaaaataactcgcgagcagaggaggcatatgaaacggtgggaatacttcatagcggccgaagaggtgatttgggactatgctccagtgatacctgcaaacatggataaaaagtatcgatctcagcatctggataatttctccaatcagataggaaaacactataaaaaagtcatgtatactcagtacgaggatgagtccttcacaaaacatacagtgaaccccaatatgaaggaagatgggatcctcgggcccatcattagagctcaggtaagagatacattaaaaatcgtctttaaaaatatggcctctcggccttattcgatctatcctcacggagtaacattttctccctacgaagatgaagtgaacagttcctttacatcgggaaggaataacactatgatacgcgccgtacagccaggagaaacatatacatataaatggaacatattagaattcgatgaacccacagaaaatgatgcacagtgcctaactagaccctattactccgatgtggatatcatgcgggatatagcctccggactcatagggctattgctgatatgtaaaagtcgctcactcgatcggcggggaattcagagagcggctgatattgaacagcaggccgtgtttgcagtgttcgacgaaaacaaatcatggtatctggaagacaacattaacaaattctgtgaaaatcccgatgaagtcaaacgcgacgatcctaaattttatgagtctaacatcatgtcaactatcaacgggtatgtgcctgaatccatcactacactgggattttgtttcgacgatacagtgcagtggcacttctgcagtgtcgggacacagaacgaaattttaacaatccactttactgggcattctttcatctatgggaaaaggcacgaagacactctcacattattcccaatgcgaggggaatccgttactgttacaatggataatgttgggacttggatgcttactagtatgaattctagtcctaggtccaaaaaactgcggctgaagtttagggatgtcaaatgtatcccagatgatgatgaagattcttatgaaatctttgaaccccccgagtccactgtgatggcgacaaggaaaatgcatgatagacttgaaccagaagacgaggaatctgatgcagattatgattatcagaaccgcctcgccgccgctcttgggatccgctcctttaggaactccagtctcaaccaggaagaggaggaattcaacctcactgctctagccctagaaaatggaacagaattcgtctcttccaatacagacatcatagtggggtctaattattctagtccctccaatatctctaaattcacagttaataatctcgccgaacctcagaaagccccctcacaccaacaggccacaacagccgggtcacccctgcgccacctcatcgggaaaaattcggttctcaactcctcgactgctgagcattctagtccttattctgaagatccaattgaggatcctctacagcccgatgtgactggaatccgcctcttaagtttgggagccggggaatttaaatctcaagaacacgcaaaacacaaaggacccaaagtggaacgggaccaggcagcaaaacataggttttcctggatgaagcttctcgcgcataaagttggaaggcacctctcccaggatactgggtccccctctggaatgaggccatgggaggatttaccatctcaagatactgggtcaccttctaggatgaggccttggaaggatcccccatctgatctcctgttactaaaacagagtaactcatctaaaatactagttggacggtggcacctggcctccgaaaaaggatcgtatgaaatcatacaggatacagatgaagatactgcggtaaataattggctgatctccccccagaatgcctccagggcttggggagagtctacacctctggctaataaacctgggaaacagtcaggacaccctaaatttcccagggtgagacacaaatctctacaggtaaggcaggatggaggaaagagtagactcaaaaaatcacagttcttaataaaaacaagaaaaaaaaagaaagagaaacatacacatcatgcccccctgagtcctagaacgttccaccctctaaggtcagaagcatataacacattctcagagcgacggctgaaacattctctggtgctacataaatcgaatgaaacatccctcccaacggatctgaatcagacactcccatcaatggacttcggatggatcgcatccttgccagatcataaccagaactcttcaaatgacacgggacaggcaagttgcccacccggactctatcagactgtgccacctgaggagcactatcagactttccctattcaggatcctgatcagatgcactctacatctgatccctctcatcgatcttcctcacccgaactgagtgaaatgctcgagtacgacaggtcccataaatcttttcctacagatatctcacaaatgtctccatcctctgagcacgaagtctggcagacagtaatatcaccagatctgtctcaggtaactctctcccccgagctctcccagactaatctatctcccgatctctctcacactactctatcacccgagctcatacagcggaatctgtcgcctgcgctcggacagatgcccataagtcctgacctttcgcatacaactttatctcccgatctgtcacatacaactctgtctctggatctgtcacagactaacctgagtccagaactgtctcaaacaaatctttcccccgcactggggcagatgcctctttctccagatctgtcccacacaactctgtctctagatttctctcagactaacctatcacccgaactgtctcacatgactctctcgcccgagctgtctcagactaacctttcccccgcactcggacagatgcccatctcccctgacctgtctcatacaactctctctctcgatttctcacagacaaacctctctcctgaactaagtcagacaaacctgtcacccgcattaggacagatgccactctctcccgacccatcccatacaactctctccttagatcttagtcagactaatcttagtccagaactcagtcagacaaacctatctccagatctgtctgaaatgcccctgttcgcagacctatcacagataccacttacacccgatctggatcagatgactctttctcccgacctgggagaaacagatctgtcgcctaactttgggcaaatgtctctcagtccagatctttcccaggtcacactctcacctgatatatccgatacaactctcttgcctgatctctcacaaatcagtccccctccagacctggatcagattttttatccttctgaatcatctcagtctttgctcctgcaggaatttaatgaatccttcccctatcctgatctcgggcagatgccctccccttctagtcccacacttaacgacactttcttatcaaaggagttcaacccactcgtcatcgttgggctgtccaaagacgggactgattatatcgaaattatccctaaagaagaagtgcagtcaagtgaggatgattatgcagagatagattatgtgccttatgatgatccttataaaacagatgtgcgcactaatatcaattcatctagagatcctgataacatcgctgcctggtacttaaggtctaacaacgggaacaggcgaaactattatatcgccgctgaagagatttcctgggattacagtgaattcgttcagcgcgaaacagacatagaagattcagacgatattcccgaagatacaacatataaaaaagtggtgttcagaaaatatctagattctacattcactaaacgcgatccacggggggaatacgaagaacacctcgggattctaggaccaataattcgcgcggaggtagatgatgtgatccaggtgagattcaaaaacttggcctcccggccctattcactacatgctcatgggctcagttatgaaaaatcttccgaagggaaaacttatgaagatgattccccagaatggttcaaagaagataacgctgtgcagccaaactcatcctatacatatgtatggcacgccacagaacgctcagggccagaaagtccaggatctgcctgtcgcgcgtgggcttactactccgccgtaaacccagagaaagatattcacagtggactgatagggcccctgctgatatgccagaaaggaatactgcacaaagactctaacatgcctatggacatgagggaattcgtactcctctttatgacatttgatgagaaaaaatcatggtactatgaaaaaaagagtcgatctagttggcgactgacttcgagtgaaatgaagaaaagtcacgaattccacgcaataaatggaatgatttactccctgcccgggctcaaaatgtatgaacaggaatgggtacggcttcatctactcaacataggggggtctcaggatattcacgtggttcatttccatgggcagactttactcgaaaatggaaacaaacagcatcagctcggagtatggcctctgttaccaggatcttttaaaactctagaaatgaaagcatcgaaacctgggtggtggctcctaaacacagaagtaggggaaaatcagagagccgggatgcagacgccatttctaatcatggatagagattgtcggatgcccatgggactctcaactgggattatctcagactcgcagatcaaagcgagtgaattcctgggatactgggaacctaggctcgcacgactgaataatggaggatcatataatgcttggtcagtggagaaattagccgccgagtttgcctccaaaccatggattcaggtggatatgcagaaagaagtaattataactgggatacagacacagggagccaaacactatcttaaatcgtgctatacaactgaattctacgtggcttattctagtaaccagataaattggcagattttcaaaggaaattctactcggaatgtaatgtacttcaacgggaattctgatgcttctacaattaaggaaaatcagttcgacccccccatcgtggcacgttatatcagaatttctccaacacgagcctacaataggcccacattgcggctcgaactccaagggtgcgaagtgaacggatgttctacaccactcgggatggaaaatgggaaaattgaaaataagcagataactgcttcttcctttaaaaaatcctggtggggggattattgggaaccattccgggcccggctaaatgcccagggaagagttaatgcttggcaggctaaagccaacaataataaacagtggctggaaatagatctcctcaagataaaaaaaatcactgccataatcacacagggatgtaagtcactctcttcagaaatgtacgtaaagtcatacacaatccattattctgaacagggagtggaatggaaaccctaccggcttaaatcatccatggtggataaaatttttgaagggaatacaaacactaaagggcacgtaaaaaactttttcaaccctccaattatcagtcgcttcataagagtgatccctaaaacatggaaccagagtatcgctcttcggctagaactatttggatgtgatatctat

SEQ ID NO: 9115 - DNA, 6672 bp, synthetic construct
  misc_feature 1..6672: note = source = /note="Description of Artificial Sequence: Synthetic coding sequence"
  source 1..6672: mol_type = other DNA
atgtttccaggatgtcctaggctatgggtgctggtggtgttgggcacctcctgggtgggatggggtagtcaagggacggaagccgctcagctgcggcagttttacgttgccgctcaggggatttcatggtcttaccgtcctgagccaacaaacagcagcctgaatctctctgtcacgagcttcaaaaaaatcgtgtatagggagtacgagccctatttcaagaaggaaaagcctcagtcaaccatcagcggactgttggggcctacactctatgctgaagtcggcgacatcatcaaggtgcacttcaaaaataaggccgataagcctctgtcaattcacccacagggcattcggtattccaaactcagcgagggggcttcctatttggatcacaccttccccgcggaaaaaatggacgacgcggtggctccaggaagagaatatacctacgagtggtcaattagcgaggactctggtccgacacatgacgacccaccttgcctgacacatatctattattctcatgaaaacctgattgaggacttcaatagtggtctgatcggtccccttctcatttgcaagaaaggaactctgaccgagggaggaacccagaagaccttcgataagcaaattgtgctgttatttgccgtttttgacgaatctaagtcctggtcacagtcctcttctctcatgtatactgtgaacggctatgtgaacggcacaatgcctgatattaccgtatgcgcacatgatcatatcagttggcacctgctggggatgtcctccgggcctgagctctttagcatccactttaatggccaggttctcgaacagaaccaccataaagtatccgctattactttagtatccgctacttcgactacagccaatatgactgttggacctgagggaaaatggatcattagcagcctgacccccaagcacttgcaggcaggaatgcaggcctatattgacataaaaaattgtcctaagaagacaagaaaccttaaaaagatcacgagggagcagaggcgccacatgaagcggtgggagtactttattgccgccgaagaagtgatatgggattatgcccctgttattcccgcgaacatggacaaaaaatacagaagccagcaccttgacaatttctccaaccagattggaaaacattacaagaaggtcatgtacacccaatacgaggacgagtcattcacaaaacacactgttaatcctaacatgaaggaagatggtatccttgggcctattatcagggcccaggtcagggacacactaaaaatcgtctttaaaaacatggcttccaggccatactcgatttatccccatggagttacattcagcccatatgaggatgaggtcaatagctcttttaccagtggtaggaataacactatgattcgagccgtgcaacctggagaaacttatacgtataaatggaacatactggagttcgacgaaccaaccgagaatgatgcgcagtgcctcactagaccctactacagtgatgtagatattatgcgggacattgcttcaggtctaatcggactattgctgatttgcaagtccagatctttggatcgacgaggcatacagagagcagcggatattgagcagcaggccgtcttcgctgtatttgacgagaacaagtcatggtatctcgaggacaacattaataagttctgcgaaaaccctgacgaggtaaagcgagatgatcccaagttctatgagagcaatattatgtccaccatcaatggttacgtgccggagtccattacaactcttggcttctgcttcgatgacactgtccaatggcacttttgttcggttggaacacaaaatgaaattctgaccatacatttcaccggtcatagctttatttacggcaaacgtcacgaggatacactgaccctgttccccatgagaggggaatccgttacggttacgatggataacgtcggcacctggatgttaacgtccatgaatagctcccctagatccaaaaaactgcgcctgaagtttcgggacgttaagtgcattccagacgacgatgaagatagttatgagatcttcgagccacctgaatccaccgtgatggccactcgcaagatgcacgacagacttgagcctgaagacgaagagagcgacgcagactatgattatcagaatcgtctggccgccgccctggggatcaggtcgtttaggaattcctcgctgaaccaagaagaggaggagttcaatctaaccgccctagctcttgagaacggaaccgaattcgtctccagtaacaccgatattatcgtcggaagcaattacagctcgcctagcaacatcagcaagttcaccgtgaataatctcgccgaaccgcagaaggctcctagtcatcaacaggcgacaactgccggatcccctctccgtcatctcatcggcaaaaatagcgtgctcaattcgtccactgccgagcacagtagcccctatagcgaggaccccatcgaggatcccctccagccagatgtgaccggaatccgcctactgtccttaggagccggagaattcaaatcccaggagcacgcaaagcacaaaggtccgaaggtggaaagggaccaagctgcgaaacaccgcttttcctggatgaagctgctggcccataaggtggggcgccatttgagccaggacaccggctcccccagtggcatgagaccttgggaagatctgcctagccaggacaccggcagtcccagtagaatgcgcccatggaaagaccctccgtccgatctgctcctactaaagcagtccaactcatcaaaaatccttgtcggccggtggcacctggcatcagaaaaagggtcttatgagattatccaggacacagacgaggacacagcagtgaataattggctgatctctccacagaacgcttcccgcgcctggggcgagtcaacgcctctagccaataaaccgggcaaacagtctgggcacccaaaatttccgcgagtcagacataagagcctacaggtccgccaggacggggggaagtcgcgccttaaaaaatctcaattcctcatcaaaacaagaaaaaaaaagaaggaaaagcatacccatcacgctccactgtcaccccggacctttcaccctctgcggtcggaagcttataacacttttagcgagaggaggcttaaacattccctcgttctgcacaagtctaatgaaactagcttgcccaccgaccttaaccagaccttaccatccatggactttggatggatcgcttcacttccagaccacaatcagaatagttccaacgataccggtcaagcctcatgccctccaggcctttatcagacggttccccccgaagagcattaccagaccttccccatacaggatcccgatcagatgcatagcactagcgatcctagtcacagatccagcagccccgagctttccgagatgctggagtatgatcgttctcataagagctttcccaccgatatttcccagatgtcacccagctctgagcacgaagtctggcagaccgtaatcagtccagacctctctcaagtcactctctcaccggagttgagccagacaaacttgtcccccgacctaagtcacaccacactctcccctgagctaatccagaggaacttgtccccggctctgggccagatgcccattagtcctgatctctcacacacgaccctctcccccgatctgagtcacaccaccctgagtttggacctgagccagacaaatttgagtcctgaactgagccagaccaacctgtcaccagccctagggcagatgccgctcagcccagacctgtctcacacaaccctctcactggatttttcacagaccaatttgagcccggagctgtcacacatgactctgagcccagagctgagccagaccaacctgagcccagctctcgggcagatgcccatatcccctgacctctctcacactactctgtcacttgacttttctcagacaaatctcagtcctgagctgtcacaaaccaatctgtcgccagccctgggacaaatgcctctgtcccctgatcccagccatactacattgtccttggacctaagccagacaaatctgtccccagaattgtcacagaccaacttaagcccagacttgtccgagatgcctctgtttgcagacctgtcccagatccccctgactcccgatctggatcagatgactctgtcaccagacctcggagaaacggacctgtcccccaacttcggacagatgagcctctcacccgacctaagtcaagtaacactgtcgcccgatatctcagatacaaccctgctgcccgatctctcacagatctcccctccaccagacctggaccagattttttatccatcagaatcttcccaaagccttttgctacaggaattcaatgaatccttcccttatccagatcttggccagatgcctagcccctctagtccaacgttaaatgatacatttctctccaaggaatttaatcctctagtcatagtgggactgtctaaggacggtactgactacatcgaaatcatccctaaagaggaggtccagtcaagcgaagatgattatgccgaaatagactacgtgccatacgatgacccgtacaagaccgatgtgagaaccaacattaacagctctcgtgatccggacaacatcgccgcttggtatctcaggtccaacaatggaaataggcgcaattattatatcgccgctgaggagatctcttgggattacagcgagtttgttcagagagagacggatatcgaggactcagacgacattccagaagatacaacctataagaaggtggtatttagaaagtaccttgactctactttcacgaagcgggaccctaggggagagtacgaagagcacctgggcattcttggaccaattattcgcgcagaagtggacgatgtcattcaggtgcgattcaagaatctcgctagcaggccttattccctgcatgcacatggtttgtcctatgagaaatcatcggaggggaagacttacgaggacgactccccagaatggtttaaggaggataatgccgtccaaccaaattcctcatatacctatgtgtggcatgcgactgagcgctcagggcctgaatcccccgggtccgcttgtagagcttgggcctattatagcgcagtgaaccccgaaaaagatatacactctggacttataggacccctgcttatctgccagaagggcatactgcacaaagacagcaacatgcccatggacatgcgggaatttgtcctactattcatgacgtttgacgaaaagaagtcttggtactacgaaaagaaaagccgcagctcgtggcgcttgacatcatctgaaatgaagaaatctcacgagtttcacgccataaatggcatgatctactctctgccaggactgaagatgtacgaacaggagtgggttagacttcatctcctcaacatcgggggctctcaagatatccatgtcgtccatttccacggccagaccctgctcgaaaatgggaataagcagcaccagctaggggtctggccgctacttccaggctccttcaagacgctggagatgaaagctagtaagccaggatggtggttgcttaacaccgaagtgggcgaaaaccagcgggcaggcatgcaaacccctttcctgatcatggatcgcgactgtaggatgcccatggggttgtcaacgggcattataagcgattcacaaattaaggcgagcgagtttctgggctactgggagccgcgcctagccagactgaataatggtgggtcatacaacgcctggtccgtggagaaactcgccgccgaatttgcgtctaaaccatggatccaggtcgacatgcagaaggaagtcatcatcaccggaatccagacccagggggccaagcactatctgaaatcgtgttataccaccgagttctacgttgcgtactcatcgaatcagataaattggcaaatctttaaggggaattccacgagaaacgtgatgtacttcaatggaaactctgatgcctctaccataaaggaaaatcagttcgatcccccaatagttgctagatacatcagaatctcccctaccagggcgtacaatagacctacgctacgactggagcttcaagggtgcgaagtgaacggatgctccacccctctgggcatggaaaatggaaagatagagaataagcagataactgccagtagcttcaaaaagtcctggtggggggactactgggagcctttccgggctcgtctcaacgcccagggtagagtgaatgcctggcaggctaaggccaacaacaacaaacagtggctagagattgacctcctaaaaattaagaagattactgccataatcacccagggctgcaaatcgctgtcctcagaaatgtacgtcaagtcgtacaccatacattattctgaacagggcgtcgaatggaaaccctatcggctgaagagctctatggtagacaagatcttcgagggtaatacaaacactaagggccatgtcaagaattttttcaatcctcctatcataagccggttcatccgcgttataccaaagacatggaatcagtctattgccttgaggctggaactgtttggatgcgatatttac

SEQ ID NO: 9116 - DNA, 6672 bp, synthetic construct
  misc_feature 1..6672: note = source = /note="Description of Artificial Sequence: Synthetic coding sequence"
  source 1..6672: mol_type = other DNA
atgtttccgggctgtcctagattatgggtactggttgttttgggaacatcatgggtgggctggggctctcagggtacggaagcagctcaattgagacaattttacgtcgccgcgcaggggatctcttggagttatcgaccagagccgacaaacagctctctcaatctgtccgtaacaagcttcaagaaaattgtttatcgcgaatacgagccttatttcaaaaaagaaaaaccacaatcaacaatatcaggcctattagggccaacattatacgcggaagtgggcgacatcatcaaagtacactttaaaaacaaagcggacaagcccttatccatccatcctcaaggcattcgctattctaagctttcggagggagcttcatatctggatcacacattcccggcagaaaaaatggatgacgcggttgcacccggtagagaatatacttacgaatggtcaatttctgaagacagtggcccaacacacgatgatcccccctgcctcacacatatttattattcgcatgaaaatttgattgaggactttaattccggcctcatcggcccgctgttaatctgcaaaaagggcactctgactgagggtggcacccagaagacattcgataaacagatcgtgttgcttttcgctgttttcgatgaatctaaatcttggtctcagtcgagctccttgatgtatacggtgaatggctatgtaaacgggacaatgccagacatcacagtttgtgctcatgatcatatctcctggcatttgttaggcatgagctctggcccagaattgtttagcattcatttcaacggccaagtcctcgaacagaatcatcataaagtaagtgccattacacttgtatctgcaacgtccacaacggcaaacatgacagtaggccctgaaggcaaatggattatctctagccttacgccaaaacatctgcaggcgggcatgcaagcttacatcgacatcaaaaactgcccgaaaaaaacacggaatcttaaaaaaattactcgggagcagcgccgccatatgaaaagatgggaatatttcattgcagctgaagaagtgatctgggattatgcaccggtcattccagcaaatatggataaaaaatatcggagccagcacttagataacttctctaatcaaataggaaaacattataaaaaagtcatgtatactcaatatgaggatgaatcttttactaaacatacagtgaatcccaacatgaaagaagatgggattttaggaccgattattagagcacaggttcgtgatacattaaaaattgttttcaaaaatatggcgtctaggccatattccatctatccgcatggggtaactttcagcccgtatgaagacgaggtcaactcatcctttacatcagggcgaaacaacacgatgatccgtgctgtccaacctggggaaacctatacctataaatggaatattcttgagtttgacgagcctacagaaaatgatgcacagtgccttaccagaccttactattcggacgttgacattatgcgtgacattgcaagtggattgattggactgttacttatctgtaaatctagatctttggatcgtaggggtattcagagagcagccgatatcgagcagcaggcagtgtttgctgtgttcgacgaaaataaatcttggtatttggaagataacattaataaattctgtgaaaacccagatgaagtcaagcgcgatgaccctaaattttatgaaagcaatataatgtccacgattaacggctatgtgcctgaatccattacaacactgggcttttgttttgacgacacagtccaatggcatttctgtagtgtgggaactcagaatgagatcctgactattcatttcaccggacactctttcatttatggaaaacgccatgaggatacactaacactgtttccgatgcgtggtgaatctgtcacggttaccatggataatgttggcacgtggatgctcacgtcaatgaattcatctcctaggtctaaaaaacttagacttaagtttagggatgtaaagtgtatccccgatgacgatgaagattcttatgaaatctttgaaccgccagagtccacagttatggccacacggaaaatgcacgatcgtctggaaccggaagatgaagaaagcgacgcagattacgattatcaaaaccgcttggcggcagctttaggcattagatctttccgcaattcttccttaaaccaagaagaagaggaatttaacctgaccgcactggcactagagaacgggacggaatttgtgtcctctaatacggacattatcgttggttctaattattcgagcccatctaatattagcaagtttaccgttaataacttagctgaacctcagaaggcgccgtctcaccagcaagctacgacagctggttcaccgcttaggcatctgatcggaaaaaatagcgtattgaattcgagcactgccgagcattcttctccgtattctgaggaccctatcgaagatccactgcagccagatgtcacaggcatcagattactgagtctgggcgcaggagaatttaagtcgcaggaacatgccaaacataaaggacctaaggtagagcgcgaccaagccgcaaagcatagattttcttggatgaaactacttgcacataaggttggcagacacttaagccaggatacagggtctccttcgggcatgcgtccatgggaagacttgccgtcacaggataccggaagcccgtcgagaatgcggccatggaaagacccgccatccgacctactgttgcttaaacaatctaattcttccaaaatccttgtcggtagatggcatctggcctccgagaaaggcagctacgaaattatacaggatacggatgaagataccgccgtgaataattggctgatctcaccacaaaatgccagtcgcgcatggggtgaatccacaccgcttgcaaacaagccgggtaaacaaagcggccatcctaagtttccgagggtacgacataaaagtcttcaggttcggcaagatggtggaaaatcacgcctcaaaaaatcccaattcttaattaaaacgagaaagaaaaaaaaagagaagcacacccatcatgcgccgctctctccaagaacgttccacccgttacgtagcgaagcgtacaacacctttagcgaacgccgtttgaaacacagcttagtgttgcataaatcaaacgaaacaagcctaccaacagatctgaatcagacccttccgagtatggattttggttggatagcatcactgccggatcataatcagaattcgtccaatgacaccggacaggcttcatgtccgccgggcttatatcagaccgtgccgccagaagaacattatcaaacgtttccgattcaggacccagatcaaatgcacagcacatctgacccatcacatagatcttcatcaccggagctctcagaaatgcttgagtatgaccgttcccacaagtcctttcccacggacattagtcaaatgagcccgagcagcgagcatgaagtttggcaaacggtcatcagcccggacttgagccaagtaacactgtcacctgaactgagtcaaacaaatttgtctccggatctctctcatacgaccctttcccccgaattaattcaacgtaacttgagcccagcgttgggacagatgcctatttctccagatctctcccatacaaccttgtctccagatcttagccatacaacattatcactcgatctttcccaaacgaatctgagtccggaattatcgcaaacaaacctgagtccggccttagggcagatgcccttatcaccggatctaagccatacgacgttatcgttagatttttctcaaacaaatctttctccggaactgtcccacatgacactgtctccggaattgtctcaaaccaatctgtctcctgccttaggccaaatgcctatctcaccggatctttctcatacaacccttagcttagactttagccagacgaacttatcacctgaactttcacagactaacttatcccctgccttaggccaaatgccgttgtccccggaccctagccatacaacactttctctggacttaagtcaaacgaatcttagtcctgagctctcccaaacaaatctttctcccgaccttagcgaaatgccgctatttgcagatttatcccagatacccctcacgccggaccttgatcaaatgacattgtcacctgatttaggcgaaacagacctttctcctaattttggacagatgtccctgtcgcctgatttatctcaagtcacgctgtctcccgacatcagcgacacgacactgttacctgatttgtcacaaatttcaccgccacccgatttggatcagatcttctatcctagcgaaagcagtcaatcactcctccttcaggaatttaatgaaagctttccatatcccgatctgggtcaaatgccatcgccttcatcccctactttaaacgatacgtttttaagcaaagaatttaaccccttggttattgtaggactgagcaaggatggtacagattatattgaaatcatcccgaaagaggaagtacaatcaagcgaagatgactatgcagaaattgattacgtcccatatgatgatccctataagacggatgtgagaacgaatattaactcatctcgcgatcctgacaatatagctgcatggtacctcagatcaaacaatggcaaccgccgtaactattacattgctgcagaagaaatttcctgggactattctgagttcgtacagcgtgaaactgatattgaagatagtgacgatatcccggaggataccacctacaaaaaagtagtttttcgcaaatatctggacagtacgtttacaaagcgcgaccctagaggagagtatgaagaacatttgggaattcttggaccgattattagagcggaagtagacgacgtaatacaggtgagattcaagaacttggcttcccgcccgtattccttacatgcacatggcctttcgtatgaaaaaagctctgaaggcaaaacatatgaggacgattccccagaatggttcaaagaggataatgcggtacagccaaacagttcttatacgtacgtgtggcatgctacggaacggtctggaccggaatcaccaggcagcgcttgtcgtgcatgggcttattattcagcagtgaacccggaaaaagatattcacagcgggttaataggcccgctcctcatctgtcagaaggggattcttcataaagatagcaacatgccgatggatatgcgggaattcgttttattatttatgaccttcgacgagaaaaaatcttggtattatgaaaaaaaaagtagatcatcgtggcgccttacgtcatccgaaatgaaaaaatcccatgagtttcatgcaatcaatggaatgatctattctctacctggcttaaaaatgtatgaacaggaatgggttcgtttacatcttcttaatatcggcgggtcgcaagatatacatgtcgttcactttcatgggcagacgctgctggagaacggaaataaacagcatcagcttggcgtgtggccgttgcttccggggtcattcaagactcttgaaatgaaagcgtctaagccaggctggtggcttcttaacacagaggtcggtgaaaaccagcgggctggtatgcaaacgccgtttctgataatggaccgagattgcagaatgcctatggggttaagtaccggtatcattagcgacagccaaatcaaagcctctgaatttttaggttactgggagcctcgtctggcccgtctgaataacggtggaagttataacgcctggagcgtcgaaaagctagctgccgaattcgcatcaaaaccgtggatccaggttgatatgcaaaaagaggttatcattaccggcattcaaacacaaggggccaaacattatttgaaatcatgctatactacggaattttatgtcgcttatagctcaaatcaaatcaattggcaaatttttaagggaaactcaacgcgtaatgtgatgtattttaacggaaacagcgatgcttctactattaaggaaaatcaattcgatccgccgatagtggcccggtatattcgcatttctccgacgagagcttacaatagaccgacattacgtctggaattacagggatgtgaggtgaacggctgcagtacgcctcttggtatggaaaacggtaagattgaaaataaacagattacggcaagttcatttaaaaaatcttggtggggagattattgggaaccttttcgcgcacggctcaacgctcaaggaagagtgaatgcgtggcaagctaaagcaaacaataataagcagtggctcgagatcgaccttctcaagattaaaaaaattactgcgattattacacaaggatgtaagtcattgtcatccgaaatgtatgtcaaatcatatacaattcactatagcgaacaaggagtggaatggaaaccatatagattaaagtcaagcatggtcgataaaatcttcgaaggcaacactaataccaaaggacatgttaaaaacttctttaatccgccgattatttcgcgcttcatccgagtaataccaaaaacctggaaccagtccatagctctgagattagaactgtttggctgtgatatttat

SEQ ID NO: 9117 - DNA, 6672 bp, synthetic construct
  misc_feature 1..6672: note = source = /note="Description of Artificial Sequence: Synthetic coding sequence"
  source 1..6672: mol_type = other DNA
atgttccccggctgcccaaggctgtgggtgctagtggttctaggcacatcttgggtgggctggggcagtcagggcacagaggctgcgcaactgcgccaattttatgtcgccgcgcagggaatatcatggtcctataggccagagcctaccaactcctcattgaacctatccgtcacatcctttaagaagatcgtataccgcgagtatgaaccatactttaagaaggagaaaccgcagagtactatcagtgggttgctgggccctactctgtatgccgaagtgggcgacattattaaggtgcattttaagaataaggcagataaacctctgtccatacacccccaggggattaggtacagtaaactctctgaaggagcctcttacctggaccatacattcccagccgagaagatggacgacgctgtcgctcccggtagagagtatacatatgaatggtctatcagtgaagatagtgggcctacgcacgacgatcccccctgtcttacacatatatattattcccatgagaatctgatagaggacttcaacagcgggctgattggaccgctgctgatctgcaagaaaggcaccttgacagagggcggtacccagaaaacgttcgacaaacagattgtcctgctgtttgcggtgtttgatgagtcgaaaagttggtcgcagtcctcaagccttatgtacaccgtcaatggttacgtcaatgggacaatgcccgacattacggtatgtgcccatgaccacatctcatggcacctcttaggtatgtcctccgggccagagctgtttagtatccacttcaacggacaggtgctcgagcagaaccatcacaaagtctctgctataaccctggtttcagcaacttcgactactgccaacatgacagtgggccccgagggtaagtggatcattagctccctgacaccgaaacatctgcaagctgggatgcaagcctatatagatattaagaattgccccaaaaagactagaaatctcaaaaagattactagggaacagagacggcatatgaagagatgggagtattttatcgctgcagaggaagtcatttgggattatgcaccagtcattcctgccaacatggacaaaaagtataggagccagcatctcgataatttttctaaccagatcggcaaacactataagaaggtcatgtatactcagtatgaggacgagagttttaccaaacacacagtaaatcccaatatgaaggaggacggtatcttaggacctattattcgcgcccaggtgcgcgataccctgaagatcgtattcaaaaatatggcatcccgtccgtactccatttacccgcacggagttacattctcaccatatgaagatgaggtgaactcttcatttacctccggcagaaataacaccatgatccgcgcagtccagcccggtgagacctatacctataagtggaatattttggagtttgatgaacccactgagaacgacgcacagtgcctcactcggccgtactattcagacgttgacataatgagggacatcgccagtggactcatcgggctgctgctgatttgcaaatcacggagtctggacaggaggggcatacagcgggccgcagacattgagcaacaggccgtgtttgcggtctttgacgagaacaaatcgtggtaccttgaagataatatcaacaagttttgcgagaacccggatgaggtcaaacgagacgatccgaaattttatgaaagtaatattatgtctaccataaatggttacgtcccagaatccattacaacactcgggttctgctttgacgatactgtgcagtggcatttttgttccgtgggaacccagaatgaaattctcacgattcattttaccggccattcgttcatctacggaaagcggcacgaggatacactcactctgttcccgatgaggggcgagagcgtcacggttactatggacaacgtcggaacatggatgctgacatctatgaacagcagtcctcgcagcaaaaagctcaggctgaagttccgcgatgttaagtgtatcccggacgatgatgaggactcatatgaaatctttgaaccgcccgagagtactgttatggccacacgaaaaatgcacgaccggttagagccagaggatgaggagtcagacgctgactatgactaccagaatcggctggcagccgcactggggatcagatccttccgcaatagcagcctgaatcaggaagaggaagagtttaaccttacagctttagccttggagaacgggaccgagttcgtatcgtctaatacagacattatcgtgggcagtaactactcttccccaagcaacatctctaaatttaccgtcaacaacctcgcggaacctcagaaagcaccttcacatcagcaagcaactacagctgggagccctctgagacacctgattggtaaaaactctgtccttaacagcagcactgctgagcacagttccccatactccgaggatccgatagaagaccctttgcagccagacgtcacgggtatccggctactgtctctgggggcaggagaatttaagtctcaggagcacgcaaagcataaggggcctaaggttgagagagatcaagcagcaaagcacaggttcagttggatgaagcttctcgcacataaagtggggcggcacctcagccaggatacaggatccccctctggcatgaggccctgggaagatctgcctagccaggacaccgggtcgccgtcacgtatgaggccttggaaagatcctccctctgacctgctgctgttgaagcagtcaaattcaagcaagatactggtaggcaggtggcatctggcctctgagaagggcagctatgaaattatccaggacaccgacgaagacaccgctgtgaataattggctcatctctccgcagaatgcctccagggcttggggagagtctacccccctcgcgaacaagccgggcaaacagtccggtcaccctaagtttccgcgcgttaggcataagtcactgcaggtcagacaggatggaggaaaatcacggctgaaaaagtcacagttcctgatcaaaacccggaagaagaagaaagaaaaacatacgcaccacgccccactcagtccgcgaacgtttcaccccctgaggtccgaggcctacaacactttctctgaaaggcggcttaagcacagtcttgtcctccacaaatcaaatgaaacaagcctcccgacagacctgaatcagacgctaccatccatggactttggctggatcgcgtcccttcctgatcacaatcagaattctagcaatgatactggccaggcctcttgcccacccggcctctaccaaaccgtacccccagaagaacactaccagacattcccaattcaggatcctgatcagatgcattctacttcagatccgtcacatcgatcgtcaagtccagagctctccgaaatgctggaatatgatagatctcacaagtccttcccaaccgacatcagccagatgtcgccaagcagtgagcacgaagtttggcaaactgtcatatcccctgatctgagccaggtcacactctctccagagttgagtcaaaccaacctcagccccgacctctcccataccacattgagccccgaactcatccagaggaatctgtcaccagccctcggccaaatgccaatctctcccgatctctcgcataccaccctaagtcccgacttgagccacacaaccttgagtctagaccttagccagactaacctgtcacccgaactctcacagaccaacctctctcccgcactgggacagatgcccctctcacccgacctttcccatactactctgagcctcgacttttcccagacgaatctctctccagagctgagccacatgacgcttagccctgaactgtcccagacaaatctgtctcccgctctggggcagatgcccatcagccctgatctgagccacacaacactctctctcgacttcagccaaacaaacctcagtcctgagctgagccagaccaaccttagtcccgcactggggcagatgccattaagccccgacccgtcccacacaacattaagcttggatctgagccaaaccaacctcagccctgagctcagtcagactaaccttagccccgacctctcagaaatgcctcttttcgcggacctctctcaaatacctctgaccccagatctggatcagatgaccctgtctccggacctaggtgaaacagacttgtcccccaattttggtcaaatgagtttaagccctgatctctcacaggttaccctgtcacctgacatctctgacactactctattacccgacttgtcccaaattagcccgccgcctgatctggaccaaatcttttatccttctgagagctcacagtctctgcttctccaggagtttaacgaatcattcccctaccccgaccttggccagatgccgtcaccatcctcacccaccctgaatgacaccttcctgtcaaaagaattcaaccccctggtgattgtggggctctctaaagacgggactgattacatcgaaattatccccaaggaggaggtgcagtcgtcagaggatgattatgcggagatcgactatgtcccttatgacgacccttataaaacggatgtccgtacaaacatcaactcttccagggatcctgacaatatcgctgcgtggtacctccggtctaataacggtaacagacgtaattactatattgccgcggaagagatttcttgggattacagcgagttcgtccaaagagagaccgatatcgaggacagtgatgatattcccgaggacaccacatataaaaaagtggtcttccgcaagtacctagactctacatttacaaagcgagaccccagaggggagtatgaagagcaccttggcatattaggcccaataatacgagctgaagtggatgacgtcatccaggtgagattcaagaacctggcatctaggccatattctttgcatgctcatggcttatcttacgaaaagagcagcgagggtaaaacctatgaagacgacagccctgaatggtttaaagaggacaatgccgtgcagcctaactcctcgtatacatacgtctggcacgctaccgagcggtcaggccccgaatcccccgggagtgcatgtcgcgcttgggcttactactccgctgtgaaccctgagaaggatattcatagtgggctgatcgggcctctccttatctgtcagaaaggcatcctccacaaggacagtaatatgcccatggatatgagagaattcgtcctactgtttatgacattcgacgagaagaagtcatggtactacgaaaagaaatctcggtccagctggagactgacttctagtgagatgaagaaaagccacgagtttcatgcaattaacgggatgatttactctctacccggcctaaaaatgtacgagcaggagtgggtgcgcctgcacctgctgaatattgggggctctcaggacattcatgtagtccacttccacgggcagactttgttagagaacggtaacaagcagcatcagctaggtgtctggcctctattgcccggctcatttaagactctcgagatgaaagcttcaaagcctgggtggtggctcctgaacactgaagtcggagagaaccagcgcgccgggatgcaaacgccctttctaataatggacagggactgtcggatgccaatggggctgtccaccggtattatttcggattcccagattaaggctagtgagtttctcggttattgggagcctcggcttgctagactgaacaacgggggcagctataatgcctggagtgtcgagaagctggctgctgaattcgcatccaagccatggattcaggtcgatatgcaaaaggaggtaattataactggaatacagactcagggagccaaacactacttgaaatcatgctacaccacggagttctacgtggcatactctagcaatcagatcaattggcagatctttaaagggaatagcaccaggaacgtgatgtacttcaacggcaactctgatgcgagcaccattaaggaaaatcaattcgatccccccatcgttgccaggtatatcagaatcagcccgacacgggcttataatcggcctaccttaagattggaactacagggctgcgaagtcaatggttgttctacgcccctcggtatggagaacggcaaaatcgagaataagcagatcacagcaagcagtttcaaaaaaagctggtggggtgactattgggaacccttcagagcgcgactgaacgcccagggtcgggtcaacgcatggcaggcaaaagccaataataataaacagtggctggagatagatctactaaaaataaagaaaataactgctattatcacccagggatgtaaatcactcagctccgagatgtacgtgaagtcatataccatacattactctgagcagggagttgagtggaagccgtataggcttaaatcctccatggtggacaaaatatttgagggaaatacgaacacgaagggacatgtgaaaaacttctttaacccgcccatcatctcccggttcatacgggtgattcccaaaacctggaaccagtctattgcccttcgcctagaattgttcggctgtgatatttac

SEQ ID NO: 9118 - DNA, 6672 bp, synthetic construct
  misc_feature 1..6672: note = source = /note="Description of Artificial Sequence: Synthetic coding sequence"
  source 1..6672: mol_type = other DNA
atgtttccaggctgccctcggctctgggtgcttgtcgtgttaggtacctcgtgggttgggtggggatcccaaggcaccgaggccgcgcagctccggcagttttacgtggcggcacaaggaatttcctggagctaccgaccagagccgacaaacagtagcctgaatctatcagtaacatcttttaaaaaaattgtttaccgcgaatatgagccatattttaaaaaggaaaagcctcagagtaccatcagtgggctcctcggaccaactctttacgccgaggtcggcgatataataaaagtgcacttcaaaaacaaagcagacaagcccctgagtatccaccctcagggcatccgctattccaagctgtctgaaggagcctcataccttgaccacacatttcccgcagagaagatggacgatgcagttgcgcccgggagagagtacacctatgagtggagcatttctgaggactccgggcctactcatgacgaccccccctgtctcacacacatttattacagtcacgagaacctaattgaggacttcaacagtgggctgattggaccccttctgatttgcaagaaggggacactgacagagggaggaacacagaaaaccttcgataaacagattgtgctgctgtttgcagtgttcgatgagtccaagagttggagtcagtcatcaagtctgatgtacacagttaacgggtatgtaaacggcacaatgccagatattaccgtgtgtgcgcatgatcatattagttggcatctgcttggcatgtcgagtgggccagagctgttctctatccacttcaacgggcaggttcttgagcagaatcaccataaggttagcgctatcactcttgtctctgctaccagcacgactgccaacatgacagtgggccccgagggcaaatggattatcagcagtctcacccccaagcacctgcaggccggaatgcaagcctacattgacataaagaactgtcctaagaagactcgcaatctcaagaaaatcactcgggaacagcgccgccacatgaaaaggtgggaatatttcatagctgccgaggaagtgatttgggactatgcccccgtaattcccgcgaacatggacaaaaagtacaggtcacagcacttagataactttagtaaccagatcggtaagcactataaaaaggtgatgtacacacagtatgaggatgaatctttcaccaaacataccgtgaacccaaacatgaaggaagatggaattctcgggccgattataagggcccaggttcgggacaccctgaagattgtgttcaaaaatatggctagtcgcccatatagcatttaccctcacggggtgacattttcaccgtacgaggatgaagtaaactcaagtttcaccagcggcagaaacaacaccatgattcgggccgtccaacccggcgaaacctacacgtataagtggaatatccttgagtttgacgaaccaaccgagaatgacgcacagtgtttgacccgaccatattacagcgatgtggatattatgcgcgacatcgccagcggcttaattggccttttgttgatttgtaaatccagaagtctggatagacgtgggatacagagagccgccgatatagagcagcaagccgtgtttgccgtttttgatgagaataagtcctggtacctggaggacaacataaataagttttgtgagaacccagatgaggtaaaaagggacgatccaaaattctacgagtcaaatataatgtctactatcaatgggtacgtaccagagagcatcaccactcttggcttttgttttgatgacactgtgcaatggcacttctgctccgttggaactcaaaatgagatactcaccattcacttcaccggacactccttcatctacggcaagcggcacgaagatactctaactctgtttcctatgagaggagagagtgtcaccgtcacgatggataacgttgggacctggatgttgacttctatgaattccagtcctaggtcgaagaagttacggttgaagtttcgggatgtgaagtgtatccccgatgatgatgaggacagttatgaaattttcgagccccctgaaagcacagtgatggccactaggaagatgcacgatagactagagccagaggacgaagaaagcgatgcagactacgactatcaaaaccgactcgctgccgccttaggtatccgcagcttcaggaacagttcactcaatcaggaggaggaagagtttaacctcaccgccctcgcccttgagaatggaaccgagtttgtgtcctccaacacagatatcattgtcggcagcaattatagctctcccagtaacatcagcaagtttaccgttaataatttggcagagccacagaaagccccttcacatcaacaagctaccacagccggttctcctctcaggcatctcattggtaaaaacagcgtgttaaactcttctaccgccgagcacagctccccatattctgaggatccaatcgaagacccattacagccagatgtaacaggcatacggctgctgtcattgggcgcaggggaattcaagagccaagaacacgctaagcacaaggggcctaaagtcgagagagatcaggcagccaagcatagattcagctggatgaagctgttggctcataaagtgggcaggcacttatcccaggacacgggcagtccttctggaatgcgcccatgggaagaccttccttcccaggatactggctctccgtcccgaatgcgcccatggaaagatcctcccagcgatttgcttctgctgaaacaatccaattcgtccaagattctggttggacgctggcatctggcttccgagaaaggaagttatgagataatacaggatacagacgaagacacagcggtaaacaactggcttatcagcccgcagaatgcctctcgcgcgtggggcgagtcaacacctctggcgaataagcccggaaaacaatctggtcatccaaagtttcccagggtgagacataaaagtctgcaggtgcggcaagacggaggaaagagccgtctgaaaaaatcgcagtttttaatcaaaactaggaaaaaaaaaaaggagaaacatacgcatcatgcacctctttcccctaggaccttccatccgcttaggtctgaggcctataacacattttccgagagacggctgaagcactccttagtcctacacaagtcgaacgagacgtccctgccaacggatcttaaccagacgctccctagtatggacttcggatggatcgcgtctctgcccgaccacaatcaaaattcctcaaatgatacaggccaggcttcctgccctccgggtctttatcagaccgtaccccccgaagaacattatcagactttccccatccaggatcccgaccagatgcactcaacttcagatccctcacacaggtcatcgagcccggagctctctgagatgttagagtatgataggagtcacaagagttttcccaccgacatctctcaaatgtctccttccagtgaacatgaggtttggcagaccgtcattagccctgacttaagccaggtgaccctctcaccggagctcagccagacaaacctgtctcccgacctctcgcacacaacactatcacctgagctgatacaacggaacctgtcaccagctctgggccaaatgcccatcagtcccgacctctcacataccacactctcccctgacttaagccacaccacattgtctttggacctctctcaaactaatttgagtcctgaactctctcagacgaatctttccccggctttaggccagatgcccttatcaccagacctgtcccacacaacactcagtctggacttttctcagacaaatctgtccccggagttgtcccatatgactctgtctcccgaactaagccagacaaatctgtcgcctgccttgggacagatgcccatatcaccagatctatctcacactacactatcattggacttctctcagaccaacctgtcccccgagctttctcagacgaacctgagtccagcgctgggacagatgcctctgtcaccagacccatcacacacaacgttgagccttgacttgtcacagaccaatctgtctcccgaactaagtcaaactaatctctcacccgacttgtctgagatgcctctatttgcagacctgtctcagattcctctcacaccagatctggaccaaatgacattgtcacctgatttaggagaaacggaccttagcccaaactttgggcagatgtccttatccccggacctcagccaggtcaccttgtccccagacatatctgacaccacgctgttgccagacctgagtcaaatcagtccccctcccgacttagatcagatcttttaccccagtgaaagctcacagagcctgctcctccaggagtttaatgagagtttcccctacccagatctcggacagatgccatcccccagctcacctacacttaacgacacatttctgtccaaggagttcaatcctcttgtgatagtggggctatcaaaggatggcactgattacattgaaatcattcctaaggaagaggttcagagttcagaggacgactatgctgagattgactacgtgccctatgacgatccttacaaaacagacgtccgcacgaacattaactccagcagagacccagacaacatcgcagcctggtaccttagatccaacaatgggaaccgtaggaactactatattgcagccgaggaaattagctgggactattccgagtttgttcagagggagacagatatagaagattccgacgatattccagaggacacaacctacaaaaaggtggtcttccgtaagtacctcgactctacctttacaaaacgtgacccacggggtgagtacgaagaacacctgggaatcctgggcccaatcattcgcgcagaagtggacgacgtcatacaagttagattcaagaatttggcctcaaggccttattcgctgcatgctcatggactttcctatgagaagagcagcgaggggaaaacatatgaagacgattcacccgagtggtttaaggaggacaacgccgttcagcctaattccagttatacatatgtgtggcacgccaccgaacggagcggaccggagtcccccggctccgcatgccgagcgtgggcatattattcggcagtcaaccccgagaaggacatacattccgggctcattggcccacttctgatctgccaaaagggcatattacataaggactctaatatgcccatggacatgagagagttcgtcctactgtttatgacttttgacgagaagaagtcttggtattacgaaaagaaaagtagaagctcctggcgcttgacatcgtccgagatgaaaaagtctcatgaatttcacgcgatcaacggcatgatctactctctgccggggctgaaaatgtatgagcaggagtgggtccgccttcacctgctgaatataggcgggtcccaagatatacacgtcgttcatttccatggacagaccctgctggaaaacgggaataagcaacaccagctcggggtttggccgttgttgcctggctccttcaagactctggaaatgaaggcaagcaagcccggctggtggctcctgaacactgaagtgggcgaaaatcaacgcgcagggatgcagacaccatttctcatcatggacagggattgtcgaatgcctatggggctgagcactggcattatctctgattcccaaatcaaagcctccgagttccttgggtactgggaaccacgcctggccaggcttaacaacgggggatcctacaacgcatggtctgtggagaagctggccgccgagttcgcctctaaaccgtggatacaagtggatatgcagaaagaggtgattatcacagggatccagactcaaggtgccaagcattacctgaaaagctgctatacaaccgagttctatgtcgcctattcgagcaaccagatcaactggcagatatttaaaggtaattccactaggaacgtgatgtacttcaacggtaactctgacgcttctacaataaaagaaaaccagtttgatcctcctattgttgcccggtacatccggatctcccccaccagggcctacaatcggccgactctgcggctcgagctgcagggatgcgaagtgaacggatgctccacacctttaggcatggagaacggaaagattgagaacaagcaaatcactgctagcagtttcaagaaatcgtggtggggggactattgggagccttttcgcgcccggctcaacgcccagggaagagtgaatgcatggcaggcaaaggcaaacaataacaagcagtggctggagatcgacctcttgaagataaagaagattactgcgataattactcagggctgtaaatctctctctagtgaaatgtatgttaaaagctatacaatccactacagtgaacagggtgtggagtggaaaccctaccgattgaagagctctatggttgacaaaatttttgagggcaacaccaacactaaaggacatgtgaaaaattttttcaacccccccatcatcagtaggtttattagggtaatccccaagacctggaatcaatctatagcacttcgactggaactctttggctgcgacatctac

SEQ ID NO: 9119 - DNA, 6672 bp, synthetic construct
  misc_feature 1..6672: note = source = /note="Description of Artificial Sequence: Synthetic coding sequence"
  source 1..6672: mol_type = other DNA
atgtttccagggtgtccccgcctgtgggtccttgtcgttttagggacttcctgggtcggttggggctctcaggggaccgaagctgcccagcttagacagttctatgtcgccgctcagggcatctcttggagctaccgcccagagccaacaaatagctcactgaatctgtcagtaacaagtttcaaaaagatcgtttacagagagtatgaaccttactttaaaaaggagaaaccacagtccactatctcagggctgctaggccctaccctgtacgccgaggtgggagatatcattaaggtgcattttaagaataaagccgacaaacctcttagtatccatccacaaggaattagatatagtaagctaagtgaaggcgctagctacctggatcatacctttccggctgaaaaaatggacgacgccgtggcaccaggaagagagtacacatatgagtggagcatcagtgaggacagcggacccactcatgacgacccgccatgcctaacacacatttactattcacacgagaatctgatcgaggacttcaacagtggactgatagggccactcttgatctgcaagaaggggaccttaaccgagggcggcacgcagaagacgtttgacaagcagattgtgcttctgttcgcagtctttgacgagtcgaagagttggtcacagagtagtagtctgatgtatacagtgaacggctatgtgaatggcactatgcctgatatcacagtttgcgctcacgaccatatcagttggcacctactcggtatgagctcaggacctgagttgttcagtattcacttcaacggacaggtcctagagcaaaaccaccacaaggtgagtgcaatcaccctcgtgtccgcaaccagtacaaccgctaacatgacggtagggcccgaaggtaaatggattatcagtagcctgactcccaagcacctccaagccggtatgcaggcctacatagatatcaagaattgtcccaagaaaacccggaacctcaagaagatcacccgggaacagcggcgacacatgaagagatgggagtatttcatcgccgccgaggaggtcatttgggattatgccccagtaatccccgctaacatggacaaaaaatacagatctcagcatctggacaacttttctaaccagatcggcaagcactataagaaggttatgtacacccagtatgaagatgagagtttcaccaagcacacagtcaaccctaacatgaaggaggatggcattctggggcccatcatacgggcacaggtgcgggacaccctgaaaattgtcttcaaaaacatggccagtcgcccgtatagtatttacccacacggggtaactttcagcccatacgaagacgaggtgaacagctctttcacttcaggccgtaacaacacgatgatccgtgctgtgcagcccggcgagacttacacatacaagtggaatattctggagttcgatgaacccaccgaaaacgacgcgcagtgcttgactaggccctattattcggatgtggatatcatgagagatatcgcttcagggctcatcggcttgctcctcatatgtaagtcccgctcgctagatcggcgagggatacagcgggcagccgatatcgaacagcaggctgtgtttgctgtattcgatgaaaataagtcttggtatcttgaagataacattaacaaattttgtgagaaccccgatgaggtcaagcgggacgacccaaaattttacgagtctaatatcatgagcacgattaatgggtacgtgccggagtctatcacgactcttgggttctgttttgacgacacagtccaatggcacttttgtagtgtggggacccagaatgaaatcctgaccatccattttaccggacattccttcatctacgggaaacgccacgaggacacccttaccttgttcccaatgcggggcgagtccgtaaccgtgacgatggataatgtcggcacctggatgttgacaagcatgaactcatctcctagatccaaaaagctgagactaaagttcagagacgtgaaatgtatccctgacgatgatgaagactcttacgagatctttgaaccacccgaatctactgtgatggctactcggaagatgcacgataggttggaaccggaggatgaggaatccgacgccgactatgactaccaaaatagactggccgctgccctgggcataagatccttcaggaactcatctctgaatcaggaagaagaagagtttaatctgaccgcactggctctcgagaacggcaccgagttcgtttcttcgaatacagacattattgttggctctaactactcatccccttcaaatatcagcaagtttactgtgaataatctcgccgagcctcagaaggcgcctagccatcagcaggcgactaccgccggatctccactccgtcacctcatcggtaagaacagcgtcctcaacagctctaccgccgagcacagctccccttacagcgaagaccctatcgaagatccattgcagcccgatgtgactgggattcggctactgtctcttggcgccggcgagtttaaatctcaggagcacgccaaacacaaaggccctaaggtggagcgggatcaggccgccaagcataggttttcctggatgaagctcttagcccataaggtggggcggcacttatcccaggacaccgggtccccgtcggggatgcggccttgggaggacctcccatcacaggacacaggcagtccttcacggatgcgaccttggaaagatcccccctcagatttgctgctgttgaaacagtctaattcctcaaagatccttgttggacgttggcacctcgcaagcgaaaagggttcatatgagattatacaggacacggatgaggacacagctgtcaataattggctgatatccccccagaacgcatctagagcatggggggaatcaacaccgctggccaataagccgggcaagcagtcaggccatccaaaatttcccagggtgcgacataaatctctgcaagtcagacaggacggagggaaatccagactgaagaaatcccagtttctgattaagactaggaaaaagaagaaagagaagcacacccatcacgcgccactgagtccacgaaccttccatcccctccgctcagaggcttataataccttttccgagaggcgactgaagcacagccttgttctgcacaaaagcaacgaaacatcactgcctaccgacctgaatcaaacgctccctagcatggattttggttggatcgccagtttgccggatcataaccagaacagcagcaatgatacgggccaggcatcatgcccccctggattgtatcagaccgtgccccctgaggagcactaccagacctttcccatccaggaccccgaccagatgcattcaacttccgatccttcacacagaagttccagcccggagttgagcgaaatgcttgagtacgacagatctcataaaagctttcctactgacattagccagatgtctccctcgtccgaacatgaggtttggcagactgtaatcagtcctgacctttcccaggtaaccttgtctcctgaactgtcccagacgaacctgtccccagacctgtcacataccacattgagcccagagctgattcagcgaaatctgtcgccggctctagggcagatgccaatttcgccagatctgagtcataccacattatcccccgatcttagccacaccaccctaagcctcgatctctcccagactaacctatcccccgagctcagtcagaccaacttatcgcctgcacttgggcagatgcctctgagccctgatctcagccacaccactctgtcactcgacttctctcaaaccaatctgagtcctgagctgtctcatatgaccttatcccctgagctgtcccaaacaaatctgtctcctgccctggggcaaatgccgatatcacctgacttgagccacaccactctgagtcttgacttttcccagactaatctgtctcccgagctctcccaaaccaatctctcccccgctctcgggcagatgccactcagccctgatccctctcatactaccttgagtctggatctctcccagacaaatttgagcccagagctatcgcagaccaacctctcacctgacctgtcagaaatgcccttgtttgcggacctcagccagatccccttaacacccgacctcgatcagatgacactttcccccgatctgggagaaaccgacctgtctcccaactttggccagatgagcctgtcccccgatctctcgcaagtaaccctctcacccgacatatctgatactaccctcctgccagatttatctcagatttcacccccacccgacctggatcagattttttacccctctgagtcatcccagtctttgctgctacaggaattcaatgagtcctttccgtacccagacttggggcagatgccaagtccttctagcccgacactgaatgataccttcctgtcgaaagaattcaaccctctcgttatagtaggtttgtctaaagacggcacagactacatcgagattatcccaaaggaagaggtccaatcttctgaggacgattatgcagagatcgactatgtcccttacgacgacccctacaagaccgatgtgagaacaaacattaactctagtcgtgaccctgacaacattgctgcatggtacctcaggtccaacaatgggaatcggagaaattactatattgcggcagaagagatctcctgggactatagtgagttcgtgcagcgggaaacagacatcgaagactccgacgacatccccgaagacactacatacaagaaagtcgtgttcagaaagtatctggatagtactttcactaagagggaccctaggggagagtacgaggaacacctcggaatcctgggcccaatcatccgggctgaggtggatgatgtgatccaagttcggttcaagaacctcgcatcccgaccgtactcacttcatgctcacggtttgtcatatgaaaaatccagtgaaggaaaaacctatgaagacgacagcccagagtggtttaaggaagataacgccgtgcagcccaattccagctatacctacgtctggcacgcgactgagcgaagtggccctgagtcaccgggatccgcctgccgtgcatgggcatactactcagcagtgaatcccgaaaaggacattcactcgggcttgataggacctctccttatctgtcagaaagggatcctgcataaggattctaatatgcctatggatatgcgagaatttgttctgctgtttatgacatttgatgaaaagaagagttggtactatgagaaaaaaagcagatcttcctggaggctcacctcaagcgagatgaagaaatctcatgagttccatgcaattaatggtatgatctacagtcttcctggcttgaagatgtacgaacaggagtgggtgagactccatctgctgaacatcggtggatcccaggatatccacgtagtgcacttccacgggcagacccttctggagaatggcaataaacagcaccagctgggcgtgtggccccttttaccgggcagttttaagactcttgagatgaaggcaagcaaaccgggctggtggctgctgaacaccgaggttggagaaaatcagcgagcaggaatgcaaacaccatttctgattatggatcgcgactgccggatgccgatggggctctccacagggataatcagcgactcacagattaaagccagcgaatttctgggctattgggagcctaggctggcccggttgaacaatggcggaagttataatgcttggtcagtggagaagctcgcagccgagtttgcctcaaaaccatggatccaggtcgatatgcaaaaagaggtgataatcactggcatccagacccaaggtgccaaacactacctcaagagctgttatacaaccgagttttacgttgcatattctagcaatcagatcaattggcagatctttaagggaaactctaccagaaacgtgatgtacttcaacggcaattccgacgccagtacgatcaaggagaaccagttcgacccccctatcgtggcccgctatatcaggatctcacctactcgagcgtataaccgtcctaccctgaggctcgagctgcaggggtgtgaggtcaatgggtgcagtacccctttaggcatggagaacggcaagattgagaacaaacagatcactgccagtagcttcaaaaagtcctggtggggagattattgggagcccttccgggcacgactgaatgcacaggggcgggtaaacgcctggcaggccaaagccaacaataataagcaatggctggagattgacttactgaagataaagaaaattacggcgattatcacccaaggatgcaagagcctgtcaagcgagatgtatgtgaagtcctacacaattcattatagcgagcagggcgtcgagtggaaaccctatcgtctcaagagctcgatggtagataagatattcgagggcaacacgaacactaagggccacgtgaagaatttctttaacccaccaatcataagtagattcataagggtcattcctaagacttggaaccagtcgatcgcattgcgcctcgaattgtttggctgtgacatctac

SEQ ID NO: 9120 - DNA, 6672 bp, synthetic construct
  misc_feature 1..6672: note = source = /note="Description of Artificial Sequence: Synthetic coding sequence"
  source 1..6672: mol_type = other DNA
atgttcccaggttgtccacggttgtgggtgttggtcgttcttggcacatcctgggtagggtggggtagccaggggacagaggctgctcagcttagacagttctatgtcgccgctcagggcatctcttggagttaccgcccagagccaaccaattcttctctgaatctgtcagtgacgtcttttaagaagattgtctacagggaatacgagccctattttaagaaggagaagccacaaagcacaatcagtgggctccttgggcccactctttacgcagaagttggcgatatcatcaaagtgcactttaagaataaggcagacaagccattaagcatacatccgcagggcattcggtactccaaactgtctgagggagcaagttacctagatcacacctttcctgctgaaaaaatggacgatgccgttgctcccggacgggagtatacctacgagtggagcatttcagaagattcagggccaacccatgacgaccccccttgccttacccatatatactacagccatgagaatcttatcgaggattttaatagcgggctgatcggacctctgctgatatgtaagaaaggcaccctgacagaaggcggaacccagaaaacttttgataaacagatcgtgctgttgtttgccgttttcgacgagtccaaatcttggtcccagagctcatctttaatgtatacggtgaatggatacgtcaacggtactatgcccgatattaccgtttgcgcgcatgaccacatttcatggcacttgctgggaatgagcagtgggcccgagctattttctatccacttcaacggccaggttctggaacagaaccaccacaaggtcagcgcgatcacactggtctctgccacgagcactactgctaacatgactgtcggccccgaagggaaatggatcattagcagtctgacacctaaacacctgcaggcaggaatgcaggcttatatcgacattaagaattgccctaagaagactagaaatctcaagaagattactcgtgagcagaggagacatatgaaaaggtgggaatactttattgcagccgaagaggtgatctgggactacgcgcctgtgattcccgccaacatggataagaagtatcggtcacagcacctagataacttttccaaccaaatcggaaaacattataagaaggttatgtacacccagtatgaggacgaatcattcactaagcacaccgtcaatccaaacatgaaagaggatggaatacttggaccgatcattcgcgcccaggtccgtgatactctgaaaatcgtttttaaaaatatggcgtcacggccttacagcatctacccccacggcgtgacattttccccctatgaggacgaggtgaatagctccttcaccagcggtcgcaacaacaccatgatccgggcggtgcagcctggcgagacatatacatataagtggaatatactggagtttgatgagcctaccgagaacgatgcccaatgccttactcggccttactactctgacgtggacatcatgcgcgacatagcctcgggcttaattggcctgttgctcatatgtaagagccgctctctggatcgccgcggtatccagcgggcggccgacatcgagcagcaggctgtttttgctgtctttgatgagaacaagtcatggtacctcgaagacaacattaacaagttctgtgagaaccccgacgaagtcaagagggatgatccaaagttttacgagtctaacatcatgtcaacaattaacggctatgtgcctgaatccataacaacgctgggtttctgtttcgacgatactgtgcagtggcacttttgcagcgttgggactcagaacgagattctgacaattcatttcaccgggcacagcttcatttatggtaaacgccatgaggatactctaactcttttcccaatgcgaggagagagtgtaacagtgactatggataacgtggggacctggatgctcacttctatgaacagtagtccccgaagcaagaaactgcggttgaagttccgggacgtgaagtgtatccctgacgacgatgaagatagctacgagatattcgaaccacctgagtcgaccgtgatggctaccagaaagatgcatgaccggctggagcccgaagacgaggaatccgatgctgattatgactatcagaaccggcttgcggccgcactgggtatccgcagtttcagaaactcttcacttaaccaggaagaagaggagttcaacctgacggctttggccctagagaacggcacagagttcgtatctagcaatacggacataatcgttggatccaactactcatcaccctccaacattagcaagtttactgtcaataacttggcagaaccacaaaaagccccctctcaccagcaggccactacagccgggtccccgctccgtcatctcatcggcaagaactctgtgctgaactccagcaccgccgagcacagcagtccttattcagaggatcccatcgaggacccactccaacctgatgtcacagggattaggttactgagcctaggcgctggggagttcaagtcgcaagagcacgccaaacacaagggccctaaagtggagcgagaccaggcggctaaacatcggtttagttggatgaaacttttagcccataaagttggcagacaccttagccaggatacagggtctccttctggcatgcgtccatgggaagacttgccatcccaggacacggggtccccatcgcggatgaggccatggaaggaccccccctcggatctcctgctgctcaagcagtctaactccagcaagattttggtgggcaggtggcatctggcctccgaaaagggttcatacgagatcatacaggacactgatgaggatacggccgtgaataactggctcatttcaccacaaaatgcaagcagggcatggggcgagagtacaccactcgcaaacaaacctggtaagcagagcggccatcccaagttccccagggtgcggcacaagtccctccaggttaggcaggacggaggaaagagtcgacttaaaaagtcccagttcttgataaagactcgtaaaaagaaaaaggaaaaacacacccatcatgcacccctgtctcctaggaccttccaccccctgagatcagaagcctataataccttttccgagagacggttgaagcatagccttgtcctgcacaagtcaaacgaaacatctcttcccacagatctaaaccagaccctgccaagtatggattttggatggatcgcttctctacccgatcataaccaaaactcctcgaatgatacgggtcaggcttcctgtcctccaggactgtatcagacggtcccaccagaggagcattaccaaacctttccaatacaggacccagaccagatgcacagcaccagcgacccttcacatcgtagcagttcaccggagctttcggaaatgctcgaatatgatcggtctcacaagtcattcccaactgacatctctcagatgtccccctcttcagagcacgaggtgtggcagaccgtgatctcaccagacctgtcccaggttacgctgagtccagagctgtcgcagactaatctatcaccagacctttctcataccactttgagccccgagctcatccagaggaacttatcaccagctttgggccagatgcctatcagtcctgacctttcgcacacaactctgtcaccagatctctctcacactactctgagccttgacctttcccagaccaatttaagccctgagttgtcccagaccaacctgagtcctgcgcttggtcaaatgccactgagccctgatttgagccatacaactctgtcactggacttctcacagaccaacctcagccctgaactctcacatatgaccttgagcccagagttgtcccaaacaaacctctcacccgccctcggccagatgccaatctcccctgatctgtcacacaccactctgtcactagactttagtcaaacaaatctttcacctgagctatcccagaccaatctgtccccagcactggggcaaatgcctttatcgcccgatccttcccatacaaccttgtcccttgatctgagccagaccaatctgtctccagagttatcacagactaatttgagtccagacctatccgagatgcccctattcgcggatttgtcccagatcccccttactcccgatttggatcagatgactctgagtcctgacctgggcgagaccgatctgtctcccaacttcgggcagatgtctctgtcaccggaccttagtcaggttactctgagccccgatatctcagatacaacactattgcccgacctaagccagatcagcccccccccagacttggatcaaatcttttacccatctgagtcctcccagagcctcttgctccaggaatttaatgagagctttccgtatcctgatttaggccagatgccttcgccctcaagcccgaccctgaacgacactttcctgagcaaggagttcaatcccctcgtgattgtgggactttcgaaggacggcacagattacattgaaatcattcccaaggaagaagtacagtcatctgaagatgactacgcagaaattgactacgtgccatacgacgacccgtataaaacagatgtgcgcaccaatatcaacagtagtcgtgatcctgacaatattgccgcctggtacctgagaagcaataacggtaaccgccgcaattactacatcgcggctgaagaaatctcttgggattattcggagtttgtgcagagagagactgacattgaggatagtgatgacattcccgaagacacaacctataagaaagtagtgtttcgaaaatacctagattcgaccttcacgaaacgagaccctagaggcgagtacgaggagcatttgggaatcctcggccctatcatcagggctgaggtggatgacgtaatccaggtacggtttaaaaacctggccagccggccgtacagcctgcacgcccacggactgtcctatgaaaagagttccgaaggaaaaacttacgaggacgacagtccagagtggttcaaagaagacaacgctgttcagcctaactcctcttatacctacgtttggcacgctacagagcggtccggccccgagtctccagggtcagcctgtcgggcctgggcatattactctgccgtaaatccagaaaaagacatacatagcggcctgatcggcccactgttgatctgtcagaagggcatcctccataaagattccaatatgcctatggacatgcgcgagtttgtgctcctgttcatgacctttgacgaaaaaaagtcttggtattatgagaaaaaatctcggtcctcatggagacttacctcaagcgagatgaagaagagccatgaattccatgccattaacgggatgatctatagccttcctggtctgaagatgtatgagcaagaatgggtccggctgcacctgcttaatatcggtgggagccaagacattcacgtggtccatttccacggacagactctcctggagaacggcaacaagcagcatcagttgggggtctggccgttgttaccggggtcttttaagactctagaaatgaaggcctcgaagcctggctggtggctgctgaacactgaggtgggtgagaaccaacgcgccggcatgcaaacgcctttcctgatcatggatcgcgactgccggatgcctatgggcctctcgacaggaattatcagtgattcacaaatcaaggccagtgagtttttggggtattgggagccccgtctggcccggttgaacaacggcgggagctacaatgcatggtctgttgaaaaactggccgccgagttcgccagcaagccatggatccaagtggatatgcagaaagaagtgattattacaggaattcaaacccagggcgcaaagcactaccttaagtcctgttacacaacagagttctacgtcgcctactcatccaaccagataaactggcagatcttcaagggtaactctacgcgtaatgtaatgtattttaatgggaatagtgacgctagcaccatcaaagagaatcagtttgatccaccaattgttgcccgatacatacgcatcagcccaaccagggcatacaatagacccacactgaggttagaacttcagggctgtgaggtgaacggctgctcaactcctcttgggatggaaaacgggaagatcgagaacaagcagattacagcgagcagctttaaaaagtcatggtggggagattactgggaaccattcagagcgcggctcaatgcccagggaagggtaaacgcatggcaagcaaaagctaataacaataagcagtggctcgagatcgacctgttgaagattaagaagatcacggctatcataacacagggttgtaaatcactcagcagtgaaatgtacgttaaatcatacacgatccactattccgaacagggagtggaatggaagccttaccgccttaagagtagcatggtagataagatcttcgagggcaatacgaacaccaaaggccatgtgaaaaacttttttaaccccccaatcatatcacggttcatcagagtgattcctaaaacatggaaccaatccattgccctccggttggagttattcggctgcgatatctac

SEQ ID NO: 9121 - DNA, 6672 bp, synthetic construct
  misc_feature 1..6672: note = source = /note="Description of Artificial Sequence: Synthetic coding sequence"
  source 1..6672: mol_type = other DNA
atgtttcctggatgtcctcgcctgtgggttcttgtcgtactaggcacttcatgggtgggttggggatctcagggtacagaagccgctcagctgcggcagttttacgtggccgcacaaggaataagctggtcctaccggcctgaaccgacaaacagctctttgaacctgagcgtgacctcattcaagaagattgtgtatcgtgaatacgaaccctacttcaagaaggagaagcctcagtccacaatttccggcctgctaggcccaactctttatgccgaagtgggcgacataattaaggtccattttaagaacaaagccgataaacctttgtcgattcatcctcaggggattagatatagtaaactatctgagggcgcttcttatctcgatcatacatttcccgctgaaaagatggacgacgccgtcgcccccggcagagagtatacttacgaatggagtatcagcgaggattctgggccaacacacgacgatccgccatgtctgactcatatttattatagtcatgagaatctgatagaagactttaatagcggccttattggacctttgttaatctgtaagaagggcacactgaccgagggcggaacgcagaaaacctttgataaacagattgtgttgctgtttgccgtctttgacgagagtaaatcctggtcccagtcaagcagcttaatgtacaccgtcaacggctatgtgaatgggacgatgcccgacatcaccgtgtgcgcccatgatcatatctcgtggcacttattgggcatgtcctccggacctgaactgttttcaatccactttaatgggcaggtgctagagcagaatcatcacaaggtatcagccatcacgttggtgtcggccacctctaccactgctaacatgacagtgggccccgaggggaagtggataatatccagcttaacgcccaaacatcttcaagccggcatgcaggcctacatcgacatcaagaactgcccaaagaaaacgcggaatctgaaaaaaatcaccagagagcagcgacgccacatgaagaggtgggagtatttcatcgccgcagaggaagttatttgggattatgccccagtgattcccgccaatatggataagaagtatcggtcacaacacctcgataacttctccaaccagattggcaaacattacaaaaaggttatgtacacacagtatgaagacgagtctttcactaagcacacggtgaaccccaacatgaaggaggatggcatcctggggccaatcatcagagcccaagtgcgggatacattaaaaatagtgtttaagaatatggcctctagaccatattcgatttacccccacggcgtgaccttctccccctacgaggacgaagtaaattcctcttttactagtgggcgcaacaatacaatgattagggctgtgcagcccggtgagacatatacatacaagtggaacatcctggagtttgacgaacctaccgagaacgatgcccagtgcctgactagaccttactactctgatgtggatatcatgcgggatattgcctccggactgattggactgctactcatttgcaagtcccggtcactggaccggaggggtatccagcgagccgccgatattgaacaacaggccgtttttgctgtctttgacgaaaataagagctggtatttggaagataacatcaataagttttgtgagaacccagatgaagtaaagcgggacgaccccaagttctatgagtccaacatcatgtcaaccattaatggatacgtgccagaaagcatcacaaccttaggtttctgcttcgatgacactgtgcagtggcatttctgctcagttggtactcaaaatgaaatcctgaccattcattttactggtcactccttcatctatgggaaaagacatgaagatacattgaccctctttcctatgcgcggcgagtccgtgactgtgacaatggacaatgtagggacgtggatgctgaccagcatgaattcaagcccacgaagtaaaaagctgaggctcaaatttagagacgtcaaatgcatccccgatgacgatgaggacagttatgaaatttttgaaccgcccgaatccaccgtgatggcaacacggaagatgcacgataggcttgagccagaagacgaggaatccgatgcagattacgattaccagaatcggctcgcagccgccctcggaatccgaagcttcaggaactcctcactgaatcaagaggaggaggaatttaatctaacggccttggcacttgaaaatggcacagagtttgtatcctccaatacagacatcatcgtcggaagcaactacagctctccatcgaacattagtaagttcacggtaaacaacctggcagagccacagaaggcacctagtcaccagcaggccactacagccggctcacccctgaggcacctgatcggaaaaaactcagtgctgaattctagtaccgctgaacacagttcaccatactccgaagaccccatcgaggatcccctacagcccgacgtcacaggaatccgcctgttaagcctgggggctggggaatttaagagtcaggagcacgctaagcataaaggacctaaagtggagcgcgatcaagccgcaaaacaccggttctcttggatgaagctactggcccacaaagttggccgacacctgtcccaggacaccggcagcccaagtggcatgcgtccatgggaagatcttccgtctcaagataccggttccccatcgcggatgcgtccctggaaagacccaccttctgacttgctgctgctaaaacaaagtaactcctcaaagatactggtgggacgttggcacttagcctctgaaaaaggatcatacgagataattcaggacactgatgaggataccgcggttaacaactggcttatatcccctcagaacgctagcagagcatggggcgagagtaccccgctggccaacaagcccggaaagcagtcaggccatcccaaattccccagggttagacacaaatctctgcaggtaagacaggacgggggaaagtctcggctgaaaaagtcccagtttcttattaagacacgcaagaaaaagaaagagaaacatacacaccacgcacctctgtcccccagaacctttcacccgctccggtccgaagcgtataacaccttcagcgagcggcgcctaaaacacagcctcgtcctccacaagtctaatgagactagtctgcctacggatttgaaccaaactctgccctctatggacttcggctggatcgccagcctgcctgatcataaccagaatagcagcaatgacactggacaagccagctgtcctccaggcttatatcagacagtgcctccggaagagcattatcagaccttcccaatccaggaccctgatcagatgcactctacttcggacccgtcacatcgtagctcaagtcctgagctctctgagatgctggaatacgatcgatcgcataagtcatttcccacagacatttcgcaaatgtctccctcctctgagcacgaggtttggcagacagtaatatcgcccgacctgagccaagtgaccctctctcccgaattatctcagacaaacctcagccccgacttatctcacactactttgtcaccagagctgattcagaggaacttgtctcctgcactcggccagatgcccatatccccagatctgagtcacacaacactgtcacccgatctgtctcacactaccctcagcttggatttgagccaaaccaacttgagtcccgagctaagtcagacgaatctatctcctgccctcgggcagatgccactgtcacccgacctttcccatactacgctgtctctggacttttcacagacaaacctgtcacccgagctcagccacatgactctgtcccctgagctgagtcagacaaatctgtcccctgcccttggccagatgccgatctctcctgatctctcacataccactttgagcctggacttcagccaaactaatctgagccctgagttgagtcagaccaacctgtcccccgccctcggacagatgcccctatcgcccgatcccagccacactaccctgagcctggatctcagtcagactaatctgtccccagagttaagtcagacgaacctttcaccggatctgtcagagatgccactgtttgctgatctctcccagatacccctgacacctgatctggatcaaatgaccctaagccccgacctaggggaaactgacctctcacccaactttggtcaaatgtctctgtctcctgacctgtctcaggtgacactttcccccgatatctctgatacgacactgctccctgacctcagtcagatttcccccccacccgatctagatcagatcttctacccaagtgagtcttcccaatccctgctattacaagaattcaacgaaagcttcccctatccggacctcggccagatgccctcacccagttctccaacactgaatgacacctttcttagcaaggaatttaatcctctggtgatcgtaggcctctcaaaggatggaacagattacatcgaaattatccccaaagaggaggtccagagcagcgaagacgactacgcagagattgactacgtaccatacgatgacccctataaaactgacgtgcggaccaacatcaattccagcagagatcccgacaacattgcggcctggtacctgagaagcaacaacgggaatagacgcaactattacattgccgcagaggagatcagttgggattactctgagttcgtgcagcgggagacggatatagaggactcagatgatatcccagaagacaccacatataaaaaagtcgtatttcgaaaatacctcgacagcacattcacaaagcgggacccccggggggaatatgaagagcacctagggatcctcggccctatcattcgtgcggaggtggacgatgtgattcaggtccgattcaaaaacctggcatcccgcccatattcactgcacgcccatggtctcagttacgagaagagctcagaaggcaagacttacgaagatgacagcccagagtggtttaaggaggacaacgctgtgcagcctaattcgagttatacttatgtttggcatgcgaccgagcgatctggaccagagtcacctggaagcgcgtgtagagcctgggcatattactccgcagtcaatccagaaaaggacatccactctggattaattggaccgttgctgatttgtcagaaaggaatactgcataaagactctaacatgcccatggacatgagagaattcgtgctcttatttatgaccttcgatgagaaaaaaagttggtattacgagaaaaagtccagaagctcctggcgcctgaccagcagtgagatgaaaaaatcccatgagtttcatgcaattaatggcatgatctacagtctgccggggcttaaaatgtacgaacaggagtgggtccgtctgcatcttttaaatatcggaggcagccaggatatccacgtcgtgcattttcacggacagactctcttggagaatggtaacaagcaacatcagctgggcgtgtggcccctgctgccaggctctttcaaaaccctcgaaatgaaagcaagtaagcctggctggtggctgctcaacactgaggtgggggagaaccagcgagctggaatgcagacacccttcctgattatggatcgggactgtcgcatgcccatgggtctgagcacaggtattatatcggactcccagataaaggccagtgagtttctggggtattgggagcccaggctggcccgactgaataacggcggatcctataatgcctggagtgttgagaagttggcggcggagttcgcaagtaaaccttggattcaggttgacatgcaaaaggaagtgatcatcaccggaattcagacccagggcgccaagcactatttgaaatcttgctacactacagagttctacgtcgcctattctagcaatcagatcaattggcagatctttaaaggaaacagcactcgaaatgtaatgtattttaacggcaatagtgatgccagtacaataaaggagaatcagtttgatcctcccatcgtggcgagatacatacgtatctcaccaacaagggcttacaaccgacctacactgcgcctggaactgcagggctgtgaagtgaatggatgcagcacccccctgggcatggagaacggaaagattgaaaacaaacagattactgcctctagttttaaaaaatcctggtggggcgactattgggaacctttcagagcaaggctgaacgcgcagggacgggtaaatgcctggcaggctaaggcaaacaacaataaacagtggctggaaattgacttattgaagatcaagaagatcacagccattatcacccaaggctgcaagagtctctcgtctgagatgtatgtgaagtcttatacaattcactattccgagcagggggtcgaatggaagccctatcggcttaaatcatcgatggttgacaaaatattcgaagggaacaccaatactaaagggcatgtcaagaatttcttcaatccacccataatcagccggttcataagagttatcccaaagacttggaaccaaagtatcgcactgcggctagagctcttcgggtgtgatatttac

SEQ ID NO: 9122 - DNA, 6672 bp, synthetic construct
  misc_feature 1..6672: note = source = /note="Description of Artificial Sequence: Synthetic coding sequence"
  source 1..6672: mol_type = other DNA
atgtttccgggatgtccccgactctgggtgctagttgtactgggtaccagttgggttggttggggcagccagggcaccgaggccgctcaattgcgtcagttttacgttgcagcccaaggcataagctggtcgtacagacccgaaccaactaattccagcttgaatctgtcggtcacttcttttaaaaaaatcgtctatagagagtacgagccgtacttcaagaaggagaagccccagtctaccatatccggcctgctgggtccaacgttgtacgcggaggtgggcgacattataaaggtgcatttcaaaaataaggcagacaagccgctatccattcatccccagggcatccgatatagtaagctttccgagggggcgtcctacctggatcatacttttcccgctgagaaaatggatgatgccgttgcgccaggacgagagtatacctatgagtggtcgatatcagaggactcaggcccgacccacgatgacccgccatgcctgacccatatttactacagtcatgagaatttgattgaggattttaattcgggtcttatcggcccgctactaatctgtaagaagggtaccctaacggagggtggaacccaaaagacgttcgataagcagatcgtactgctgtttgccgtgttcgacgagtccaagtcttggagccagtctagctccttaatgtacacggtgaatggctatgttaacggtacaatgcccgacatcactgtgtgcgcgcatgaccacatcagctggcacttgctgggcatgtcatcaggcccggaattgttctctatccactttaatgggcaggtactagagcaaaatcaccacaaagtaagcgccatcaccctggttagtgcaacgtccaccactgccaacatgaccgtaggcccagaaggtaagtggataatctcgtcactgacgccgaagcacctacaggcagggatgcaagcctatatcgatattaagaattgtcccaagaagacaaggaacctaaaaaagatcacacgtgagcagcggcgacacatgaagcgctgggaatacttcatcgccgccgaggaggtgatctgggattacgccccggttataccagcaaacatggacaaaaagtatcgcagtcagcatctagacaatttttccaaccaaatcgggaagcattacaagaaggttatgtacacgcagtatgaagatgaatcctttactaagcacaccgtcaatccgaacatgaaggaagacggcattttgggtcccatcatcagggctcaagtgcgtgatacactcaagatcgttttcaaaaacatggcatcccgtccgtactccatctaccctcacggagtcacattcagtccgtatgaggacgaggtgaactcctctttcacgtcgggacgaaataatacaatgattcgggccgtgcaaccaggggagacatacacgtataagtggaacatcctggagtttgatgagcccacggagaatgatgcccagtgtcttacgcgaccttattattctgacgtcgatataatgcgtgatatcgcttccggtttgattggacttttgttgatctgcaaaagccgatccctggaccgtcggggaatccaacgcgccgctgatatcgaacagcaggctgtattcgcagtgttcgatgagaataagtcctggtatttggaggacaacattaataagttctgcgaaaaccccgacgaggtgaagcgcgatgacccgaagttttatgagtcaaatatcatgtctacgatcaacggctacgtacccgagagcattactacactgggattttgcttcgatgacacggtgcagtggcacttctgctcagtcggtacgcaaaatgagattttgactattcattttacgggccacagctttatttacgggaaacggcacgaagacaccctgacgcttttccccatgcggggcgagtcggtgacagtgactatggataacgtgggcacatggatgcttacgtccatgaacagttccccccgttccaaaaagctgcgcctaaagtttcgcgatgtcaaatgtatcccagatgatgatgaggatagttacgagatctttgagccaccagagtccaccgttatggccacccgaaagatgcatgatcgtctggagccggaggatgaggaaagtgatgccgattacgattatcagaaccgtctagcagcggccttgggaattcgttcgttccgtaactcatcactgaaccaagaggaagaagagttcaacttgacagcactcgctctagaaaacggcactgaattcgtatcttccaacactgacatcattgtgggttcgaactactcaagcccctcaaatattagtaagttcacggtgaataatctggcagagccgcaaaaggccccctcgcaccagcaggccactacagccggctcgccacttcgtcacctgataggaaaaaactcggtactaaactcgtcgacggccgagcactcctccccatattctgaagatcctatcgaagacccactgcaaccggatgttacgggcataaggctcctgtccctgggagctggtgagttcaagagccaagagcatgccaagcacaagggaccaaaagtggagcgggatcaagctgctaagcaccggtttagctggatgaagctcttggcccacaaagtgggaaggcacctgtcacaggacacgggctccccgagtggcatgcgtccatgggaggacttgccatcccaagataccggatcgccgtcgcggatgcgcccctggaaggatccacccagcgatttgttgttgctgaagcagagcaacagctcgaagattcttgtgggcaggtggcatttggcctctgagaagggctcctacgaaatcatccaggacacagatgaagacaccgctgttaacaactggctgatatctccgcagaatgcctcccgagcctggggtgagagcacccccttggccaacaagccaggaaagcaatccggccaccctaagtttccgcgtgtcaggcacaagtccctacaggtgcgtcaggatggagggaaatcccgcctcaagaagagtcaattcctcataaaaacacgcaagaagaaaaaggagaagcacacacatcacgccccgctgagtccccgcacttttcacccactaaggagtgaagcctacaataccttctctgagcgccgcttgaagcacagtttggtcctgcacaaatctaacgagacgtctctacccacggatctgaaccagaccttgccaagcatggacttcggctggattgcatccctgccggatcacaaccagaacagctccaacgatacgggacaagcctcatgtccccccgggctctaccagactgtgcccccggaagaacactatcagacgttccctatccaggatcccgatcaaatgcactcgacctcagatccctctcaccggtcgagctcccctgaattatctgagatgctggagtacgatcgctcacacaaaagcttcccaaccgacatcagccaaatgtccccaagcagcgagcacgaggtttggcaaacggtgatcagtcccgacctatcgcaggtgacactgagcccggagctgtcccaaaccaatttgtcaccagacctgagccacacaacactatcgcctgagctaatccagcgcaacttgtcccccgcactgggtcagatgcccatttcaccggacttgagccatacgacgctgtcccccgatttgtctcacacgactctgtcactggatctgagccagaccaatctatcgcccgaactgagccagaccaacctctccccagccctagggcagatgcctctgtcccccgatctgtcacataccacgctctccctcgatttttcccaaaccaacctatccccggaactgtcccacatgacgctgtcccccgaactcagtcagactaacctgtcccccgccctcggtcagatgcccatcagcccggatttaagtcataccacgctctctctggattttagccagacgaatctgagtccggaactcagccagacaaacctgtccccggctctcggtcagatgccgctgtcgcctgaccccagccacacgacactgtcgttggatttatcgcagaccaacctgtcgccggagctatcccagacgaacctgtcgcccgatctttccgagatgccgctgtttgctgacctgagccagatcccgttaaccccggaccttgaccagatgacgctgtcgcccgatctgggagagacggatctgagcccaaatttcggtcaaatgtcactcagtcccgatctgagccaagttaccctttcccccgatatcagcgacaccacgctgttgccggatctcagtcagatatccccgccaccggatctggaccaaatcttctacccgtccgaaagtagtcagagcttgttactgcaagagttcaacgagagctttccatatccagatctcggacagatgccatccccaagcagtccgaccttgaacgacacgttcctgtcaaaggagttcaatccgctcgtaatcgtgggtctgagcaaggatggcacagactacatcgagattatccccaaggaggaggtgcagtcctccgaggacgactatgccgagattgattacgtgccttacgacgatccctacaaaaccgatgtcaggacgaacataaactccagcagagaccccgacaatattgctgcctggtatttgcgctccaacaacggcaaccggcgaaactactatattgcagccgaggagatttcatgggattactccgaatttgtccaaagggagaccgacatcgaggactccgacgacattcccgaagatacgacctataagaaggtcgtgtttcggaagtatctggactcaacgttcaccaagcgggatcctcgtggagagtatgaggagcatcttggcatactgggaccgatcatccgggccgaggtcgacgatgtgatacaagttcgctttaaaaacctggcctcccgaccttactctctccacgcgcatggactgagttacgagaagtcctccgaaggtaagacgtacgaggatgattcccccgagtggttcaaagaggataatgctgtgcagccaaattcgagctatacctacgtgtggcacgcgacggagcgtagcggtcctgagagtcccggcagcgcttgccgagcgtgggcgtactactccgcagtgaacccggaaaaggatattcacagtggcttaattggcccgctccttatctgccaaaaaggtattctgcacaaggactccaacatgcctatggatatgcgtgagttcgttttgctttttatgaccttcgacgagaagaagtcttggtactacgagaaaaagtcccgctctagctggcgtctgacttctagtgaaatgaagaagtcccatgaattccacgccataaacggcatgatctatagccttcccggtttgaagatgtacgaacaggaatgggtgagactccatctgttgaacattggtggttcgcaggatatccatgtggttcacttccacggacaaacgctccttgaaaatggaaataagcagcaccaacttggagtgtggcccttgttgccaggctcgttcaagacccttgagatgaaagcgtcaaagcccggctggtggttactaaacacggaagtgggtgagaaccagcgcgccgggatgcagactcccttcctcatcatggatcgagactgccggatgcccatgggtctgtccaccggcattatctccgattctcaaattaaagcatccgaatttttgggttactgggagccccgcctggcccgactcaataatggaggatcatataacgcctggtcggtcgaaaagctggccgccgagttcgcctcaaaaccctggatacaggtggacatgcaaaaggaggtcataataaccggcatacagacgcagggcgccaagcattatctgaagagctgctacactactgagttttatgtcgcctactccagtaaccaaatcaactggcaaatattcaaaggcaattcgacccgcaatgtaatgtattttaacggtaactcggacgcctccacgatcaaggagaaccagtttgacccccccatagtggcccgctatattcgcatctcacccacccgggcgtacaataggccgactctgcgcctcgagctgcagggctgcgaggtgaatggttgcagtacaccgttaggcatggagaacggcaagatagagaataaacaaataactgccagtagtttcaagaagtcgtggtggggtgattattgggagccgttccgcgcccgactgaacgctcagggccgggtgaacgcgtggcaggccaaagccaataataacaaacagtggctggagatcgatctgctcaagattaagaagataactgccatcatcacccagggatgcaagtcgctttcaagcgagatgtacgtgaaaagctacacgatccactattcggaacaaggtgtggagtggaaaccctacaggcttaagtccagtatggtggacaaaatctttgagggcaacacgaacacgaagggtcacgtcaagaattttttcaatccgccgattatctcccgcttcatccgagtcattccaaagacatggaaccagagcattgcgctacggctggagttgttcggttgcgatatttac

SEQ ID NO: 9123 - DNA, 6672 bp, synthetic construct
  misc_feature 1..6672: note = source = /note="Description of Artificial Sequence: Synthetic coding sequence"
  source 1..6672: mol_type = other DNA
atgttccccggatgtccacgactttgggtgctggttgtcctgggaaccagttgggtgggatggggctcacagggtacagaggccgcacagctcagacagttttatgtcgccgcccaggggatatcatggtcatacagaccagagccaaccaatagctcattgaacctgagcgtcacctcattcaagaagattgtgtatagggaatacgagccttactttaagaaagagaaacctcaatctaccatctcgggcttgctaggacccacgttgtatgcagaggtcggcgacatcataaaagtccatttcaaaaacaaggctgataagccgctgtcgatccatccacagggcattcgatatagtaagctgtcagagggcgcatcatatttggaccatacttttcccgcggagaaaatggatgacgcagtggcccctggacgggaatacacctacgaatggtctatctccgaagactctggccccacacacgacgaccccccatgcttaacccacatctactactcccacgaaaacctaatcgaggattttaactcaggcctcatcgggcctctcctgatttgtaaaaaggggacactgaccgaaggcgggactcagaagacttttgacaagcagatcgttctgctattcgccgtttttgacgagtccaagtcttggagccagagcagttcattgatgtatacagtgaacgggtacgttaacggcacaatgccggatatcactgtgtgcgcgcacgaccacatttcctggcatctgctcgggatgtccagcggtcccgagctttttagcatccacttcaatggacaggttcttgaacaaaaccaccacaaggtctcagccattaccctggtgtccgctacatcaaccactgcaaatatgacagtggggcccgaaggaaagtggatcatttcctcactaacaccgaagcatttacaagctgggatgcaggcctatatcgacataaagaactgtcccaaaaagaccaggaatctgaagaaaattactagggaacagagacggcacatgaaacgttgggagtatttcatcgccgcagaggaggttatctgggactacgctccagtgattcctgccaatatggataaaaaatacaggagccagcacctggataatttcagtaaccagattggcaagcattacaaaaaggtcatgtacacacaatatgaggacgagtctttcactaagcacaccgtgaatcccaatatgaaggaggatggaatcctgggacccatcatccgggcccaggtgcgcgacactttgaagattgtgtttaaaaacatggcgtccagaccgtacagcatttacccccacggcgtgacattctctccctacgaagacgaagtcaattctagctttaccagcggccgaaataataccatgattcgggctgtccagccaggcgaaacctacacatacaagtggaacattctcgaattcgatgaaccaactgagaacgatgcacaatgtctgactcgtccgtactactctgacgtggacatcatgcgggacatcgcctcaggcttgatcggattgctcctcatttgcaagtctagatcgctcgaccgacggggtattcagcgagctgccgacatcgagcagcaggccgtcttcgcggtctttgatgaaaataagagctggtatctcgaagataatattaacaaattttgtgagaatccggacgaggtgaaacgtgacgatccaaaattctatgagtccaatataatgagtaccatcaatggctacgtgccagagtctattaccactctgggcttttgttttgacgacactgtccaatggcacttctgcagcgtgggtactcagaacgagatactcaccatacacttcactggtcactcttttatctacggtaagagacacgaagacactctgaccttattccctatgaggggcgagtccgtaactgtcactatggataatgtcggaacatggatgctgacctccatgaattcgtccccaagaagtaagaagctacgtctgaaattccgagatgttaaatgcatcccagatgacgacgaggactcctacgagattttcgagccacctgaaagcaccgtcatggctacccgaaaaatgcacgataggctggagccagaagatgaagagagtgatgcggactacgattaccagaatagactggcggccgctctggggatccggagtttcagaaattcctctttaaaccaagaggaggaagagttcaacttgactgctctggcgctcgagaacggtactgagttcgtgtcaagtaacactgacataatcgttgggtcaaattactctagcccatcaaatatatctaaatttacagtcaataacttggcagaaccacagaaggccccttctcaccaacaggctacaactgcaggaagccctctccgccacttgattgggaaaaactcagtgctaaactccagtactgccgagcatagttcgccctactctgaggatccaatcgaggacccgttgcagccagacgtaacgggaatccgcctactcagcttgggtgctggcgagtttaagagtcaggagcacgccaaacacaagggcccaaaagtggaacgggatcaggcggcaaagcaccggttttcttggatgaaattactcgcccataaggtagggcggcacctgtcacaagatacaggctcccctagcggcatgagaccctgggaagatctgccatcccaagatacagggtccccatccaggatgcggccttggaaggatcccccttccgacttgttgttattgaagcagagtaacagctcaaaaatcttggttgggagatggcacctggcatctgagaagggaagttacgagatcatacaggataccgatgaggacaccgctgttaacaattggctcatctccccccaaaacgcctcacgggcctggggagagtctacaccactggctaataagcccggcaagcagagtggccatcctaagtttccgcgagtgcgtcacaagtctcttcaggtgcgacaggacggcgggaagtctcgccttaaaaaatcccagttcctgattaagacccggaagaaaaagaaagagaaacacacgcatcatgcacctctcagcccccggacttttcaccccctcaggagtgaggcctacaatacattcagtgagcgaaggctaaagcactcattagtgttacacaaatccaatgagaccagcctgccaactgatttgaatcagacacttccatccatggactttgggtggatcgcgagtctccctgaccataaccagaatagtagtaacgacacggggcaagcctcctgtcctccaggattgtaccagaccgttccacctgaggagcactatcaaacttttccaattcaggaccccgatcaaatgcattcaacctccgaccccagccataggagcagctctcctgaattgtcggagatgctagaatatgataggtcacacaagtccttccctacagatatctctcaaatgtccccctcatccgagcatgaggtatggcagactgtgatctcccctgacctcagccaggtgactctgagccctgagctctcgcaaaccaatctgtctcccgacttatcgcatacaacactgagcccagagctgattcagcgaaacttatcccctgcactgggccagatgccaatcagcccggatctgtcacataccacgctgagccccgatctatcacatacaacactttcactggatttgagccaaactaacttgagcccagagctatcccagacgaacctgtcacccgccctgggccagatgccactgagtcccgacctgagccacactacattatcgttagacttttcccagacgaacctgagccccgagctgtcacacatgactttgtcccctgaactgtcccaaacgaatctgagcccagcactgggtcagatgcctatctcgccagacttgtcacacaccacactttcactggacttctcacagacaaacctgtcacctgaactgtcgcaaaccaatctatcgcctgcacttggacagatgccgctttcaccagacccatcacacactactctgtcgcttgatctgtctcagaccaatctgagccctgaattaagccagacaaatctgagccctgacctgtcggaaatgccactatttgctgatttatcccagatccccctcacaccagacctggaccagatgacgctgtcacctgaccttggcgaaacagacctctcccctaactttggacagatgagcctgtcaccagacctttctcaagtcacactctcccccgatatatctgatactactctacttcccgacctatcccagatatcccctccaccggatctggaccagatattttacccctccgagagttctcagagtctgctgttgcaggagtttaatgagtcattcccctacccagatctcggacagatgccttctcccagcagccctacattgaacgacaccttcctgagtaaagagtttaatcctctagtaatcgtaggcctgtcaaaagatgggaccgactacatcgagattattccaaaggaggaggtgcagtcttcggaggacgactatgccgagattgactatgtgccctatgatgatccatataagacagatgtgcgtactaacataaatagcagtagagacccggataacattgccgcctggtacctcaggtctaataacgggaataggcgaaactactacatcgccgcagaagaaattagttgggattatagtgaattcgttcagcgtgaaaccgatatcgaggattctgacgatattccggaagacaccacctacaagaaggtggtgtttagaaagtacctggatagcactttcaccaagagagaccctagaggtgagtacgaggagcatctgggcatccttggacccatcatccgtgcggaagtggatgacgttatacaggtgaggttcaagaatctcgcatctagaccatactccctccatgctcatggcctctcttacgaaaagagtagcgaaggcaaaacctatgaggacgactcacctgagtggttcaaggaggataacgcggtgcagccgaacagctcatacacatacgtgtggcacgctacagaacggtctgggcccgagtcccccggctccgcctgtagagcatgggcttattactcggctgtgaatcccgaaaaggatatccacagcggactcataggcccgctgctaatttgtcagaaggggattctgcacaaggattccaatatgcctatggacatgagagagttcgtgttattatttatgacctttgacgaaaagaagagctggtactatgagaaaaagtcaagatctagctggcgcctgacgagcagcgaaatgaaaaaatcccacgagtttcatgctattaacgggatgatatatagcctcccaggtttaaaaatgtatgagcaggaatgggtgcgcctgcacctcttaaacattggtggctcacaagacattcacgtggttcactttcacgggcagacgctgttggagaatgggaacaaacagcaccaactcggagtgtggccccttctgccgggttcctttaaaactcttgagatgaaggccagcaaaccggggtggtggctcttgaacacggaagttggtgagaatcaacgagccggaatgcagactccattcctgatcatggatagggattgtcggatgcctatgggactctcgaccggtattatttccgatagccagatcaaagcttctgagttcctcggatactgggagcctcgactggctcgtctcaataacggagggtcatacaacgcgtggagcgtggagaagctagcagccgagtttgcctctaagccctggattcaggtggatatgcagaaagaggtgatcatcaccgggattcaaacgcagggggctaagcattatctgaaatcctgttataccaccgagttttacgttgcgtactccagtaatcaaattaattggcaaatcttcaagggcaactccacccggaacgtgatgtacttcaatggaaactctgatgcttcgactatcaaggagaaccagtttgaccccccaattgtggcaagatacatccgcatctcccccacgcgagcctataatcgtccaactttacgcttagagctgcagggctgtgaggtaaacggttgcagtacaccactggggatggaaaacggcaaaatcgagaacaagcagattactgctagcagttttaaaaaatcttggtggggcgattattgggagccctttcgggctaggctgaacgcacaggggcgggttaacgcatggcaggctaaggcaaataacaacaagcagtggttagagattgacttgttaaagataaaaaaaatcacggcgatcattacacaggggtgcaaaagtctttctagtgagatgtatgtaaaatcttataccatacattacagcgagcaaggggttgagtggaagccctatcggctgaaaagttccatggtcgataagatttttgaggggaacacgaacactaagggccacgttaagaatttctttaatccaccaatcatctccagattcataagagtcatccccaagacttggaatcagagcatagccctgaggctggaattgttcggatgtgatatttat

SEQ ID NO: 9124 - DNA, 6672 bp, synthetic construct
  misc_feature 1..6672: note = source = /note="Description of Artificial Sequence: Synthetic coding sequence"
  source 1..6672: mol_type = other DNA
atgttccctggctgtcccagactttgggtgcttgtcgtgctcggaaccagctgggtgggctgggggtcccaggggacggaggccgcccaactgcgccagttctatgttgccgcacagggaatcagctggtcatatcgccctgagcccactaactcctccctgaatttaagcgtgacttctttcaagaagattgtttatcgagagtacgagccttacttcaaaaaggagaagccacaatctaccatttctggcctcttgggccccactctctacgctgaagttggagatataatcaaggtccactttaaaaacaaggccgacaagccactaagcatccacccgcagggcattcggtactctaagctcagcgagggagcctcatacctcgatcacactttccccgctgagaagatggacgatgccgttgccccgggtagggaatatacctacgaatggtccataagcgaggactctggacccacacatgatgaccctccatgcctgacgcacatttattactcccacgaaaatttaatcgaagatttcaatagcgggctcatcgggccgctgcttatttgtaagaaagggacactcaccgaaggcgggacacagaagacttttgacaaacaaattgtgctgttatttgcagtgtttgacgaaagcaaaagttggtcacagagtagctctttaatgtatacagtgaacgggtacgttaacggaaccatgcctgacataactgtctgtgcccacgaccacatctcttggcatctgctgggcatgtccagcgggcctgagctcttctcaatccatttcaacggacaggtgctggaacagaaccatcacaaggtaagcgctatcaccctggtgagcgcgacttccactaccgctaacatgacagtcggacccgaaggcaagtggattatctcctcgctgacgcctaaacatttgcaggctggcatgcaggcatacatcgatatcaaaaattgtcctaaaaagactagaaacctgaagaaaatcacacgcgagcaacgtcgacatatgaagcggtgggaatactttattgcggcagaggaagtcatatgggattatgcgcctgtgatccccgccaatatggataagaagtaccgctcacagcatctcgataactttagtaatcagatcggcaagcattacaagaaagtgatgtacacccagtatgaggacgaaagcttcacaaaacacaccgtcaacccaaatatgaaggaagatggtattttaggcccgattattcgggctcaggtccgagatacactaaagatagtgttcaaaaacatggcctctcgcccctatagtatctacccacatggagtgacattctcaccttacgaagatgaagtgaactcgagcttcactagcgggaggaataatactatgatcagggcggtgcagccaggcgaaacatatacctataagtggaacattctagagttcgatgaacctaccgagaatgatgcccaatgcctgaccaggccctactacagcgacgtggatatcatgagagacatcgctagtggcctcatcgggttattgctgatttgtaaatcgaggagcctcgacaggcgggggatccagcgggcggcggatattgagcaacaagccgtgtttgcagtatttgacgagaataaatcttggtacctcgaggataacattaataagttctgtgagaatcctgatgaagtaaaaagggatgacccaaaattttacgaatcgaacatcatgtcgacaattaacggctacgtcccagaaagcataactactttagggttttgcttcgacgacacagtgcagtggcacttctgctcagtcggaacccagaacgagatcctgacgattcacttcaccggccattcttttatctacggcaagcggcatgaagacacactgactctatttcctatgagaggtgagtctgtgacggtcaccatggacaatgtgggaacgtggatgcttactagtatgaactccagtccgaggagtaagaagctcaggcttaagtttagggatgttaaatgcattcccgacgacgatgaggatagctacgagatctttgaacccccggaaagcacagtaatggctacacgaaaaatgcacgaccgcctggaaccggaggacgaggaatcagacgctgattacgactaccagaaccgattggccgccgctctgggtatccgatcctttcgtaatagctctcttaatcaggaagaagaggagtttaatctaacagctcttgctctcgagaacggaacagagttcgtctcaagtaataccgatatcatcgtgggatcaaactactcatctccatctaatatttcaaagtttacagtgaacaatctggccgaacctcagaaagccccaagccaccaacaggccaccaccgcgggaagtcctttaagacacctgattggtaaaaatagcgtcctgaattctagtaccgcagaacatagctcgccatactccgaagaccccatcgaggacccactgcaacccgacgtaaccggcatccgtctgctttccctgggcgccggggagtttaaaagtcaggagcacgccaagcataaaggacccaaagttgagcgtgatcaagctgctaaacatcggttctcttggatgaaattactggcccacaaggttggtagacacctgtcacaggacaccggatccccaagtggcatgagaccatgggaagatctgcctagtcaggacaccgggtcccctagcagaatgcgaccttggaaggacccacctagcgatctgcttctgctcaagcagagtaattcctccaaaattctggtcggtagatggcatctcgcctcagagaagggctcctacgagataatccaggatacagatgaagatactgcggttaataactggctgatcagtccccagaacgcctctcgcgcatggggcgaatccacccccctggcaaataaacccggcaagcagagtggccatcctaagttccctcgcgtgcgccataagtcccttcaggtaagacaggacggaggtaagtccaggctgaaaaaatcccagtttctaatcaagacgcgtaagaagaaaaaggaaaaacacactcaccacgcgccccttagtccacgaaccttccatccgctgagatcagaggcttataataccttctccgagcgcagactcaagcacagcctggtgctgcataaaagtaatgagacctcattgcccacagacctcaaccagacactccccagcatggatttcgggtggatcgcatctttacctgatcataatcaaaattcctcgaacgacacgggacaagcatcatgccctccaggactgtaccagactgtgccacccgaagaacactaccagacgtttccaattcaggatcctgatcaaatgcatagcactagtgatcccagccaccgatcatccagtcccgagctatcagagatgctggaatacgaccggtcccataagagctttcccactgatatttcacagatgagcccttcatctgagcatgaggtgtggcagacagtgatctctcctgatttatcacaggtgacactgagccctgaacttagtcagacgaacctgtctcccgacctgagccacaccaccctgtcgccagaactcatccaacggaacttgagtccagcgctggggcagatgcctatatctccagacctgtcccacacaaccctatcgcctgatctcagccacacaacattgtccttagatctgagtcagaccaatctatcccctgaactcagtcaaacgaatctatcacctgctctcggacagatgcccctgagtcctgacctctcacataccaccctctctctggattttagccagacgaatctgtcccctgagctgtctcatatgacgctcagtcccgagctgtcccagaccaacttatcgcctgccctggggcagatgcctatcagtcccgacctgtcacacactaccctttcactggatttcagccaaaccaacctgagccctgaactttcccagacaaaccttagccctgctctcggacagatgcccctgtccccagaccctagtcatactactctgagcctcgatttgtcacagacgaatctgtcgccggaattaagccaaacaaatctgtctccagacctgtcagagatgccgctgttcgcagacctgagtcagatccctcttacacccgacctggatcagatgaccctgtcccccgacctcggagagaccgatctctcacccaacttcgggcagatgtcactgtcacccgacctgagccaggtcaccttaagccccgacatctcggacactaccctcctgccagacctaagtcaaataagtcccccacccgacctcgaccagattttttatccctccgagtcatcacaaagcctcttgcttcaggaattcaatgagagtttcccttatcccgaccttgggcagatgccctcccccagctcacccaccttgaatgacaccttcctctccaaagagtttaaccctctggtgattgtgggtctctctaaagatggcaccgattatattgagattatcccaaaggaggaggttcagagcagcgaagacgattacgcagagatcgactacgttccctacgacgacccttataagactgacgtgaggacaaatataaatagttcccgagacccggataatatcgctgcgtggtacctccggtctaataatgggaatcgcagaaactattatatagccgctgaagagataagttgggactactccgaatttgttcagagggaaactgacatcgaagacagcgatgatataccagaggacactacttataagaaggttgtttttcggaaatacttggactcaacatttaccaaaagagacccaagaggtgagtacgaagagcacctgggaattctgggaccgattatcagggccgaagtcgacgatgtaatccaggtgcgcttcaaaaatctggcctctcgcccatacagtctacacgcccacggtctctcgtacgagaaatcatcagaagggaaaacctatgaggatgacagtccggagtggttcaaagaggataacgcagtgcagcccaatagttcctatacttacgtttggcatgccacagagaggagcggccctgagtctccaggaagtgcatgccgcgcctgggcttattactctgcagttaatccagagaaggatatccacagcggtctgattggacctttgttaatctgtcaaaagggcatcttgcacaaggactctaatatgcctatggacatgagagagtttgtgttgctctttatgacctttgatgaaaaaaaaagttggtactacgaaaaaaagtcaagatccagctggaggctcacgtcaagcgaaatgaaaaaaagccacgagtttcatgcgatcaatggaatgatctactccctcccaggactgaaaatgtatgaacaggagtgggtccgactccacctgctcaacatcggcggctcccaggacattcacgtggtccactttcacggccagacattgttagagaatgggaataagcaacaccagctgggcgtctggccactcttgccgggatcattcaagaccttggagatgaaggctagtaagccaggctggtggctgttgaatacagaagttggcgagaatcagcgggcgggaatgcagacacccttcctgatcatggaccgggattgcaggatgcctatgggacttagcacgggtatcattagtgattctcagatcaaggcctcagaatttctgggctattgggagccgcgcttggctcgactaaataatggggggagctataacgcttggagtgtagagaaacttgccgccgaattcgcttccaaaccctggatccaggtagacatgcaaaaggaggtgataatcacagggatccaaacccagggggcaaagcactacctcaaatcttgctacaccacagaattttatgtggcttatagtagtaaccagatcaattggcagatcttcaaagggaacagcacacgcaatgtgatgtatttcaatggtaatagtgacgctagcaccattaaggagaatcagttcgatcccccaattgtcgccagatacataagaatatctcccacccgggcctataaccggccaactttgcgtctggagctgcagggatgtgaagtgaacggttgctccactccattggggatggagaatgggaagatcgaaaataaacagattactgcatcctctttcaaaaagtcatggtggggagattactgggaacccttcagggccaggctgaacgcgcagggacgcgtcaacgcctggcaggcgaaagctaacaacaacaaacagtggctggaaatcgatcttcttaagattaagaaaattaccgccatcattacccagggctgcaagtcgttatcaagtgaaatgtatgtgaaaagctataccattcactactctgaacaaggcgttgaatggaagccgtatcggctgaaaagctcaatggtagacaaaattttcgaaggaaatactaacacgaagggccacgtcaagaatttcttcaatccccccattatttctcggtttatacgtgttatcccgaaaacctggaaccagagcattgccctgaggctggagttgttcggctgtgacatttat

SEQ ID NO: 9125 - DNA, 6672 bp, synthetic construct
  misc_feature 1..6672: note = source = /note="Description of Artificial Sequence: Synthetic coding sequence"
  source 1..6672: mol_type = other DNA
atgttccctggttgccctcgtttgtgggtgctggtcgtgctcggtacctcttgggtgggctggggctcccagggaacagaggctgcacagcttcgtcagttctacgtggctgctcaaggaatttcatggtcttatagacctgagcctaccaactcctctctgaatttgagcgtcacatcatttaagaagatcgtgtacagggaatacgagccctacttcaagaaggagaagccccaatccacaatcagcggattgcttggacccacactctacgcagaggtaggagacattattaaggtgcattttaagaacaaggcagataagcccctgtcaatccatccacaaggaatccgctactctaaactgagtgagggagcaagttacttggatcacacatttcctgccgagaaaatggatgatgccgtagcccctggcagggaatacacctacgaatggtctattagtgaggattctggacccacccatgatgacccaccttgcctgacccacatttactattcacacgaaaacctcatcgaggattttaatagcggcctcatcggccccttgctgatctgcaagaagggcacacttactgaaggcggtacacagaagacttttgataagcagatcgttcttcttttcgccgtgtttgatgaatctaaatcatggtctcagagcagtagtctcatgtacacagttaacggatatgtcaacggtaccatgcctgacatcaccgtttgtgctcacgatcacatctcctggcacttgctcggtatgtcctctggacccgagcttttttctatccatttcaacggccaggtcctggagcagaatcaccacaaagtgtccgctatcaccctcgtctcagctacctctactactgccaatatgacagttggcccagaaggaaagtggataattagttcccttactcctaagcacttgcaggccggaatgcaagcttacatcgatattaagaactgtcctaagaagactcgcaaccttaaaaagattacacgtgaacagcgccgtcacatgaagcgttgggagtactttatagctgccgaagaggtcatttgggactatgcacccgttatccctgcaaacatggacaagaagtataggtcccagcacctggacaatttttccaatcagatcggtaaacattacaagaaggtcatgtacacccagtatgaggacgagtcctttaccaagcacacagtaaatcccaatatgaaagaggacggcatcctgggccctattatcagggcccaggtgcgtgacacactcaaaatcgtgtttaaaaacatggcctctcgcccctattccatatatcctcacggcgtgaccttctcaccctacgaagatgaagtcaacagctcatttactagtggaaggaataacacaatgattagggccgtacagcccggcgaaacctacacatataaatggaatattttggagtttgatgagcctactgagaatgacgcccaatgcctcacacgtccctactatagtgatgtcgatatcatgcgcgatatcgcttcaggtctgatcggtctgctccttatctgtaaatcaaggagtctggaccgccgcggaatacagcgtgcagccgacatcgagcagcaggctgtcttcgccgtgttcgacgaaaataaaagctggtacctggaggacaacattaataaattctgtgagaatcctgatgaggtaaagcgtgatgatcctaaattctatgagtcaaacataatgagcactatcaacggctacgtcccagaatctatcaccaccctcggattctgtttcgatgacaccgtacagtggcacttctgttccgtgggtacccaaaacgaaatcctgaccattcactttactggccacagttttatctacggcaagcgccacgaggacaccctgacactgttcccaatgaggggagagagtgttaccgtgaccatggataacgtcggaacttggatgctcactagtatgaactcaagtccaaggtccaagaaactgagactcaagttccgtgacgtgaagtgtataccagacgacgacgaggatagctatgaaattttcgagccacccgagtccaccgtcatggccactcgtaaaatgcacgacaggctcgaacctgaagatgaggaatctgacgctgactacgactaccaaaaccgtctggccgcagctctgggtataaggtcctttcgtaatagcagtctgaatcaggaagaggaggaatttaatctgaccgcacttgccttggagaacggcaccgaatttgtctcctccaataccgatatcatcgtgggaagtaattacagctcaccatccaatatctccaagttcactgttaataacttggctgagcctcagaaggccccatctcaccaacaagccactacagccggcagcccactccgccacctgatcggaaaaaactccgtgctgaacagttctaccgccgaacacagttcaccatactctgaagaccctattgaagacccattgcaacccgatgtcactggaatcaggctgttgagtctgggcgcaggcgaattcaagtcacaggaacacgctaaacataagggcccaaaagtggaaagagaccaggccgctaagcatcgtttctcttggatgaagttgttggctcacaaagtgggacgccatcttagccaggacaccggaagcccaagcggaatgaggccctgggaggatcttccttcccaggatactggatccccttcacgcatgcgcccatggaaggatcctcctagcgacctcctccttctgaaacaatctaactcctctaagatcttggtaggccgttggcatctggcctccgagaagggctcctatgaaatcattcaggacactgatgaagacacagctgtgaataactggctgataagtcctcagaacgcttcaagagcctggggcgaatccactcctctcgccaataagcctggaaagcagtccggccaccccaagttccccagagtaaggcacaagtccctgcaggtcaggcaagatggtggtaagtcacgcctgaaaaagtctcaattccttattaagacccgcaaaaagaagaaggaaaaacacacccaccacgctccactctcaccacgtaccttccatccactcagaagcgaggcttacaacaccttctctgagcgccgtcttaagcactctcttgtgttgcataagtcaaatgagacctctctccccaccgaccttaaccaaacactgcccagtatggatttcggttggatcgcctcacttccagaccataatcagaattcctccaatgacaccggacaagcctcctgtcctcctggactgtaccagactgtccctcctgaggaacactatcagacattccccatacaggatcctgaccagatgcactctacctcagatccttcacaccgttcttctagtcccgagctctctgagatgttggagtacgatagatctcacaagagtttccctaccgacatcagtcaaatgagccctagcagtgagcatgaggtctggcagaccgttattagcccagatctctcacaggtaaccctctctcctgagctctctcagaccaacttgagccccgacctcagtcatactacattgagtcccgagctcatccaaaggaatctttcccccgccctgggtcagatgcctatctccccagacctctctcacacaacattgagccctgatctctcccacacaaccctgtcactggatttgtcccagacaaatctgagccctgaattgtcacaaaccaacctcagtcccgctcttggtcagatgccccttagcccagacctgagtcacacaaccctgtccctggacttcagccagacaaatctgtcacccgagcttagccacatgaccctgtccccagagctgagccagaccaatctctcccccgctctcggtcagatgcctatctcccccgatctgtcccacaccacactctctctcgacttttcccaaaccaacctttctccagagctctcccagacaaatctgtcccctgctctcggacagatgcccctgtctcccgaccctagtcatactacactcagcctcgacctgagtcagacaaatctttctcccgagctgtctcaaactaatctgagccctgacctttccgagatgccactgtttgctgacctgtctcaaattcccctcaccccagatctcgaccagatgacattgtcccccgacctgggagaaactgatctgtcccctaacttcggccaaatgtccttgtccccagacctttcccaagtaacactgagccccgatatctcagatacaacccttttgccagatctttcacagataagcccaccacccgatctcgatcagatattctacccttctgagtcaagccaaagcctccttctgcaggagttcaacgagtccttcccctaccctgacctcggacaaatgccttccccctcctcaccaactcttaatgatacatttctgagcaaggagttcaatcctctggtcatcgtgggtctgtctaaggacggtaccgactatatcgagataatcccaaaggaagaggttcagagcagcgaagacgattacgccgaaattgactacgtgccttacgatgatccatacaagacagacgtaaggaccaatataaactcttcaagggacccagataatatcgccgcttggtacctccgtagcaataacggcaatcgccgcaattactatatcgccgccgaggaaatttcttgggactacagcgaattcgtccagagggagactgacattgaggattccgatgacatcccagaggacacaacctacaaaaaggtcgtgtttcgtaaatatttggactctaccttcactaagcgtgatccaaggggtgaatatgaggaacacctgggtatactcggtcctatcattagggctgaggtggatgatgtgatacaggtccgtttcaaaaaccttgcttctagaccctactccctgcatgcccacggtctctcatatgagaaatctagtgagggcaagacctacgaggacgactcacctgaatggttcaaggaagacaacgcagtacagcctaacagctcctatacttatgtctggcatgcaaccgagagaagcggtcctgagagtcccggtagcgcctgcagggcatgggcttactacagtgctgtcaacccagagaaggacatccactctggtctgatcggtcctttgctcatctgccagaaaggcattctccacaaagactccaatatgcctatggacatgcgcgaatttgtactcctctttatgacattcgatgagaagaaatcatggtattacgagaaaaaatctcgttcttcttggcgtctgaccagttcagaaatgaagaagtcacatgagttccacgctatcaatggaatgatatacagtttgcctggtctcaagatgtacgagcaggaatgggtgaggctgcacctgctgaacatcggcggttctcaggacattcacgtggtgcacttccacggccaaacactgctggagaatggtaataagcagcaccagctcggtgtctggcctcttttgcccggaagttttaaaaccctggagatgaaggcctctaagcccggttggtggcttcttaacaccgaagtcggagaaaaccagcgcgctggcatgcagactccatttcttatcatggaccgcgattgcaggatgccaatgggactgtctactggaattatttccgacagccagattaaggcatctgagttcctgggttactgggagccacgcctggcccgcctgaacaatggcggaagctacaatgcttggagcgttgaaaagttggccgctgagttcgcctctaagccatggatccaagtagacatgcaaaaagaggtgatcataacaggtatccagacacagggtgccaagcactacctgaaaagctgttacaccacagaattttacgtcgcttacagcagcaaccagatcaactggcagatctttaagggaaactcaacccgcaatgtgatgtactttaatggcaactccgacgcatccaccatcaaagaaaaccagttcgaccctccaatcgtggcaagatatatccgcatttcccccacccgcgcatacaacaggcctactttgaggttggagctccagggatgcgaagtgaacggttgttctacacctctcggcatggaaaacggtaagattgagaacaaacaaattaccgcctcctcatttaagaaatcctggtggggtgactattgggaaccattcagagctcgccttaacgcacagggacgcgtcaatgcttggcaggcaaaggctaacaacaataaacagtggctcgaaattgacttgctcaagatcaagaaaataacagccatcatcacacagggctgcaagtccctctcatctgaaatgtacgttaagtcatataccattcactatagcgaacagggagtggagtggaagccatacaggctcaagagcagcatggtggataaaatttttgagggtaatacaaacaccaagggacacgtgaagaattttttcaatccacccatcatctctcgttttatacgcgtcatacctaagacctggaatcagtcaatcgctctgaggcttgagcttttcggatgcgatatatac

SEQ ID NO: 9126 - DNA, 6672 bp, synthetic construct
  misc_feature 1..6672: note = source = /note="Description of Artificial Sequence: Synthetic coding sequence"
  source 1..6672: mol_type = other DNA
atgtttccgggttgtccgcgattatgggttttagtagttctaggtacgtcgtgggtaggttggggttcgcaaggtacggaagcggcgcaactacgtcaattttatgttgcggcgcaaggtatatcgtggtcgtatcgaccggaaccgacgaattcgtcgctaaatttatcggttacgtcgtttaaaaaaatagtttatcgtgaatatgaaccgtattttaaaaaagaaaaaccgcaatcgacgatatcgggtctactaggtccgacgttatatgcggaagtaggtgatataataaaagttcattttaaaaataaagcggataaaccgctatcgatacatccgcaaggtatacgatattcgaaactatcggaaggtgcgtcgtatttagatcatacgtttccggcggaaaaaatggatgatgcggtagcgccgggtcgtgaatatacgtatgaatggtcgatatcggaagattcgggtccgacgcatgatgatccgccgtgtctaacgcatatatattattcgcatgaaaatctaatagaagattttaattcgggtctaataggtccgttactaatatgtaaaaaaggtacgttaacggaaggtggtacgcaaaaaacgtttgataaacaaatagtattactatttgcggtatttgatgaatcgaaatcgtggtcgcaatcgtcgtcgttaatgtatacggttaatggttatgtaaatggtacgatgccggatataacggtatgtgcgcatgatcatatatcgtggcatttattaggtatgtcgtcgggtccggaattattttcgatacattttaatggtcaagtattagaacaaaatcatcataaagtatcggcgataacgctagtatcggcgacgtcgacgacggcgaatatgacggtaggtccggaaggtaaatggataatatcgtcgttaacgccgaaacatttacaagcgggtatgcaagcgtatatagatataaaaaattgtccgaaaaaaacgcgaaatttaaaaaaaataacgcgtgaacaacgtcgtcatatgaaacgttgggaatattttatagcggcggaagaagttatatgggattatgcgccggtaataccggcgaatatggataaaaaatatcgttcgcaacatttagataatttttcgaatcaaataggtaaacattataaaaaagttatgtatacgcaatatgaagatgaatcgtttacgaaacatacggttaatccgaatatgaaagaagatggtatactaggtccgataatacgagcgcaagtacgagatacgctaaaaatagtttttaaaaatatggcgtcgcgaccgtattcgatatatccgcatggtgtaacgttttcgccgtatgaagatgaagttaattcgtcgtttacgtcgggtcgaaataatacgatgatacgagcggtacaaccgggtgaaacgtatacgtataaatggaatatattagaatttgatgaaccgacggaaaatgatgcgcaatgtttaacgcgaccgtattattcggatgttgatataatgcgtgatatagcgtcgggtttaataggtctactactaatatgtaaatcgcgttcgctagatcgacgtggtatacaacgtgcggcggatatagaacaacaagcggtatttgcggtatttgatgaaaataaatcgtggtatctagaagataatataaataaattttgtgaaaatccggatgaagttaaacgagatgatccgaaattttatgaatcgaatataatgtcgacgataaatggttatgtaccggaatcgataacgacgttaggtttttgttttgatgatacggtacaatggcatttttgttcggtaggtacgcaaaatgaaatactaacgatacattttacgggtcattcgtttatatatggtaaacgtcatgaagatacgctaacgttatttccgatgcgtggtgaatcggtaacggtaacgatggataatgtaggtacgtggatgctaacgtcgatgaattcgtcgccgcgttcgaaaaaattacgactaaaatttcgagatgttaaatgtataccggatgatgatgaagattcgtatgaaatatttgaaccgccggaatcgacggttatggcgacgcgtaaaatgcatgatcgtctagaaccggaagatgaagaatcggatgcggattatgattatcaaaatcgtctagcggcggcgttaggtatacgatcgtttcgaaattcgtcgctaaatcaagaagaagaagaatttaatctaacggcgctagcgctagaaaatggtacggaatttgtttcgtcgaatacggatataatagtaggttcgaattattcgtcgccgtcgaatatatcgaaatttacggttaataatttagcggaaccgcaaaaagcgccgtcgcatcaacaagcgacgacggcgggttcgccgttacgacatctaataggtaaaaattcggtactaaattcgtcgacggcggaacattcgtcgccgtattcggaagatccgatagaagatccgctacaaccggatgtaacgggtatacgactactatcgttaggtgcgggtgaatttaaatcgcaagaacatgcgaaacataaaggtccgaaagtagaacgagatcaagcggcgaaacatcgattttcgtggatgaaactactagcgcataaagtaggtcgtcatctatcgcaagatacgggttcgccgtcgggtatgcgaccgtgggaagatctaccgtcgcaagatacgggttcgccgtcgcgtatgcgaccgtggaaagatccgccgtcggatctattattattaaaacaatcgaattcgtcgaaaatattagttggtcgatggcatttagcgtcggaaaaaggttcgtatgaaataatacaagatacggatgaagatacggcggttaataattggttaatatcgccgcaaaatgcgtcgcgagcgtggggtgaatcgacgccgctagcgaataaaccgggtaaacaatcgggtcatccgaaatttccgcgtgttcgtcataaatcgttacaagttcgacaagatggtggtaaatcgcgtctaaaaaaatcgcaatttctaataaaaacgcgtaaaaaaaaaaaagaaaaacatacgcatcatgcgccgttatcgccgcgaacgtttcatccgttacgttcggaagcgtataatacgttttcggaacgtcgtctaaaacattcgttagtattacataaatcgaatgaaacgtcgctaccgacggatctaaatcaaacgttaccgtcgatggattttggttggatagcgtcgttaccggatcataatcaaaattcgtcgaatgatacgggtcaagcgtcgtgtccgccgggtttatatcaaacggtaccgccggaagaacattatcaaacgtttccgatacaagatccggatcaaatgcattcgacgtcggatccgtcgcatcgatcgtcgtcgccggaattatcggaaatgttagaatatgatcgttcgcataaatcgtttccgacggatatatcgcaaatgtcgccgtcgtcggaacatgaagtatggcaaacggtaatatcgccggatttatcgcaagtaacgttatcgccggaactatcgcaaacgaatctatcgccggatttatcgcatacgacgctatcgccggaactaatacaacgaaatttatcgccggcgttaggtcaaatgccgatatcgccggatctatcgcatacgacgctatcgccggatttatcgcatacgacgctatcgttagatctatcgcaaacgaatttatcgccggaactatcgcaaacgaatctatcgccggcgttaggtcaaatgccgctatcgccggatttatcgcatacgacgttatcgttagatttttcgcaaacgaatttatcgccggaattatcgcatatgacgctatcgccggaattatcgcaaacgaatttatcgccggcgttaggtcaaatgccgatatcgccggatctatcgcatacgacgttatcgctagatttttcgcaaacgaatttatcgccggaactatcgcaaacgaatctatcgccggcgctaggtcaaatgccgctatcgccggatccgtcgcatacgacgttatcgttagatctatcgcaaacgaatttatcgccggaactatcgcaaacgaatttatcgccggatctatcggaaatgccgctatttgcggatctatcgcaaataccgctaacgccggatttagatcaaatgacgctatcgccggatttaggtgaaacggatttatcgccgaattttggtcaaatgtcgttatcgccggatttatcgcaagtaacgctatcgccggatatatcggatacgacgctattaccggatttatcgcaaatatcgccgccgccggatttagatcaaatattttatccgtcggaatcgtcgcaatcgttactattacaagaatttaatgaatcgtttccgtatccggatttaggtcaaatgccgtcgccgtcgtcgccgacgttaaatgatacgtttctatcgaaagaatttaatccgctagtaatagttggtttatcgaaagatggtacggattatatagaaataataccgaaagaagaagtacaatcgtcggaagatgattatgcggaaatagattatgttccgtatgatgatccgtataaaacggatgttcgaacgaatataaattcgtcgcgagatccggataatatagcggcgtggtatttacgatcgaataatggtaatcgtcgaaattattatatagcggcggaagaaatatcgtgggattattcggaatttgtacaacgtgaaacggatatagaagattcggatgatataccggaagatacgacgtataaaaaagttgtatttcgtaaatatttagattcgacgtttacgaaacgagatccgcgaggtgaatatgaagaacatttaggtatactaggtccgataatacgtgcggaagtagatgatgtaatacaagtacgatttaaaaatctagcgtcgcgtccgtattcgctacatgcgcatggtttatcgtatgaaaaatcgtcggaaggtaaaacgtatgaagatgattcgccggaatggtttaaagaagataatgcggttcaaccgaattcgtcgtatacgtatgtatggcatgcgacggaacgttcgggtccggaatcgccgggttcggcgtgtcgtgcgtgggcgtattattcggcggttaatccggaaaaagatatacattcgggtttaataggtccgctattaatatgtcaaaaaggtatattacataaagattcgaatatgccgatggatatgcgagaatttgttctattatttatgacgtttgatgaaaaaaaatcgtggtattatgaaaaaaaatcgcgatcgtcgtggcgtctaacgtcgtcggaaatgaaaaaatcgcatgaatttcatgcgataaatggtatgatatattcgttaccgggtctaaaaatgtatgaacaagaatgggttcgtttacatctattaaatataggtggttcgcaagatatacatgtagtacattttcatggtcaaacgttattagaaaatggtaataaacaacatcaattaggtgtttggccgctattaccgggttcgtttaaaacgctagaaatgaaagcgtcgaaaccgggttggtggctactaaatacggaagtaggtgaaaatcaacgtgcgggtatgcaaacgccgtttttaataatggatcgtgattgtcgaatgccgatgggtctatcgacgggtataatatcggattcgcaaataaaagcgtcggaatttttaggttattgggaaccgcgtttagcgcgtctaaataatggtggttcgtataatgcgtggtcggtagaaaaattagcggcggaatttgcgtcgaaaccgtggatacaagtagatatgcaaaaagaagtaataataacgggtatacaaacgcaaggtgcgaaacattatctaaaatcgtgttatacgacggaattttatgtagcgtattcgtcgaatcaaataaattggcaaatatttaaaggtaattcgacgcgtaatgtaatgtattttaatggtaattcggatgcgtcgacgataaaagaaaatcaatttgatccgccgatagtagcgcgttatatacgaatatcgccgacgcgtgcgtataatcgaccgacgttacgtttagaattacaaggttgtgaagttaatggttgttcgacgccgctaggtatggaaaatggtaaaatagaaaataaacaaataacggcgtcgtcgtttaaaaaatcgtggtggggtgattattgggaaccgtttcgagcgcgactaaatgcgcaaggtcgagtaaatgcgtggcaagcgaaagcgaataataataaacaatggttagaaatagatttactaaaaataaaaaaaataacggcgataataacgcaaggttgtaaatcgctatcgtcggaaatgtatgtaaaatcgtatacgatacattattcggaacaaggtgtagaatggaaaccgtatcgtctaaaatcgtcgatggttgataaaatatttgaaggtaatacgaatacgaaaggtcatgtaaaaaatttttttaatccgccgataatatcgcgatttatacgagttataccgaaaacgtggaatcaatcgatagcgttacgtttagaactatttggttgtgatatatat

SEQ ID NO: 9127 - DNA, 6672 bp, synthetic construct
  misc_feature 1..6672: note = source = /note="Description of Artificial Sequence: Synthetic coding sequence"
  source 1..6672: mol_type = other DNA
atgttccctggatgccctaggctctgggtcttggtcgttctggggacatcttgggtagggtgggggtcgcagggtaccgaggccgctcagctccgtcagttctacgtcgccgcgcaggggattagttggagctataggccggaacctaccaactcatcgctgaacttgtccgttacatcttttaaaaagatagtataccgtgaatacgaaccttacttcaagaaggaaaagcctcaaagcacaatctccggtctcttggggcctactttgtacgcggaagtcggcgatatcataaaggtgcacttcaagaacaaggcggataagcccctctctatccatcctcagggtataaggtattcaaagctatccgagggggcatcttatttggatcatacatttcctgccgaaaaaatggacgatgccgtggctcccggtcgagagtatacttatgagtggtctatcagtgaagattccggaccaactcatgatgaccccccttgcctaacccatatttattattctcacgagaacctaattgaagacttcaactccgggctgatcgggcctctcctgatctgcaaaaagggtaccctgactgaagggggcacccaaaaaactttcgataagcaaatagtgttgctctttgctgtattcgatgagtcaaagagctggagtcagtccagcagcttaatgtacaccgtgaatggctacgtgaacgggacaatgcctgatatcacagtatgtgcacatgaccatatcagctggcatttgctcggcatgagctctggccctgaactgttttccattcactttaatggacaggtactggagcagaatcatcataaagtttctgccatcacattggtgtctgccacatccaccacagcaaacatgacggtgggtccggaagggaagtggattattagcagtctgacccctaaacacctgcaggccgggatgcaggcttatatcgatattaagaactgcccaaaaaaaacgaggaacttgaaaaagattacccgcgaacagagacgtcatatgaagagatgggagtatttcattgcagcagaggaagtcatctgggattatgcacccgtaattccagcaaatatggacaaaaaatataggtctcagcatctggacaactttagtaatcaaatcgggaaacactacaagaaggttatgtatactcagtatgaggacgaatcctttacgaaacacactgttaaccctaacatgaaagaggacggaatccttgggcccattatcagggcacaggttcgggacacattgaagatcgtgttcaaaaatatggcttcccgaccttactctatatacccccacggtgtgacctttagcccctatgaggatgaggtcaatagttctttcacaagcggaaggaataatacaatgatccgcgccgtgcaacccggggagacatacacctacaagtggaatattctggagttcgacgagcctacggagaatgacgcccaatgcctcaccagaccttattattcggatgttgatattatgagagatatagcatccggcctaattggccttctgctcatttgcaagagcaggagtctggatcgcaggggtatccagcgtgccgccgacatagagcaacaggccgtgttcgccgtgttcgacgaaaataaatcttggtaccttgaggataacattaataagttttgcgaaaaccccgatgaagtgaagcgggatgatcccaagttctacgaaagcaatataatgagtacaattaacgggtacgttcctgaaagcatcactacccttgggttttgcttcgacgataccgtccagtggcatttctgttccgtaggtacacagaacgagatcctcaccatccattttactggccactccttcatatatggtaaacggcatgaggacacattgacactgtttcccatgaggggggagtctgtgaccgtaaccatggataacgtcggcacatggatgctgacgagcatgaactcctccccacgtagcaagaagttgaggttgaagtttcgagacgtgaaatgcatccccgacgatgatgaggattcctatgagatttttgagccccccgaatccacggtgatggctacccggaaaatgcacgataggctggaacctgaggacgaggagtccgacgccgactacgactatcagaacagattggcagcggccctgggaatcaggagcttcaggaattcctcacttaaccaagaagaagaggagttcaaccttacagcactcgccctcgaaaacgggactgaattcgtttcatccaatactgacatcatcgtaggatccaattattccagtccgagtaatatatctaaatttaccgttaataatctcgccgaaccgcagaaggccccgagtcaccagcaggcaaccaccgccgggagtccattacgccaccttattggaaaaaactccgtcctgaatagctctacagcggagcacagcagcccatatagtgaagaccccatcgaagatccactacagcctgacgtgaccggcataagactcctgtcccttggcgccggcgaatttaagagccaggaacatgcgaagcataaaggacccaaagtggagagagaccaggccgctaagcacagattctcatggatgaaactgctggcacataaagtgggcagacatttaagtcaggacacaggctccccaagtggtatgcgaccctgggaagatttgccctcacaggacaccggcagcccaagtcgcatgcgtccttggaaggacccccccagtgatctgctgctactgaaacagtcaaactcttcaaagatcctggttggtcgatggcatcttgcttccgaaaaaggaagttatgaaatcattcaggatacagacgaggataccgccgtaaataactggttgataagcccacagaatgcgtccagggcctggggggaaagtaccccgctggccaacaagcccgggaaacaatctggccaccccaagttcccgcgggtcaggcataagtcgctacaggtgcgacaggatggcggaaaaagtcggctcaagaaatctcaatttctcatcaaaactaggaagaagaaaaaggagaagcatacacatcatgcgccactaagccctcgaaccttccatcccctgaggtctgaggcttacaatacgttcagcgagaggagactgaagcactccctcgtgttgcataagtccaatgaaacgagcctgccaactgatcttaaccagaccctgccctccatggacttcggatggatcgctagcctgccggatcacaatcagaattcatctaacgatactgggcaggcctcctgtccgccgggcctctaccaaacggtccctcccgaagagcactatcaaactttccccatccaggatcccgatcagatgcactccacaagcgacccgtcacacagaagtagttctccggaactcagcgagatgttggaatacgatcggagccataaatcgttccctaccgatatctcccagatgagcccctccagcgaacatgaggtctggcagaccgtgattagcccggatttatctcaagtcacgctgtctcctgagctgtctcaaaccaacctgagccccgacctcagtcatacaacactttcaccagaactgattcaacggaatctaagtcctgccctgggacagatgccgatctctcctgacctttcacacactacgctgtcccctgacctatcccacacgactcttagcctggatttgagccaaaccaatctctcccccgagctgagccagactaacctttcacctgctttaggccagatgcccctctcacccgacttgagtcatacaacattgtcactcgacttttcacagactaacctttctcccgagttgtcacatatgactctgtcgcccgagttgagtcaaactaatctgagtcccgccctgggacagatgcctatttcgcctgacctgtctcacacaaccctaagtctggacttttctcagaccaatttgagtcccgagctgagtcaaacaaatctgtcaccggctcttggacaaatgcctctctccccagatccatctcacaccactctctctcttgatctctcgcagaccaacttatctccagagctgtctcagaccaacctgtccccagatctttctgagatgccgttgtttgcggacctgagccagattcccctcactcctgacctggatcaaatgacactcagtcccgacctgggcgagaccgatctttctccaaactttggacagatgtctttgtccccagacttgagccaggtgacgctgtctccggacatatctgacactacgttgctacccgatctgtcacaaatatcacctcccccggacttagatcagatattttaccctagcgagagtagtcagtctctcctacttcaggaattcaacgaatcctttccttatccggatctggggcagatgccctccccctcgagcccaactttgaatgacacattcctgagcaaagagttcaatccattagttatagttggactctctaaggacggaacagactatatcgaaatcatacccaaagaagaagtgcagtcttctgaagatgattacgcggagattgactacgttccatatgatgacccctacaaaacagacgtccgaacgaacataaattcctcccgggacccagataatattgccgcatggtaccttcgctccaataacggaaatagacggaattactatattgccgccgaggagatttcttgggactattccgagttcgtgcaaagggagaccgacattgaggatagtgacgatattcccgaggacaccacttacaagaaagttgttttcagaaaatacctcgactccacttttactaaacgcgacccccggggtgaatacgaagagcacttgggcattttaggtcccatcataagagctgaagtcgacgacgtgatacaagttcggtttaaaaacctggcttccaggccatatagcctccatgcacacggccttagttatgaaaagagtagcgagggcaagacctatgaggatgacagcccagaatggttcaaggaagataacgccgtgcagccaaatagcagttatacttacgtttggcatgctacagagagatccggaccagagagccccggcagcgcctgtcgcgcctgggcctactattctgcggtcaatccagaaaaggacatccattctggtctcataggtcctctgctgatctgtcagaagggtattctgcacaaggactcgaacatgccaatggacatgagagagttcgttttgctcttcatgacctttgacgagaagaagagttggtattacgagaaaaaaagcagatccagctggaggcttacatcttcggaaatgaaaaaaagccacgagtttcatgcgattaatggcatgatttattccctccccgggctgaagatgtacgagcaagagtgggtgcgactgcatttgctcaacattggtggttcccaggacattcacgttgtccatttccacgggcagacacttctcgagaacgggaacaagcagcatcagctgggcgtgtggccgcttctgcccggatctttcaagacacttgaaatgaaggcgtctaaacccggctggtggctgctgaacacggaggtgggggagaaccagcgggctggtatgcaaacccccttcctcataatggatagagactgccgcatgccaatgggtctcagtacgggcatcatttctgacagccagattaaagcgtccgaattcctcggatattgggaacctagactagctcggttgaacaatggcggaagctacaacgcttggtcagtggagaagctagcagctgaatttgcgagtaagccttggattcaggtcgacatgcagaaagaggtcatcataactggcattcagacccagggagccaagcactatctgaagtcctgttacactacggaattttatgtagcctacagctccaatcagattaattggcagatcttcaaagggaatagtacaagaaacgtgatgtatttcaacggaaacagcgacgcgagcactatcaaagagaaccagtttgatccgcctattgtagctaggtacattaggatctcacctacgcgggcttacaacaggcctacactgaggttggagctgcagggctgtgaggttaacgggtgtagtaccccacttggaatggaaaacgggaagatagaaaataaacagatcacggcgtcctcatttaaaaaaagctggtggggcgactattgggaaccgtttagggctcgtctgaacgcacagggcagagtgaatgcatggcaggcaaaagcaaataataataagcagtggcttgaaattgatctccttaaaatcaagaagattaccgccatcatcactcagggatgtaaaagtctttcttcagaaatgtatgtgaagagttacactattcactacagcgaacagggcgttgaatggaaaccttaccgcctgaagagttccatggttgataaaatttttgaaggtaacaccaataccaagggccatgtaaagaacttttttaatccccctatcatcagtcgatttatccgcgttattccgaagacctggaaccagtcaattgctcttcggctggagctttttgggtgtgacatatac

SEQ ID NO: 9128 - DNA, 6672 bp, synthetic construct
  misc_feature 1..6672: note = source = /note="Description of Artificial Sequence: Synthetic coding sequence"
  source 1..6672: mol_type = other DNA
atgttcccagggtgcccaagactttgggtcttagtcgtcctgggaacatcttgggtaggatggggatcgcaagggacagaagctgcccagctaaggcagttctacgttgctgctcaggggatcagttggtcatatcgtccagaaccaaccaactcttccctgaacttaagcgtaacttcctttaagaagatagtgtaccgagagtatgagccatactttaaaaaggagaaaccccagtccaccatttcaggcctgctgggacctacgctttacgccgaagtgggagacatcattaaggtgcacttcaaaaacaaggctgataagcccctttcaattcacccacaaggaattcggtattccaaattatccgagggcgcctcttatttggatcacacctttccagccgagaagatggatgacgccgtggccccgggcagagagtacacgtacgaatggtccatcagcgaggacagtggccctacacacgatgatccgccttgcctcactcacatatactactctcacgaaaatctcatcgaagactttaactcgggtttaattggaccacttttaatctgcaagaaaggtaccttaactgagggtggcacccagaaaacgttcgacaagcagatcgtgctgctcttcgccgtgtttgatgaatccaaaagctggtctcagtcttccagtttgatgtacactgttaacgggtacgtgaacgggaccatgcccgacattaccgtctgtgcccatgaccacatttcatggcaccttcttggcatgagctcaggcccagaacttttctctattcacttcaacgggcaggtgctggagcagaatcatcacaaggtctcagctatcactttagtgtccgcaacttccaccaccgctaatatgaccgttggacccgaagggaaatggataatttccagcctgactcctaaacacctccaggccggaatgcaggcctacatcgatatcaaaaactgtccaaaaaagactaggaacctgaaaaaaattacgcgagagcaacggcggcacatgaagaggtgggagtattttatcgcggctgaagaggtaatttgggactacgctccggtcattcctgccaatatggacaaaaagtaccgctcccaacatctggacaacttctctaaccaaatcggaaagcactacaagaaggtaatgtatacgcagtatgaggacgaaagcttcactaagcataccgtaaaccccaacatgaaagaagatggcatcctcgggccaatcatcagagctcaggtgcgtgatacgcttaagattgtgttcaagaacatggcctcaagaccttacagcatttacccacatggggtgacattttccccctatgaagatgaagtgaacagttcatttacctccgggagaaacaacactatgatcagggctgtacagcccggagaaacctacacatacaagtggaatattctagaatttgatgagcctaccgaaaacgatgcgcaatgtctcacacgaccatactattcagatgtggatattatgagggacatcgctagtggcctgattgggttgctgttgatctgtaagtccaggagcctcgaccgccgagggatccagagagctgccgacatcgagcaacaggcagtattcgccgtgtttgacgagaacaaaagctggtatttggaggacaacatcaacaagttctgtgagaatcctgacgaagtcaaacgagacgatcccaagttttacgaatccaacatcatgtcaactattaatggttacgttcccgagtccatcacaactctgggattttgcttcgatgataccgtccagtggcacttttgttctgtggggacccagaatgagatcctcaccattcattttacaggacattcgtttatctacggaaaaagacacgaggacaccttgacgctgttccctatgcgtggagagtctgtcactgtgaccatggacaacgtgggaacgtggatgctgacgtccatgaattcttctcctaggtcaaagaagctaagactgaaatttagagatgttaagtgtataccagacgatgacgaagattcctatgaaatctttgaacctccggagagcaccgtcatggctacccggaaaatgcacgacaggctcgaacctgaagacgaggagtccgacgcagactacgactatcaaaaccgactggcagctgctttgggcatacggtctttcaggaactcatccctaaatcaagaggaagaggagtttaatctcactgccctggctctcgagaacgggactgagttcgtctcctccaacaccgacataatcgtgggcagtaattacagtagcccatctaacattagcaaattcacagtaaacaacctggccgagccacagaaagcaccatctcaccagcaggcaacgacggctggctctccactgagacacctgatcgggaagaacagcgtgttgaattcttcgactgcggaacacagtagtccctactctgaagatcctattgaggacccactgcagcctgacgtcactggcattaggttactctcactcggtgccggggaatttaagtcccaagaacacgctaagcataagggccccaaagtggaacgcgaccaggccgccaagcatagattcagttggatgaagctgctggcccacaaagtcggcagacatctaagtcaagacacgggtagcccttctggaatgcgaccttgggaggacctgcctagtcaggatactggtagtccgagtcgtatgaggccctggaaggacccaccatcagatttgttactgttgaaacagtcaaattcctctaagatcctggtgggccgctggcacctggcttctgaaaagggatcttatgaaatcattcaagatacagacgaagatactgccgtgaacaactggctcattagccctcagaatgcctccagagcgtggggggagagcactccacttgccaacaaacctgggaagcagtccggccaccctaagttccctcgggtacgacataagtcattgcaggtgaggcaggacggcgggaaatctcgccttaagaaatcccagtttttaattaaaaccaggaaaaaaaagaaagaaaagcacacacaccatgcgcctttgtccccaagaacatttcacccactcaggtctgaagcttataatacattctctgagcgtagattaaagcactccctcgttctccataagtccaacgaaacctctttgcctactgacctgaatcaaaccttaccttccatggactttggttggatcgcaagtctcccagaccacaaccagaattcctctaatgatacgggtcaagcgtcatgtcccccaggattgtatcagacagtcccacctgaggaacattatcaaaccttccctatccaagatcctgatcaaatgcatagcacgagtgatccttctcaccgctcttcatccccagaacttagcgaaatgctcgaatatgaccgatctcacaagtcgttcccgacagatattagtcagatgagcccatcaagtgagcatgaggtttggcagacagtgatatcccccgacctgtcacaggttacactgagccctgaactgtctcagacaaatctgtcgccggatttatcacacactacactctcacctgaattaatacagaggaatcttagccctgctctgggtcagatgcccatttcccctgacctgagtcacaccactctttcccctgatctgtcccatacgactctgtccctggatctttctcaaacaaacctgtctcccgagttgtcacagaccaacctgtcccctgcgttgggtcagatgcccctctcccctgatctttcccacacaacattgagcctggatttctcacagactaacttatcaccagaattgagtcacatgacactgtccccggagctgagtcagaccaatctctcccccgccctgggacagatgccaatttccccagacctctcgcataccacactttccctcgatttctcccagacaaacctttcaccggagttgtctcagactaacctctcccccgcgctcggacagatgcctctgtctcccgaccccagtcatactaccttgagcctggacttaagtcagaccaacctttctcccgagctgtcgcagacaaatctaagccctgacctgtcagagatgccacttttcgcagatctttcccaaattccccttactccagacctggaccagatgacattgtctccagatttgggtgaaactgatctgagtcccaactttgggcaaatgtcgctctcccccgatctgtctcaggtgaccctctctcccgatatatctgacacaactctgctcccagacctgtcacagatatcccctccacctgacctggatcaaatcttttatccatccgagagttcccaaagcctgctgctccaggagttcaacgaatccttcccctatccggatttaggtcagatgccctctccttccagccccaccttaaacgatacttttctgagcaaagagttcaaccctttggttatcgtgggcctaagtaaagatggaacagactacatagagatcatccccaaggaggaagttcagtcttccgaggacgactacgccgaaatcgattacgtgccgtatgatgacccgtacaaaaccgatgtacgaaccaacatcaacagttcacgagatcctgacaacatcgccgcttggtacttacgctccaataacggcaatcgcaggaattactacattgccgccgaagagatctcttgggactacagcgaatttgtgcaaagagaaacagacatcgaggattccgacgacataccagaggacaccacttataagaaggtggtttttaggaagtacctggatagcacattcaccaagagagacccgcgcggcgaatacgaggagcacttgggcattttgggaccaattatccgcgcggaagtagatgacgtgatccaggttagatttaagaacctggcttctaggccttattccttgcacgcccatggtttgagttacgagaaatctagcgagggcaaaacatacgaagacgattcccctgaatggtttaaagaggataatgccgtccagccaaactccagttacacctacgtgtggcacgcaactgaaagaagcggtcctgagtcgcctggttcagcatgcagagcatgggcgtactattcggcagttaacccggagaaggacattcattctggcctaatcggtcctctgctcatatgccagaaaggtattcttcacaaggactctaatatgcccatggacatgagagaatttgtgcttctctttatgacatttgacgaaaagaagtcttggtattatgagaagaaaagcagatcgtcctggcgactcacctctagcgaaatgaagaaaagccatgagtttcacgctattaacggcatgatctactcactgcctggactgaagatgtacgaacaagaatgggtccgactacatcttctgaatatcggcggaagccaagatattcatgtggtgcattttcatgggcagacactgctggaaaatgggaataaacaacaccagctcggcgtgtggcccttgttgccaggatccttcaaaacgttagaaatgaaagcctccaaacccggatggtggcttctgaacacagaggtgggggagaaccagcgtgcaggtatgcagacaccctttttgatcatggatcgcgattgccggatgccaatggggctgtcaaccggcatcatttcagacagccagattaaggcatctgaattcctgggctactgggagcctcgacttgccagattaaataacgggggatcctacaacgcatggtcagtggagaagttagccgccgaattcgcttccaagccctggattcaggtcgacatgcagaaagaagtgataattaccgggatacagactcagggcgccaagcactatctgaagagctgttataccaccgaattttacgtggcttatagttctaatcagatcaactggcagatttttaagggaaattctacgcgaaatgtcatgtactttaacggaaatagcgacgcctccaccatcaaagaaaatcagttcgaccctcctattgtggctcgttacataagaatttcgcctaccagagcatataatagaccaacgctacgactcgaactgcagggatgtgaggtgaacggctgtagtactcccctggggatggaaaacggaaaaatcgaaaataaacaaattactgcttccagcttcaagaaaagctggtggggcgattactgggaaccctttagagcacggctgaatgcccagggccgagtcaatgcctggcaagccaaagctaacaacaataagcagtggctggaaatcgacctgctgaagatcaaaaagataaccgctataatcacccaaggctgtaagtccctctcttcagagatgtatgttaaaagttatacaatccactacagcgagcaaggcgtcgaatggaagccatatcggctcaagtcctctatggtagacaagatcttcgaggggaatacgaacacaaagggccacgtcaaaaatttcttcaacccacctataatcagtcgatttatccgagttattccgaaaacctggaatcaatctatcgctctccgactggaactgtttgggtgtgatatatac

SEQ ID NO: 9129 - DNA, 6672 bp, synthetic construct
  misc_feature 1..6672: note = source = /note="Description of Artificial Sequence: Synthetic coding sequence"
  source 1..6672: mol_type = other DNA
atgttccctgggtgccccaggctgtgggtgctggttgtcttgggaacctcttgggtcgggtgggggtctcaggggactgaggctgcccaactgaggcagttttatgttgccgcccaaggaattagttggtcttatcgacctgagcctacgaactcaagtctgaatctgtcagttactagctttaaaaaaatcgtttatcgcgagtatgagccctattttaaaaaagaaaagccacagtcaactatttctggtctgctcgggcctaccctctacgccgaagtgggtgatatcatcaaggtgcacttcaaaaacaaggccgacaagccactgagtattcatccgcagggcatcaggtattccaagcttagtgagggcgcgagttatcttgatcacacgttccccgccgaaaagatggatgatgccgttgccccggggcgtgaatacacatatgagtggagcattagtgaggactctgggccaacgcatgacgacccgccttgtctgacccacatctattactcacatgagaacctgattgaggacttcaatagtggattgatcggcccgttactcatctgcaagaaggggaccttaactgagggcgggactcagaagactttcgataagcagatcgtcctgctgttcgctgtcttcgatgagtctaagagttggtcccagagttcaagcctgatgtacaccgtaaatggttacgtgaatgggaccatgccagacatcacagtgtgcgcccacgatcatatatcatggcacctgctgggcatgtctagcggtcccgagcttttctctattcacttcaacggtcaagtgctcgaacagaaccatcacaaagtcagcgcgatcacccttgtctctgccacctccacaacagcgaacatgactgtgggacctgagggaaagtggattatttccagtctgacacccaaacatctacaggcaggcatgcaagcctatatcgacattaaaaattgccccaagaagacacggaatctgaaaaagatcaccagagaacaacgacgacacatgaagcgttgggagtactttatagcagctgaggaggtcatttgggattatgcacccgtgattcccgccaatatggacaaaaaataccgatctcagcatttagacaacttctctaatcagattgggaaacactacaagaaggttatgtacacacaatacgaggacgaaagcttcactaagcacacagtcaaccccaacatgaaggaagatgggatcctgggtcctataattcgggcacaggtccgcgacaccttaaaaatagtatttaaaaacatggcctctaggccctacagtatttatccacatggcgtaacattttctccttacgaagatgaggtcaacagctctttcaccagtggcagaaacaacaccatgattcgagcagttcagcccggagagacctatacatataagtggaatatattagagttcgacgaacctacggagaatgacgcgcaatgtcttacccgtccatactacagcgatgtggacatcatgcgagacatcgctagcggacttatcggcctgcttcttatctgtaagagtcggtctctcgataggaggggcatccagcgtgcagctgatattgaacagcaggctgttttcgctgtgtttgatgaaaacaaatcgtggtacctggaagataacattaataagttctgtgagaacccggacgaggtgaagcgcgatgatcctaagttctacgaatctaatataatgagcaccattaatggctacgttccagaatcaatcaccactttgggcttttgctttgacgatacagtccaatggcacttttgcagtgtgggtacacagaacgagattcttactattcactttacaggacatagcttcatctacggaaagcggcacgaggacaccctcactctgtttcccatgagaggggaatccgtcaccgtgactatggacaatgtaggcacttggatgctcacaagcatgaacagttctccacgctccaagaagctgcgccttaagtttagggacgtgaaatgcatccctgatgacgatgaggattcctacgagatcttcgaaccccctgaatctactgtgatggccacaagaaagatgcatgatcgcttggagccggaggacgaagagtccgacgctgactatgattaccaaaatcgcctggctgcagcgctgggtatccgatcttttcgcaactcctccctgaatcaggaagaagaggaattcaacttgaccgcattggccctggaaaacgggactgagtttgtcagctccaacacagatataatcgtcggtagtaattacagttccccctcaaacatctccaagtttactgtgaacaatctcgccgagccccaaaaggcaccttctcaccagcaggcaacaactgctggcagccctcttaggcatctcattgggaagaacagtgtcctcaactcgtccactgccgagcattcctctccctactcagaggacccgatagaggacccattacagccggatgtgaccggaatcagattgctgtcactaggcgccggggaatttaagtcacaggaacacgccaaacacaaaggcccaaaggtggaacgcgatcaagccgctaaacaccggtttagctggatgaagctgctcgcgcacaaagttggacgtcatttgtctcaggacaccgggagcccttctggtatgcgtccctgggaagaccttccctcccaagacaccggttccccatccaggatgagaccgtggaaggatccaccaagcgatctcctgctgctgaaacagagtaactctagcaaaatcctggtgggtcgttggcatcttgcatcagaaaaggggtcttacgaaattatccaggatacagacgaggacaccgctgtgaacaattggctcatctcaccgcagaacgcgtcccgtgcctggggcgagagcacgcccctggcaaataagccagggaagcagtctggccatcctaaatttccacgggttcgccacaagtctctgcaggttcggcaggatgggggtaagtcgcgcctgaaaaagtcacagttcctcatcaagacgcgtaagaaaaaaaaagagaaacacacccaccacgctccactgtctccccggacgtttcacccgcttaggagcgaggcgtacaacacctttagtgaacggcggctgaagcactccctcgtgttacataagtcaaacgaaactagtctcccaaccgatcttaatcagactctaccatctatggacttcggctggatcgcctcactccctgaccacaaccaaaattcctctaatgacacaggccaggctagctgtccgcctggcctataccaaaccgtccccccagaagaacactaccagacgttcccaatccaggatccggaccagatgcatagcacctctgaccccagccacagatcatcttctcccgagttatccgagatgctggaatacgacagatcccataagtcctttcccaccgatatctctcagatgtctccttcgtccgagcatgaggtttggcagaccgtgatctctcctgacttgagccaagtaactctctcacctgagctgtcacaaactaatctctccccagatctctcccacactaccctcagtccggagctaatccagcgtaatctgtcacccgctctgggccagatgcccatttccccggatctgtctcatacaacactgtctcctgacctgtctcacaccactctttcactggatctcagtcagaccaacctcagccccgagctgagtcagacaaatctctcacccgcgctgggtcagatgccactctctcctgacctaagtcataccactttgtctctggacttctctcagaccaacctctcacctgagctgagccatatgacgctgagcccagaactgtctcaaaccaacctgtctcctgccttggggcagatgccaatctcacctgacctatcccatacgacgctgtccctggacttttcccagacaaatcttagccccgaacttagccaaacaaacctcagtccagcactgggacagatgcccctgagtcctgatccttctcatactacactgtccctggatttgtcacagactaatctgagccctgagctgtctcagacaaatctttcaccagatctgagcgagatgccccttttcgctgacttgtctcagatccctttgacgcctgatcttgatcagatgacgctcagccccgatctcggagagacagacctatctcccaacttcggccaaatgagcctctcccccgacctgagccaagtgaccctgtcacccgacattagtgataccactctgctcccagatctgtcacagatttcacccccacccgacctagatcagattttctacccctctgaatccagtcagtccctattgcttcaagaatttaatgaatctttcccttatcccgatctggggcaaatgccctccccaagcagccccacactgaatgatacctttctgagtaaagagtttaacccactggtcattgtgggcctgagtaaggacgggactgattatatcgaaatcatcccgaaagaagaagtccagtctagtgaggatgactacgctgaaatagactacgtgccttacgatgatccgtataagaccgacgtgaggacaaacataaattccagcagggacccagacaatatcgcagcctggtaccttcggagcaacaatgggaaccggcgtaattactacatcgccgccgaagagatctcatgggattactctgagttcgtccagagggagaccgatatcgaggactccgacgatatcccggaagatactacctacaagaaagtcgttttccgaaagtacctcgattccaccttcaccaaaagggaccctcgaggtgaatacgaagagcacctgggcatcttgggtccgattattagggctgaagtcgatgacgtaattcaagtgcgttttaagaacttggcgtctaggccatacagtctccatgctcatggtttaagctatgagaagtcctccgagggcaagacctatgaagacgatagtcctgaatggttcaaggaagacaacgcagttcagcccaattcttcctacacatatgtttggcatgcgactgagaggtctggccctgagtctcccggttctgcttgtagggcatgggcctattatagtgccgtgaatccggagaaggatattcactctggccttatcggtcctctgctgatctgtcaaaaaggcattctgcacaaagactccaacatgcccatggatatgagggagttcgtgctgctgtttatgacatttgacgagaagaaaagctggtattacgaaaaaaaaagcagatcctcgtggcggctgactagtagcgaaatgaagaagagtcacgagtttcatgccatcaatgggatgatctacagcttgcccggtctgaaaatgtatgaacaggagtgggtgcggttacacctgctgaatataggcggaagccaggatatccacgtggtccacttccacgggcaaaccctgctggaaaatggaaacaaacagcaccaactgggggtatggcctctgttgcctggaagttttaagaccctggaaatgaaagcgtccaagcccggctggtggctgctaaacacagaagtgggggaaaaccaacgggcaggaatgcaaacgcccttcctgattatggatcgagactgtcggatgcctatggggttgtctacagggatcatctccgactcacaaattaaagcgagtgaatttctgggctattgggagccaaggttggcaagattgaacaatggcggtagctacaatgcctggagcgttgagaagctagcagccgagttcgctagcaagccatggatccaagttgacatgcagaaggaagtaatcatcacgggcatccaaacacagggagcgaaacactacttgaagtcatgttacaccaccgaattttatgttgcctactcgtccaatcaaatcaattggcaaatttttaagggcaattcaactcgaaacgtgatgtattttaacggcaactcggacgctagcactatcaaggaaaatcagtttgatcctcccatagtggctaggtacattcgtatctcccctacccgggcatacaacaggccaactctgagactagagttgcagggatgcgaggtgaatggctgcagcaccccgctgggaatggagaacggaaagatagaaaataagcagatcaccgcatcaagcttcaagaagtcctggtggggagactattgggagcccttccgtgcacgtcttaatgcgcagggacgcgttaatgcctggcaagcgaaggccaacaataataagcaatggctagagatcgatctgctgaagatcaagaaaataactgccataatcactcagggctgtaagtctctttccagcgagatgtacgtcaagtcttacactatacactattccgagcaaggcgttgagtggaagccatacaggctaaaatcctcaatggtcgataagatcttcgaaggcaataccaatacgaagggccacgtgaagaacttcttcaacccaccgatcatcagtagattcatccgtgtaatccctaagacgtggaaccagtctatcgccttacggcttgagctgttcgggtgcgacatctac

SEQ ID NO: 9130 - DNA, 6672 bp, synthetic construct
  misc_feature 1..6672: note = source = /note="Description of Artificial Sequence: Synthetic coding sequence"
  source 1..6672: mol_type = other DNA
atgttcccaggctgtccaaggctctgggtcctcgtcgtgctgggtaccagttgggtgggttggggtagtcagggaacagaggctgctcagctcagacagttctatgtggcggcacagggcatttcttggtcatatagaccggagcctactaattccagccttaacttgtctgtgacctcttttaagaagattgtttacagagaatacgaaccatacttcaaaaaggagaaacctcagtcaacaatctcaggtctccttggccctactttgtacgctgaggtgggcgacattattaaggtgcactttaaaaataaggctgataagcctctctcaatacaccctcagggaattaggtattccaaactttccgagggtgccagttacctcgatcacacgttcccagctgaaaaaatggatgacgctgttgcgcccggtcgcgaatacacctacgaatggtccatctcagaggattccggccctacccatgatgaccctccctgtttgacgcatatctattattcccacgagaatttgatcgaggacttcaacagcggactgatcggtccgcttctgatctgcaagaaaggcacgctgaccgagggaggaactcaaaagacatttgataaacagattgtccttcttttcgccgttttcgacgaatcaaagagttggtcacaaagctcttctctcatgtataccgtgaacggttatgtgaacggaaccatgccagatattaccgtgtgcgctcacgatcatatctcatggcatttgctgggtatgtcctcaggaccggagttgttctccatccactttaatggtcaggtcttggagcaaaaccaccacaaagtgtccgcgatcacactggtgtccgctacaagtaccactgccaacatgacggtaggacctgagggcaagtggattatctcaagcctgacccctaaacacttgcaagccggaatgcaagcttacatcgacatcaaaaattgtcctaaaaaaacgagaaacctgaaaaagataacaagagaacaacgcagacatatgaaacgctgggagtattttatagcggcagaagaagtgatttgggactatgcccctgtgatacctgccaacatggataagaagtacagaagtcaacacctcgacaacttcagcaatcagatcggtaaacattacaagaaagtaatgtatacacagtacgaagacgagtccttcaccaagcatactgtgaatcccaatatgaaggaggacggaattttgggccctatcataagggcccaggtaagagacacactgaaaatcgtgtttaagaatatggcatccagaccctatagcatttatcctcacggagtgactttctccccctacgaggacgaggtgaatagttcctttacatctggtagaaataacactatgatcagagcggtccaacccggtgaaacctacacatacaagtggaacatcctcgaattcgacgagcctaccgagaacgacgcccagtgccttactagaccgtattattctgacgtagacatcatgagggatatagcatccggcttgataggtctgcttctgatttgcaagtccaggtcattggacaggcgcggcattcagagagcagctgacattgaacaacaggctgtgtttgccgtttttgacgagaacaagtcatggtacctggaggataatataaacaagttctgcgaaaatcctgacgaggtgaagagagacgacccaaagttttacgaaagtaatattatgagcactattaatggatatgtcccggaatctattacaacgctgggattctgctttgatgataccgtgcagtggcacttctgttccgtgggtacgcagaatgagatcctgaccatccacttcactggtcattccttcatctacggaaaacgccatgaagatacacttacgctctttccaatgaggggtgaatctgtaacggtcaccatggataatgttggcacgtggatgctcacgagtatgaactcttccccacgctctaagaagctccgccttaagtttcgcgatgtgaagtgcatacccgacgacgatgaggattcttacgaaattttcgaaccgccagagtcaaccgtaatggcgaccagaaagatgcacgacaggctcgagcctgaggacgaagagagtgacgcagattacgactaccagaacaggctcgccgctgccctcggaatccgctccttcaggaactcttcactcaaccaggaggaggaggagttcaacctcacagcgttggccctggagaacggtacggaattcgtttcaagtaatactgacattattgttggaagcaattactctagcccgtcaaacatcagtaagttcacggtcaacaatttggctgagccacagaaggccccctctcatcagcaagcgaccacagcgggatctcccctgagacacctgatcggtaaaaattccgtattgaattcatccactgccgagcactcctccccttactctgaagatcccattgaagaccctttgcagcctgacgtgaccggtattcgccttctctccctgggcgcgggcgagttcaagtcccaggagcacgctaaacacaaaggaccaaaggtagagagagaccaggctgccaagcatagattcagttggatgaagttgctggctcacaaagtgggaagacatctgagtcaggacactggatcaccttcaggaatgagaccttgggaagaccttccatctcaggacacgggaagcccaagtaggatgcgcccatggaaggacccacctagcgacctgctgctcttgaaacaaagtaacagttcaaagatcctggtcggacgctggcatctcgccagtgaaaaaggttcttatgagataatccaggatactgatgaagacacagccgttaacaactggctcatcagcccccagaatgcaagcagggcttggggcgagtctacgcccctggctaataaaccaggcaagcagtctggtcatcctaagtttccaagggtcagacacaaatccctgcaggtcaggcaagatggcggtaagtcccgcctcaagaagagtcaattccttatcaaaacacgcaagaaaaaaaaagagaagcacacccaccatgcccctctgtctcctaggacttttcatccattgagaagtgaggcatacaacacctttagcgaaaggagactgaagcattctttggttttgcacaagtccaacgagacttctctgccaactgatctcaaccagacgctgccaagcatggactttggttggatcgccagtctgcccgaccataatcaaaactcatccaacgatacgggacaggcctcatgccccccaggcctttaccagaccgtccccccagaggagcactaccagacctttccaatccaagaccctgaccaaatgcactctacttctgatccatcccataggagtagctcacctgaactctctgagatgctggagtacgacagatcccataagtccttcccgaccgacatctctcaaatgtctccatcaagcgaacacgaagtatggcagactgtaatctcaccggacttgtcccaggtgacgctgagtcccgagcttagccaaaccaacctcagccccgatttgtcacacactactttgagccccgaattgatccagcgcaatctgtctcccgccctcggacagatgccaatctcccccgacctctcccatacaactctcagtccagatctctcccacacaactctttctttggacctgagccaaaccaacctttcacccgagcttagccagaccaacctgtctccggcattgggccagatgcctctgtccccagatctcagccacaccaccttgagcctggattttagccagacgaacctgagtccggagctttctcacatgactctgagtcccgagctttcccaaaccaatctttctccagccctgggtcagatgccaatctcacctgaccttagtcataccaccctttcactggatttttcccagaccaatttgagtccagagctgagccagactaacctttcacctgcacttggtcagatgcccctctctccagatccatcacacactaccttgtcattggatctgtcacaaaccaacctgtcacctgagctctcccaaacaaacttgtctcccgatctgtcagagatgccgttgtttgctgatttgtctcagattcctctgactccggaccttgaccagatgacactcagccctgaccttggagagacggatcttagtcctaatttcggccagatgtccctgagccccgatctgagccaagtgacattgtccccggatatctcagacacaaccctcttgcctgatctgagccagatctccccgcccccagatctggaccagatcttttacccttccgagagcagtcagtcactgctgctgcaggaatttaacgaatccttcccttatccggacctgggacagatgcctagcccgagcagccctaccctgaatgacactttcctgtccaaagagtttaaccctctggtgatcgtgggtttgtccaaggatggcacggactacattgagattatccctaaagaggaagtgcaatcatccgaggatgactacgccgaaattgactacgtcccatacgacgacccttacaagaccgatgtacgcacaaacattaacagtagtcgcgacccggataatatagctgcctggtatttgaggagcaataatggtaatcgcagaaactactatatcgccgcagaagagatcagctgggattactccgaatttgttcaaagggagacagatatcgaggactctgacgacatcccggaagacaccacttacaagaaagtcgtctttagaaagtatcttgactctaccttcaccaagagagatcctagaggcgagtacgaagaacacctcggaattctgggaccaataattcgcgctgaggtggacgacgttatccaggtcaggttcaagaatctcgcctcccgcccctactctttgcacgctcacggtctgtcttacgaaaagtcctctgagggcaagacttacgaggacgatagtcctgagtggttcaaggaggacaatgccgtccaacctaactcatcctatacatatgtctggcacgcgacagagagatctggacccgagtcccccggcagcgcatgtcgcgcatgggcatattacagtgcagtgaatccagaaaaagatatccacagcggcctgatcggtccattgcttatttgccagaaaggcattctgcacaaggattctaacatgccaatggatatgagagagttcgtgctgctgttcatgacgttcgacgaaaagaagtcctggtactacgaaaagaaatcccgctcatcctggcgccttactagtagcgagatgaagaaaagtcacgagtttcacgctatcaatggcatgatttactctttgccaggtttgaaaatgtacgaacaggaatgggttaggctgcatcttctgaacatcggaggatcccaggacattcatgtggtgcattttcacggtcagacactgttggagaatggaaataagcagcaccaactgggagtttggcctctcttgcccggttctttcaagaccctcgaaatgaaggcaagtaagcccggttggtggttgttgaataccgaggtcggcgaaaatcagcgcgcaggaatgcagaccccattccttattatggacagagattgcaggatgcccatgggcctgtctacaggcataatatccgattctcaaattaaagcctcagagtttctgggatactgggaaccacgcctcgcccgccttaacaacggaggttcatacaacgcatggagcgtcgagaagttggccgctgagttcgcaagcaaaccatggatccaggttgacatgcagaaggaagttattatcacaggcatccagactcagggagcaaaacactacttgaaatcttgctacacaaccgagttttacgtagcatactctagtaaccagatcaactggcaaatcttcaaaggcaattctacacgcaatgtgatgtacttcaacggcaattccgacgcttcaaccatcaaagaaaaccaattcgatccaccgattgtagctcgctacatacgcatcagtcctacgagagcatataaccgccctacgctgcgcctcgagctgcagggctgcgaggtaaacggttgctcaacaccactgggcatggagaatggaaagattgaaaataaacaaatcacagcttcatcctttaaaaagagttggtggggtgattactgggagcctttcagagccagactcaacgcccagggcagggtaaacgcttggcaggctaaagcaaataacaacaagcagtggttggagatcgacttgctgaagatcaaaaaaattactgcaatcatcacccagggatgcaaatccctgtctagtgagatgtacgtgaagtcctacacaatccattattcagaacagggcgtggaatggaaaccgtacaggctgaagagttccatggtagataagatctttgaaggtaacactaacactaaaggccatgtgaagaatttttttaatccccctatcatttccaggttcatccgcgtgatccctaagacctggaatcagagcatcgcccttaggctcgaactttttggttgcgacatctat

SEQ ID NO: 9131 - DNA, 6672 bp, synthetic construct
  misc_feature 1..6672: note = source = /note="Description of Artificial Sequence: Synthetic coding sequence"
  source 1..6672: mol_type = other DNA
atgtttccaggctgtcccagactgtgggtgcttgtggtacttgggacatcgtgggttggatggggatcacaggggactgaggctgcccagctgaggcagttctacgtcgcggcacaggggattagctggagctatcgacctgaaccaaccaatagctcactcaacctatctgttacttcctttaagaaaatcgtatatcgtgagtacgaaccttattttaaaaaggaaaagccccaatctacaatctccgggctgctgggcccaaccttgtacgccgaggtgggggatatcattaaggtgcatttcaagaacaaagcggacaagccactttctattcatcctcagggaatcagatactctaaactgagcgaaggcgccagctatctggatcacacattcccggcagagaaaatggatgacgccgtggcacctggacgcgaatatacgtacgagtggagcatctccgaggatagcggccccacacatgacgatcctccttgcctcacacatatctattacagtcacgagaacctcatcgaagattttaactccggcctgattggcccccttctcatctgtaaaaaagggaccctcacggaaggcggtactcagaaaaccttcgacaaacagattgtgctgctcttcgccgttttcgatgaatctaagtcttggtcccagtccagttcccttatgtacacagtgaatggttatgtaaacggaacgatgcccgatatcactgtatgtgcccatgatcacatctcatggcaccttctggggatgagtagcggtcccgaattgttctccatacactttaacggccaggtcctggaacagaatcaccataaggtcagcgctatcactctggtcagtgctaccagcactaccgctaatatgacggtgggaccagagggcaagtggatcatctcttcattgacgcccaagcatctgcaggccgggatgcaggcatatattgatatcaaaaactgcccaaagaaaacaaggaacctgaaaaagattacgagggagcagagacgacatatgaaaagatgggagtatttcatcgcggccgaagaagttatttgggactatgcccccgtgatcccagccaacatggacaaaaaatatagatctcagcacctggacaactttagtaaccagatcgggaaacactacaagaaggtgatgtacacacaatacgaggatgaaagcttcacaaagcacacggtcaacccaaacatgaaggaagacggcatcctcggtcctatcataagggcgcaggtgcgtgatacactcaagatcgtgttcaaaaatatggctagcaggccttactcaatttacccccatggtgtcacattcagtccatacgaagatgaggtcaactcctcatttaccagtgggcgtaataatacaatgattagggcagtacagccaggtgagacatacacgtataagtggaacattctcgagttcgatgaacccaccgagaatgatgcccaatgcctcacaagaccatattattccgatgtagatatcatgagagatatcgcatctggcctcattggcctcctgctcatctgcaaatcccgaagtctcgatcgaagggggatccagcgcgcagccgatattgaacagcaggcagtctttgccgtttttgatgagaataagagctggtatctcgaggataacattaataaattctgtgaaaatccagacgaagtaaaacgcgacgatccaaagttctacgaatctaacattatgtctacgattaatgggtacgttccagagagtatcaccacactgggcttctgctttgacgatactgtacaatggcatttctgttccgtcggcactcagaacgaaatcctgacaatccacttcaccggccattcatttatctacggtaagagacatgaagatacgctcaccctgttcccgatgcggggcgagtccgtcacggtgaccatggataatgtgggaacttggatgctcaccagcatgaatagctctccacgcagcaagaagctgcgattaaagtttcgggacgtgaagtgcatcccggacgacgatgaagatagttacgaaatttttgaacctccagagagcactgtgatggcgacacgaaagatgcacgatcggctcgaaccagaggacgaagagtccgatgcagattacgactaccagaatcgcctggctgcagcactgggtatacgctcatttcgcaattcctcccttaaccaagaggaagaggaattcaatctgacagctctggcgctggaaaatggtactgagttcgtgtcatcaaacaccgatatcatagtggggagcaactatagtagccctagcaacataagcaaattcacggttaataatcttgctgagcctcagaaagctccatcccaccagcaggccacaaccgcgggctctcccctgcgccatctgatcgggaaaaacagcgtcctcaacagcagcaccgccgaacactcaagcccttactctgaagaccctatagaagaccccctgcagccagacgtgaccggcataaggcttctcagtttgggggccggagaatttaaatcccaggagcacgcgaaacacaaaggaccaaaagtggagagagaccaggccgccaagcacagatttagctggatgaaactcctcgcccataaggtggggagacatctgtcccaagataccggaagtccgtctgggatgcgcccctgggaagatctcccttcccaggatactgggtccccatctaggatgaggccttggaaagatcctcctagtgatctgctcctcttaaaacagagcaattcatcaaagatcctcgtgggcagatggcatttggcttctgagaaagggtcctacgagatcatccaggacactgatgaagatactgcagtgaataactggctcatctccccccaaaacgcatcacgtgcatggggggaatcaacgccattggcaaataagccagggaagcagtcggggcatcccaagtttcccagggtgcgacacaaatccttacaggtgcgccaggatggtgggaaaagccgcctgaaaaaaagtcagttcctgattaaaacccggaaaaagaaaaaagagaagcacacgcatcatgctcccctgagcccacggaccttccaccccctgcgcagtgaagcatataacactttcagcgagagacgcctgaagcacagcctggtgttgcataaaagcaatgagacttcgctcccaaccgatctcaatcagacgcttccttcaatggatttcgggtggatcgcttctctcccggatcacaaccagaactcctcaaatgacactgggcaggccagttgcccgccggggttatatcagacagtaccgcccgaggaacactatcaaaccttccccatccaggacccggatcagatgcattcaacatccgatccatcccaccggagctcttcgccggaactgagcgagatgctcgagtacgacaggtcccacaagagcttccccacagacataagccaaatgtctccctcatcagagcacgaggtttggcagactgtcattagtcccgatctctctcaggtgacgctttcaccggagctgtcccagaccaatctgtctccggacttgtctcacacgacattgagccccgaactaatccaaagaaacttgtctcctgcgctaggacagatgccgatttctccagacctgtctcacaccacgctgtccccggacctctcacatacgacgctgtcattggatctctcccagaccaacctgtcgcctgaactgtcacaaactaatctctcccccgcgctgggccagatgccacttagccctgaccttagtcacacgacactatctcttgacttctcccagaccaacctttcccccgaacttagccacatgaccttgtctcccgagctgtctcaaaccaacctgagccccgccctcggccaaatgccgatatcacctgacctgagccatacaacattgtcactggacttctctcaaacgaatctgtccccagagctgagccagacaaacctcagcccggccctcgggcagatgccgctctcccccgatccgtcccatacaacactctcactggatctttcccagacaaatttgagccctgagttgtctcaaaccaatctgtctccagacctgtccgagatgcctctattcgctgacctgagccagatcccccttacgcctgacctggatcagatgaccctttcgcccgatctgggcgaaaccgatctaagtccaaatttcggccaaatgagcctttcccccgatctctcccaagttacgttgtccccagatatctccgacacaactctgttacctgatctgtcccagatctcgccacctccggacctagaccagattttttacccctcagagtctagtcagtcgctgctgctacaggagtttaatgagtctttcccatacccagatttaggccagatgccatccccgtcctcaccaactttgaacgataccttcctttctaaagaatttaatccactggtaatcgtggggttgagcaaagacggcacagattacatcgagattatcccaaaagaagaggttcagagtagtgaggacgactacgcggagatagactacgtaccatacgacgacccctataagacggatgtgaggactaacatcaactcatctcgggaccccgacaacatagccgcttggtatcttaggagtaataacgggaatagaaggaattattacattgcagctgaagaaataagctgggactattccgaattcgtgcaaagggaaactgacattgaagattctgacgacattccggaagacacaacatacaaaaaagtggtgttccggaaatacctggacagtacatttaccaagcgggacccacgcggggagtacgaggaacacctgggcatcctcggtccgattattcgagccgaggtggatgacgttattcaggttcgtttcaagaacctggccagcagaccctatagcctgcacgctcacgggctctcttacgagaaaagctccgaagggaaaacgtacgaagatgattctccggaatggtttaaagaagacaacgcggtacagcccaacagttcatacacttatgtttggcacgctaccgagcgctccggacctgagtcgcccggctcagcatgtagggcttgggcctactactcagccgtgaaccccgaaaaggatattcactccggattgattggccctctccttatatgtcagaagggtattctacataaggattccaacatgcctatggacatgcgcgaattcgtattgctgtttatgacatttgacgaaaaaaaaagctggtactatgagaagaaatcccgaagctcatggcggctgacttcctctgaaatgaagaaatcccacgagtttcatgccataaatggcatgatttacagcctgccagggttgaaaatgtacgaacaggaatgggtcaggttgcatttgctcaacatcggggggagccaagatatacacgttgtgcacttccatgggcagacactcctagaaaatggcaacaagcagcatcagctcggagtatggccactcttaccaggtagctttaagaccctcgagatgaaagctagcaaaccaggctggtggttgctgaacaccgaggtaggtgagaaccaacgggctgggatgcaaaccccattcttaataatggatcgggattgtcggatgccaatgggcctctccacgggcatcataagtgattcccaaataaaggcatccgagttcctgggatactgggagcctagattagcacgcctgaataatggagggtcttataacgcttggtcggttgagaaactggccgccgagtttgccagcaagccctggatccaggtcgatatgcaaaaagaagtgattattaccggaatccaaacacaaggagctaagcactatctgaagtcttgttacaccactgaattttatgtggcatactccagcaaccaaataaattggcagattttcaagggcaactccactagaaatgtaatgtacttcaatggcaatagcgacgcctcaacaataaaggagaatcagttcgatccccctattgtcgctcgctatatcaggattagcccaactagggcgtacaaccgacccacattacgtctggagttgcaaggctgcgaagtcaatggctgctctacccctttaggcatggaaaatggcaaaatagagaacaagcagatcaccgcctctagttttaaaaaatcctggtggggagactactgggaaccgttccgagcccgcctgaatgcgcaggggcgcgtcaatgcttggcaagcaaaagccaacaataataagcaatggctggaaattgacctcttgaagataaagaaaattaccgctattattacccagggctgtaagtcactcagcagcgagatgtacgtcaagtcttatacaattcattatagtgagcagggagtagaatggaagccatatagattaaagagctcaatggtggacaagattttcgagggcaatactaataccaaggggcatgttaaaaatttttttaatcctcctattatctctcgattcatacgggtgatacccaagacttggaatcagagtatcgccttgcgcctcgaactcttcggttgcgacatttac

SEQ ID NO: 9132 - DNA, 6672 bp, synthetic construct
  misc_feature 1..6672: note = source = /note="Description of Artificial Sequence: Synthetic coding sequence"
  source 1..6672: mol_type = other DNA
atgttcccaggatgtccacggctttgggtactagtagtgctaggtaccagctgggtgggctgggggagtcagggcacagaggccgcccagctgcgccaattctacgtagctgcgcagggtatctcttggagttacaggccagagccgactaactcttctctgaacctgtcagtgacttcgtttaagaagatcgtctatagggagtacgaaccctattttaagaaggagaaaccgcagtcaacaattagcggactgctcggaccaaccctctacgccgaggtgggcgatatcatcaaagtacacttcaagaacaaggcggacaagcccttatctatacatccccagggtatccgctatagcaagctctctgagggggcctcctaccttgaccacaccttccccgccgaaaagatggatgacgctgttgcgcctggtcgagagtatacctatgagtggagtatcagtgaggactctggaccaacacacgatgaccctccctgtcttacccacatctattactcccatgagaatctgattgaggacttcaactcaggtcttatagggcctttgctcatctgcaaaaagggtaccctgacagaaggcggaacgcagaagacatttgataaacaaattgtgcttctctttgcagtgttcgacgaatcgaaaagctggagccaatcaagctctctgatgtacacagtgaacggttatgttaatggcacaatgcccgatataactgtgtgcgctcatgaccacatcagttggcacttgctcggaatgtcgagcgggcctgaattgttcagcattcatttcaatgggcaggtgctagagcaaaaccaccacaaggtatccgctattactctggtatcagctaccagcaccactgcaaacatgacagtggggccagaagggaagtggataatcagctctttaacacccaagcacctgcaggcaggaatgcaggcatacatagacatcaaaaattgcccaaagaagacaagaaatttgaagaagattacacgagaacaaaggagacatatgaagcggtgggagtattttatagcagcggaggaagtcatttgggattacgcccccgtgattcctgcaaacatggataagaaatacaggagccagcatctcgataacttttcgaaccaaattgggaaacactataaaaaagtcatgtacactcagtatgaagatgagagcttcacaaagcacactgttaatcctaacatgaaagaagacggcatcttaggtccgatcatccgcgcccaagtgcgggacactctgaagatcgtattcaaaaatatggcgtctagaccttactccatataccctcatggcgttactttctcaccatatgaagacgaagtaaacagcagcttcacgtctggtaggaacaacacaatgatccgcgctgtacagcccggggagacttatacatataagtggaacatcctagagttcgacgaacctaccgagaacgacgctcagtgtctcactagaccatactatagcgacgtggatataatgcgcgacatcgcttctggactgatcggccttctgcttatttgcaagtccaggtcgctcgatagacggggaatccagcgagccgccgacatagaacagcaggcagtgtttgctgtcttcgacgagaacaagtcctggtatctcgaagataacattaacaagttttgcgaaaatccagatgaggtgaagagggatgatccaaagttttacgagtccaacatcatgtccacgattaacgggtatgtacccgagtccataacaactctcggattctgttttgacgataccgtccagtggcacttttgctcagtgggaacccagaatgaaatcctcactattcatttcacgggacactccttcatttacggaaaacggcatgaggatacactgaccttgtttcccatgcgcggcgaaagtgttactgttacaatggataacgtgggtacgtggatgttgacaagcatgaattccagcccacgcagcaaaaaattgaggcttaaattccgagacgtgaagtgcatcccagacgatgatgaggactcctacgagattttcgaaccgcctgagtccacggtcatggcgactcgtaagatgcacgatcgattagagccagaggacgaggagagtgatgccgactatgattaccaaaacaggctggccgcagcccttggaataagatcttttaggaattcctctttaaaccaggaggaggaagaatttaacctgaccgccctggccttggagaatgggactgaatttgtctctagtaacaccgatataatcgttggaagtaactattcaagtcctagcaacatatccaagttcacggtgaacaaccttgccgagcctcaaaaggcaccttctcaccaacaggcaactaccgcaggctctcctctgcggcacctcatcgggaaaaacagcgttctgaacagcagtactgccgagcactcaagcccctacagcgaggaccccattgaggacccccttcaaccagatgtgactggcattaggctactctctcttggagccggcgagttcaagtctcaggaacacgcaaagcataagggcccaaaggtcgaacgcgatcaagcagctaagcacagattcagttggatgaagctcctcgctcacaaggtgggccgccacctgagccaggacacgggctcaccttccggaatgagaccctgggaggacctgccaagccaggacaccgggtcgccatccaggatgcgtccatggaaggacccccctagtgatttgctgttgctgaagcaatctaactcctccaagatcctggttggcaggtggcatttggccagtgaaaaggggagttatgaaatcattcaggataccgacgaagatactgctgtgaataactggctgatcagcccccagaacgcttcgcgtgcttggggcgaatcaacccctctagccaataaacctgggaagcagagcggacacccaaaattccctcgcgtgagacacaagagtttgcaggtgaggcaggatggcggtaagtcacgcctcaaaaagtctcagttcctaatcaagacacgaaagaagaagaaggagaagcatacccaccatgccccgttaagccccagaacctttcacccactgagatctgaggcctataacaccttcagtgaacggcgcttaaagcattctctggtgcttcataaatctaacgagacctcactcccgaccgaccttaatcagacactgcctagtatggattttggctggatcgcatccctccctgaccacaaccaaaattcttccaatgatactggtcaggcctcctgccccccgggcctgtaccaaacggttccgcccgaggaacactaccagacgttccccattcaggaccccgaccagatgcactcaacaagcgatccctcccataggagttcttctccggagctgtctgaaatgctggagtacgacagaagccataaatccttcccgaccgacataagtcaaatgtcgcctagctctgagcacgaagtctggcagacagtgattagtcccgatctttctcaggtgaccctgtctccagaactgtcccagacgaacctctcacctgacctctcccacaccacgctgtcccccgaactgattcagaggaacttgtcccccgccctgggtcagatgcccatttcacctgacttaagtcacaccactctaagccccgatttgagtcatactacactgtccctcgatctgtcacagaccaatctgagtcccgagctgagccagaccaatctgagtccagcgcttggccagatgcccctatctcccgacctgagccacaccaccctttccctggatttctcacagaccaatctctcgcctgagctgtcacatatgacgctgtcgccagagctgtctcagacgaacttatctcccgccttagggcaaatgcccatcagccctgacctgtcccacacaacactaagtcttgacttctcccagacgaatctgtcccccgagctctcacagactaatctatcccccgcgctggggcagatgcccctgtcgcctgaccctagccatacaaccctcagcctcgacctatcccagactaatctgagtcccgaactaagccagactaatctttcccccgacctctccgagatgcccctgttcgctgatctgtcacaaatacctctgactcctgaccttgaccagatgaccctatcccccgatctaggggaaactgaccttagccccaacttcggacaaatgtccttatctcctgatctcagccaggtgacactctcacccgatatcagcgacacgacactgctgcccgatctgtcgcagatatccccgccaccagacctcgatcagatcttttatccaagtgaatcatcccagtctcttctactccaagagttcaatgagtccttcccctaccctgatctgggccaaatgccttccccctcttctcccacactaaatgataccttcctttcaaaagagtttaatcccctcgtgatagttggtctgagcaaagatggaacagactacatcgaaataataccgaaggaggaggtgcagtcctcggaagatgactacgctgagatcgactacgtgccttacgatgatccctataaaacagacgtgcgtaccaatatcaacagctctagggacccagacaatatcgcagcgtggtatttacgcagcaataacggcaaccgtcgcaactactatatcgccgcggaagagatatcatgggattattcagagttcgtgcaacgcgaaaccgatatagaggattccgacgacatacctgaggacacaacatataagaaggttgtatttcggaagtacctggactccactttcaccaaaagagacccacggggagagtatgaagaacacttgggtattctgggccctattatccgagccgaggttgacgatgtgatccaggtgcggttcaagaacctggccagtcgcccttacagcctccacgcgcatgggttgtcctacgagaagagcagcgagggtaaaacatatgaggacgatagtccagaatggttcaaagaggacaatgctgtgcagcccaattcaagctacacatatgtatggcacgcaacggagcgttccggccccgaatcccccggatctgcatgtagagcctgggcctactatagtgccgtcaaccctgagaaagatatccacagtgggctgattggcccactgctgatttgtcagaaagggatcttgcataaggacagtaacatgccaatggacatgagggagttcgtgcttttgtttatgaccttcgatgaaaagaagagttggtactatgaaaaaaagagccggtcgtcatggagactcactagttcagagatgaagaagtcgcacgaattccacgcgatcaatgggatgatctacagtctcccagggctgaagatgtacgaacaggagtgggtccggttgcatctcctgaatatcgggggctctcaggacatccatgtcgttcattttcacggccaaactctactggagaatgggaacaagcagcaccagttgggcgtctggccactgttgcctggtagctttaagaccctggagatgaaagcttctaaacccggttggtggctcctgaatacagaggttggcgagaatcagagagccggcatgcagacgccctttctgatcatggaccgggattgccggatgccgatgggactgagtacagggatcatttcggatagccagattaaggcctccgaatttcttggatactgggagcctcggcttgctagattgaacaatggaggaagctacaacgcctggtccgtggagaagttagctgcagagtttgcaagtaaaccctggatccaggtagatatgcagaaggaggttattataaccggaattcagacgcaaggcgccaagcactacttgaagtcttgctacacaaccgagttctatgtggcctactccagtaaccagattaactggcaaatttttaaggggaatagtactcgcaacgttatgtactttaacggaaacagcgatgcatctacaatcaaggagaatcagttcgatcccccaatcgtcgctcgatatatccgtatctccccaacgcgtgcttataatcgaccgacactgcgactggaactgcagggatgcgaagtgaatggctgttctacccccctgggtatggagaacggaaaaatcgaaaacaaacaaatcactgccagtagttttaagaagagctggtggggggattactgggaaccgtttcgagcgcgcctgaacgcacagggacgagtaaacgcctggcaagcaaaagcaaacaacaacaaacagtggctggagatcgacctcctcaagatcaaaaagataacggcaattattactcaaggatgcaaatcactcagtagcgagatgtacgtgaagtcttataccatacactacagcgagcaaggtgtagagtggaagccctaccgcctcaaaagcagcatggttgataagatttttgaaggcaacacaaacacaaaagggcacgtcaagaacttctttaatcccccaataattagcagattcatccgtgtgatacccaagacctggaatcagagcattgccctccggctcgaactttttggctgtgacatatat

SEQ ID NO: 9133 - DNA, 6672 bp, synthetic construct
  misc_feature 1..6672: note = source = /note="Description of Artificial Sequence: Synthetic coding sequence"
  source 1..6672: mol_type = other DNA
atgtttccaggctgcccgcgactttgggtcttagtggttcttggtacgagttgggttggttggggttcccaggggacagaggccgcccagctccggcaattttacgtcgcagcacagggtatctcttggtcgtaccgccccgaacccacaaattcatcactcaatctttctgtcacgagcttcaagaagattgtctaccgcgagtatgagccatacttcaagaaagagaagcctcagtccacgatatctggccttttggggcctactttatacgcggaggtcggtgatatcattaaggtccatttcaagaacaaggcggataaaccgctctccatccacccacagggtattcggtactccaagctctccgaaggggcctcctacctggatcacacatttcccgcggagaaaatggacgatgcagtcgccccggggcgggagtacacgtacgagtggtcgatctctgaagactcgggacctactcatgatgatcctccttgtctgactcatatctattatagtcacgagaatcttatcgaagatttcaattccggtctcatcggaccacttctcatatgtaagaagggcacgctgacggagggcggtacacagaagacatttgacaagcagatagtgctgctttttgcagtctttgatgagtctaagtcctggagtcagagctcgtcgcttatgtataccgtcaatggctacgttaacgggactatgcctgacataaccgtttgtgcgcacgatcatatctcatggcacctgttagggatgtcgtccggtcctgaacttttctccatacattttaatggtcaggtgcttgagcaaaatcatcataaggtatctgcgattacccttgtcagcgctaccagcaccacggccaatatgaccgtcggccctgagggtaagtggatcatttcgtcactcactccaaagcatctacaagcggggatgcaggcctatatcgacatcaaaaattgcccaaagaagactcgtaatctgaaaaagattaccagggaacaaaggagacacatgaagcgatgggagtactttatcgccgcagaagaagttatctgggattacgcacccgtgatccctgctaacatggacaaaaagtatcgctcacagcacctggacaatttctcaaatcagattggtaagcattataaaaaagtgatgtacacgcagtatgaggatgaaagctttactaagcatactgttaatcctaacatgaaggaagatggtatcttgggtcccattatccgtgctcaagtccgcgatactctaaagatcgttttcaagaatatggcaagccggccttactctatatatccgcacggcgtgacgttttccccatacgaggatgaagtcaattcatctttcacgtccggtcgcaacaacactatgattcgcgcggtacagcctggagaaacctacacctacaaatggaatatcttggagtttgatgagcctaccgaaaatgatgcccaatgccttactcgtccgtactatagtgacgtcgatataatgcgtgacattgcgagcggactcattggcttgctcctcatatgcaaaagccgctcgctggatcgacggggtatccaacgagctgctgatatagagcagcaagcagttttcgctgttttcgacgagaacaaatcatggtacctggaggataatataaacaaattctgtgagaaccccgacgaggtcaagcgtgatgatccaaaattctatgagagcaacatcatgagtacgataaacggctacgtccctgagagcatcaccaccttgggcttttgcttcgacgataccgttcagtggcatttctgtagtgtaggtacacagaacgaaatcctcacgattcattttacggggcattcttttatttacggcaagcgacacgaggatacactaacactgttccctatgcgtggcgagtcagtaaccgttacaatggataatgtgggcacgtggatgctgaccagcatgaactcttctccacgctcgaaaaagttgaggcttaaattccgtgatgttaagtgcattccagacgatgatgaggattcatacgaaatttttgagccgcctgagagcaccgtcatggcgacacgcaagatgcatgacaggctggagcctgaggatgaggaatccgatgccgattacgactatcagaacagattggcggctgctttgggcataaggtcgttcaggaattcttcgttgaatcaggaagaagaagagttcaatttgactgccttggcactggaaaacggtactgaattcgtctcgtcaaacacagacattatcgtaggcagtaattattctagccccagtaacattagtaagtttacggtgaacaatctcgccgagccccagaaagctccgtcgcatcagcaggcaaccaccgccggctcccctctgcgtcacttgattggcaagaattctgttctaaattcatccaccgccgagcactcttccccctatagtgaggatcctatagaagatccactgcaaccagacgtaacggggatacgtctgctatctctcggtgcaggggaattcaaatcccaggagcacgcgaagcataaagggcctaaggttgaacgagatcaggcagccaagcaccgtttctcatggatgaagttgcttgcacataaagtcgggcgacatctctcgcaagacaccgggtcgccctctggcatgcgaccgtgggaggatttgccatcccaggataccggctctccttcacgtatgcgcccttggaaagaccctccatcggatcttctgcttctaaagcagtcgaacagtagcaaaatcttagtcgggcggtggcatttggcttctgaaaagggaagttatgaaatcatccaggatacagatgaagatacagccgtgaacaactggcttatctcccctcagaacgcctcaagagcttggggtgagtccacgcctctcgctaacaaaccaggtaagcagtcaggccatccgaaattcccacgagttagacacaagtctctgcaagtcagacaagatggcggaaaaagtcggttgaagaagtctcaattcctgatcaaaacacgtaagaagaaaaaggagaagcacacccaccacgcacctttgagtccgcgaactttccaccctcttcgttctgaagcctataacactttttctgagcgccgcttgaagcattccctagtcctccataagtccaatgagacctccttgcccactgatcttaatcaaaccctcccctccatggattttggttggattgcaagtctgccggatcacaaccaaaattcatcgaacgacacgggtcaggcaagttgcccccctggattgtaccaaactgttccgccggaggagcattatcagaccttccccatacaggatcccgatcagatgcatagtacttcggaccctagccacaggtcgtcctcgccggaactttccgaaatgctcgaatatgatcggtctcataagtcgttcccaactgacatatcccaaatgagtccctcaagtgagcatgaagtatggcagacagtgatcagcccagatctctcgcaggtgaccttgtcgccagagttatcgcaaacgaatctttccccggatcttagtcatactactctctctcccgagttgatccaacggaaccttagccccgcgctgggccagatgcccatctctccggacctgtcacataccacactctccccggatttgtcacacaccaccctgtctctcgacttgtcgcagacgaacctgagccctgagttgtctcaaaccaatctttcgccagccctcggtcagatgccgcttagtcccgacttgtcccacactacactgtccttggattttagtcaaactaacctcagtccagaactcagccatatgacactctctccagagcttagtcagactaacttgtcccctgcgttggggcaaatgccgatctccccggatcttagccacaccaccctgtcactggacttttctcagaccaaccttagcccggagctgtcccaaaccaatctctctccggcactgggacagatgccactctccccagacccatctcacacaaccctctctctcgacctttcgcaaactaatctatcgcctgaactatcccaaaccaatttgtcgcctgacctgtccgaaatgccattgttcgcagacttgtcacaaatcccactgacccctgatctcgaccaaatgaccctttcccctgacctgggcgagacagaccttagtcctaatttcggacagatgtctttgtcacccgatctctcgcaagtaacactcagcccagacatctccgacactaccctcctgcccgacctcagccagatctcgcccccgcctgatctggatcagatattttacccatcggagtctagccagtccttgctgcttcaagaattcaatgagagtttcccttaccccgatctgggccaaatgccctcgccctcctcaccgaccttaaatgataccttcctgtcaaaggagttcaatccccttgtgattgttggactctctaaggacggtactgattacatcgaaatcattcccaaggaagaagtgcagagctccgaggacgattacgctgaaattgattacgttccttatgacgatccttacaagactgacgtcaggacgaacatcaattcatctcgagacccagataatatcgcagcctggtatctgcgatcgaataacggtaacagacgcaattattacatagctgctgaggagatttcttgggactatagtgagtttgtccaaagagagacagatattgaggatagtgatgatatccccgaagatacaacatacaagaaggtggtgtttagaaaatatctcgattcgacttttacgaaacgtgatcctcggggagaatatgaagagcatctgggaatcctcggccccattatccgggcggaagtggacgatgtaattcaggtcaggttcaaaaatctcgcgtctcgtccctactcactgcatgctcatggtctttcatatgaaaaatcgtctgagggcaagacatacgaggatgattcccccgaatggtttaaagaagacaatgctgtccagcctaatagttcatacacatatgtctggcacgccactgagcgttcgggtccagaatcgccggggagcgcttgtcgtgcgtgggcctactactcggccgtgaacccggagaaggacatacatagtgggctcattggtcccctactgatatgtcagaaaggaatcctccataaagactctaacatgccgatggatatgcgggaatttgtattattgttcatgacctttgacgagaagaagtcctggtattacgagaagaaaagcaggtcgtcgtggcgtctcacatcctcggagatgaagaaaagtcacgaattccatgctataaacggaatgatttactcgcttcctggacttaagatgtacgaacaggaatgggtaagattacaccttctcaatattggcgggagccaggacattcacgtcgtgcatttccacggccagaccttactcgaaaatggaaataagcagcaccagctgggtgtatggccgctgttgcctggttcattcaagacgcttgagatgaaagcgagcaaaccaggatggtggctcctaaataccgaggtcggtgaaaaccagcgcgcgggcatgcaaactcctttcctgattatggatcgcgactgccgcatgcccatgggcctttcaactgggattatttccgatagtcagataaaagcaagcgaattcttggggtactgggagccacggctcgccagattgaacaatggaggttcttataatgcctggagcgttgaaaaattggcagccgagttcgcgtccaagccctggattcaggttgacatgcaaaaagaggttatcattacgggcatccagacacagggtgccaaacattatttgaaaagctgctataccacagagttttacgtcgcgtattcatctaaccagatcaactggcagatctttaaagggaactctacacgaaatgtgatgtacttcaacggcaactcagatgcctcgactatcaaagagaaccagtttgatccaccgattgtggcacgttacattcgcatatctccgactcgtgcttataaccggcctactctgcgcctggagcttcaaggctgtgaagtgaacggctgctcgacaccattaggaatggaaaatggtaaaatcgaaaataagcagattaccgccagttccttcaagaagagttggtggggagactactgggaacccttccgggcgcgtctcaatgcacagggacgagtcaacgcctggcaggctaaagcgaacaacaacaaacaatggttagaaatagacctcttgaagatcaagaaaatcaccgcaatcatcactcaaggctgtaagagtttgagtagcgaaatgtatgtgaaatcttatactattcattacagcgagcaaggagtggagtggaagccttataggctgaaatcgtctatggtagataagatcttcgagggcaacactaatactaagggccacgtcaagaacttctttaacccgcccattatctcgcgattcatacgagtaattcctaaaacgtggaatcagtcaattgcattacgccttgagctttttggctgcgatatctat

SEQ ID NO: 9134 - DNA, 6672 bp, synthetic construct
  misc_feature 1..6672: note = source = /note="Description of Artificial Sequence: Synthetic coding sequence"
  source 1..6672: mol_type = other DNA
atgtttcctgggtgcccacgactttgggttcttgttgtgttgggcacgtcttgggttggctggggcagccagggaactgaggcagcccagctccgtcaattttacgtagccgcccaggggatttcttggtcctacagacccgagcctactaattcatctctgaacctgtctgttactagttttaagaagatagtgtatcgcgagtacgaaccttactttaagaaggagaaaccacagtccaccatttctgggttgctgggcccaactttgtatgcggaggttggagatataattaaggttcacttcaagaataaggcagacaagcctttgagtatacatccccaagggatacgttactcgaagctgagcgaaggtgcaagctatctagaccacactttcccagcagagaagatggatgatgctgttgcccctgggcgggagtacacttatgaatggtctatctcagaggacagcggacctacccatgacgatccgccatgccttactcatatctattactctcacgagaatctgatcgaggacttcaacagtggcctgattgggcccttgctgatctgtaaaaagggaactctgacagaaggcggcactcagaagacttttgacaaacaaattgtgctattgttcgcagtgttcgacgagtcaaaaagctggagccaatcgtcttctttgatgtatactgtcaacggctacgtgaatggcacaatgcccgacattactgtctgcgctcacgatcacatttcctggcacctcctcggaatgtctagtggtcctgaactgttttccatacacttcaacgggcaagtcctcgaacagaaccaccacaaggtatcagcgatcactctggtttctgcaacgagtaccacagctaatatgacagtcgggcctgagggcaagtggatcatcagctccttaacccccaagcacttacaagcggggatgcaggcttacatcgacattaaaaattgcccaaagaaaacacgcaacttgaagaagatcacaagggagcaaaggcgacacatgaagcggtgggagtacttcatcgccgctgaagaggtgatatgggactacgccccagtgatccctgcaaacatggacaaaaaatacagatctcagcacttagataacttttccaaccagattggcaagcactataaaaaggtgatgtatacccagtacgaggatgaatcgttcaccaagcatactgtgaatcctaatatgaaagaggatggtattctcggaccaatcattagggcccaggtgcgagacacgctgaaaatcgtgtttaagaatatggcatctcgcccatactccatctatcctcacggagtcacattttcgccctacgaggacgaggtgaatagctcatttacctccggacgcaataataccatgatccgtgctgtgcagcctggtgagacctacacctacaagtggaatatactggagtttgacgaacctactgagaatgatgcccagtgtttgacccggccctactattctgatgttgacatcatgagagacatcgctagcggcctcataggcttgttacttatctgcaaatctcgcagtcttgacagaaggggcatacagcgcgccgccgacattgagcagcaagctgtctttgccgtcttcgatgaaaacaaaagctggtatctggaggataacataaataaattctgcgagaatccagacgaagtgaagagggatgaccctaagttctacgagagcaacattatgtccactattaatgggtacgttccagaaagcatcactaccctcggtttctgcttcgatgataccgtgcaatggcacttctgcagcgttggcacacaaaacgagatcttaacgatacattttaccgggcatagtttcatctatggcaagcgtcatgaagacacactcacactgttccccatgagaggcgagtcagttacggtcacgatggacaatgttgggacttggatgctgacctcaatgaattctagtcctaggtccaaaaagcttcgtctcaagttcagggacgtgaaatgcatcccagacgatgacgaagactcttacgaaatatttgagcctcctgagtcaacagttatggctacccgcaaaatgcatgacagactggaaccagaggacgaggaatccgatgcagattacgattaccaaaaccgtttagctgctgcgttaggcattcggtcgtttcggaattcttctctgaaccaagaggaagaagagttcaatttgaccgcactagccctggaaaacgggaccgagttcgtgagcagcaacaccgacattatagtgggaagcaactattccagtccaagcaatatctctaagttcacagtgaacaacctcgccgagccacagaaggctcccagccaccagcaagctaccacagctgggagcccactgagacatttgattggcaagaacagtgtgctaaattcatccactgctgaacactcctcaccttactctgaggaccccatcgaagaccccctgcagccagacgtaacgggaatcaggctcctgtccctgggagccggggagtttaagtcacaggagcacgccaaacacaaggggccaaaagtcgagcgcgatcaggccgctaaacataggttcagttggatgaaattgctcgctcacaaggtcggtcgtcacttgtcccaggatacgggcagcccaagcggcatgagaccgtgggaagatctgccgtcacaagataccggctctccaagtcgcatgcgcccctggaaggaccctccttctgacctgctgttgttgaaacaaagcaattcctccaagatcctcgtgggtcgctggcatctggctagtgagaaagggtcctatgagatcatccaggacacagacgaagatacagccgtgaataactggttgattagcccacagaacgcttctcgtgcctggggagagtctaccccactcgcaaacaagcctggtaagcagagtgggcatcctaaatttcccagagttagacataagtccctccaggtccgccaggacgggggcaagtctaggctgaagaagagccagtttctgattaaaacccgcaagaagaaaaaagagaagcatacacaccacgcacctttgagtccgagaacattccatcccctccggagcgaagcctataacaccttttctgaacgaagactcaagcacagcttagtcctgcataaatcgaatgagacctccctgccaactgatctgaatcaaacgctcccctctatggattttggatggattgcttcgctaccagaccacaaccagaattcctcaaacgatacaggccaggcatcgtgccccccaggcctctaccaaacggtaccgcctgaggaacattaccagacattccccatacaggatcctgatcagatgcacagcacaagtgacccatcgcatcggagctccagccccgaactctcagaaatgttagagtatgacaggagccacaaatcgttccctacagacatcagccagatgagtccgtcatccgaacacgaagtatggcagaccgtcatctctccggatctctcccaggtgacccttagcccagaactttcccagacaaatctgagtcccgatctttcccacaccacgctcagcccggagcttatacagaggaacctgtcaccggctctgggccagatgccaattagtccggatttgtcccacaccaccctgagtccagaccttagtcatacaacgctttcactggaccttagtcagacaaacctctctcccgagctgagccagacgaacctctcacccgccctgggtcagatgcccttgagtcctgatctgtctcacactactctttcacttgacttctctcagaccaatctcagtcctgagcttagtcatatgaccctctcaccagaattatcgcagacaaatttgtctccagccttggggcaaatgccgatatcacccgacctctctcatactacgttgagtctggattttagccaaactaacttgagtcccgaactgtcgcagacgaacttgagtccagcccttggacagatgcccttgtcccccgacccttctcacacgaccctgagcttggatctgtcccagactaacctaagccccgaactgtctcagaccaatttgtcccctgacctgtccgagatgccgttattcgccgacctgtcacagatcccgctcacacccgatttggaccagatgacactttccccagatcttggagagacagatctgtcccccaattttggccagatgagcttgtcgccagacctgtcccaggtgaccctctcccccgacatcagcgacaccaccctgttaccagacctttcccaaatctcacctccacctgatctagaccagattttttatccatccgagtcatcacaaagccttttgctgcaagagttcaatgaatcatttccctacccagacttagggcaaatgccctcacccagttcccccaccctgaatgacacctttctttctaaggagtttaatccattggtcattgtcggactgtccaaggatggaacggactatattgagattatacctaaagaagaggtgcaatcatctgaagacgactatgcagaaatcgattacgtcccttatgatgacccttacaagactgacgtgcgaacaaacattaattcctcgagggatcctgacaacattgcggcctggtacctgagatcaaacaacgggaatcggcggaactactacattgctgctgaagagatctcatgggactatagcgaattcgtgcagcgagaaacggatatcgaggactctgatgacatcccagaagatacgacctataaaaaagtagtctttcgaaagtacctggattccaccttcacaaaacgagacccacgcggcgaatacgaggagcatcttggaattctggggccgattatcagagccgaggtggatgacgtgatccaggtgcgattcaaaaatttggcaagcaggccttacagtttacacgctcacggcctgtcatatgaaaaaagcagtgaggggaaaacatatgaggacgacagtccagaatggtttaaggaggacaacgccgttcaaccaaacagtagttacacctatgtgtggcacgcaaccgagcgcagcggccccgaaagcccaggcagtgcatgccgggcatgggcatattattcagcggtcaacccagagaaggacattcatagtggcctgattggtcctctccttatatgtcagaagggaatcctccacaaagactccaatatgccaatggatatgagagagtttgtgctcctgttcatgactttcgacgagaaaaaatcctggtattacgagaaaaagagtaggtccagttggcgactgacttcgtccgaaatgaagaagagtcatgagtttcatgcaattaacggcatgatttacagtctgccaggactcaaaatgtatgagcaggagtgggtgagactgcatctgctgaacatcggaggctcccaagacatacacgtggtgcactttcacgggcagaccttactggaaaatgggaacaagcaacatcaactgggagtatggccactgctgcctggttcctttaagacacttgagatgaaagcctccaagccaggttggtggttactcaacaccgaggtcggcgaaaaccagagggctggcatgcagacacctttcttgattatggaccgcgactgccggatgcctatgggcctgtctaccggaattatttccgattctcagataaaagcttcagaatttctggggtattgggaaccccgactggctaggctaaataacggcgggagttataacgcctggagcgttgaaaagctggccgctgaatttgccagtaaaccctggatccaagtagacatgcagaaagaggtgataatcactgggatccagactcaaggtgcaaaacattacctcaaaagttgttataccactgagttttacgtggcctattctagcaatcagattaattggcagatcttcaagggcaacagcaccaggaatgttatgtattttaacggcaacagcgacgctagcaccatcaaagagaatcagttcgacccacccattgttgctagatatatccggatttctcccactcgtgcatacaacaggcccacactacgactggagttgcagggatgcgaagtgaacggctgtagcactcctctgggaatggaaaacggcaagatcgaaaacaagcagattaccgcttcctccttcaaaaagtcgtggtggggcgactattgggagcccttccgagctcggctcaatgctcaggggcgggttaatgcatggcaggcgaaagccaataataacaagcagtggctggagattgatctgctaaaaatcaaaaagatcactgcaattataacccaggggtgcaagagtctcagctctgaaatgtacgtgaaaagttacactatccattacagcgagcagggagttgaatggaaaccataccgtctcaaatccagtatggtggataagatatttgagggtaacacgaatacaaagggtcatgttaagaatttttttaaccctcctattatatcccgatttatcagggtgatccccaaaacttggaaccagtccattgcattaaggctcgaattatttggctgcgacatttac

SEQ ID NO: 9135 - DNA, 6672 bp, synthetic construct
  misc_feature 1..6672: note = source = /note="Description of Artificial Sequence: Synthetic coding sequence"
  source 1..6672: mol_type = other DNA
atgttcccaggttgccctagactatgggtcctggtcgtgctcggtacctcttgggtagggtgggggagtcaggggaccgaagccgctcagctcagacagttctacgtggcagcccagggcatttcttggtcttatcgtccagagcccacaaactcatccctgaacctgtctgtgacttccttcaaaaaaattgtgtatagagagtatgaaccctattttaagaaggagaaaccacagtcaaccattagcggcctcctagggcctaccctgtacgcagaagtgggagacattatcaaagtccatttcaagaacaaggccgacaaacccttgtctatccaccctcagggcattaggtattccaagctgtcagaaggcgcaagctacttagaccatacattccccgcagagaagatggacgacgcagtcgcccctggacgagagtatacttacgagtggtccatcagcgaagactccggaccgacgcacgatgacccaccatgtcttacccatatttactattctcacgaaaacttgatagaggatttcaactcaggactgataggaccacttctgatttgtaagaaaggcacactgactgagggaggcactcagaagacctttgataaacagattgtgttgttatttgccgtgttcgacgaatccaagtcctggtcgcagagttccagcctgatgtacaccgtcaacggctacgtgaacggtactatgccggacattactgtctgcgctcacgatcacatcagctggcatctgttagggatgtcaagcgggcccgagctcttctctatacatttcaacggacaggtgctggagcaaaaccatcataaagtctctgccatcactctggtatccgccacttcgaccacggccaacatgacggtgggcccggagggcaaatggatcatcagcagcctgacacccaagcatctgcaggccggaatgcaagcctatattgacatcaagaactgccctaaaaagacacggaatctcaaaaagatcacccgggaacagcggcgacatatgaagcgatgggagtatttcatcgctgctgaggaagtgatatgggactatgcccctgtaatccccgcgaacatggacaagaagtatcgctcacagcatctcgataacttctccaatcagatagggaagcattacaagaaagtgatgtacactcagtatgaggacgaatccttcaccaaacacaccgtcaaccccaatatgaaggaagacggaatcctgggtccaattattcgcgcacaagtccgcgataccctgaagatagtatttaagaacatggcatctaggccctatagcatatatccacatggcgtgactttctcgccttacgaagacgaagtaaacagttctttcacctctggccgcaacaacacaatgatccgcgccgtgcagccaggtgaaacctatacatacaagtggaatattcttgaattcgacgagcccacggaaaatgatgctcaatgcttgactcgaccctattattctgacgtggatatcatgagagatatagcctccggactgatagggctactactgatctgcaagagccgcagtttggacaggcgtgggatacagcgagccgccgacattgagcagcaagcggtgttcgcagtgttcgacgaaaataagagctggtatctggaggataacattaacaaattttgtgagaaccccgatgaggtgaagcgcgacgatccgaagttctatgaatcgaacatcatgagcacaatcaacgggtacgtaccagagagtatcacaacactcggattctgtttcgatgatacagtccaatggcacttctgcagtgtggggacgcagaacgaaatcctgactatacatttcaccggccactcattcatttatgggaagcggcacgaagacaccttaacgctgttccccatgcgcggggaatccgtgacagtaaccatggacaacgtaggcacgtggatgctcacttcaatgaactcctcaccacgcagcaaaaaactccgcctcaagtttagagacgtgaaatgtatcccggatgatgacgaggacagctatgaaatctttgaaccccctgaatccaccgtgatggccacacgcaaaatgcacgatcggctcgagccagaggacgaggagtctgatgcagactatgactaccagaacaggctggcagccgctctagggatccgaagctttagaaactcgagcctgaatcaggaggaggaagagttcaacctgacggcccttgccctcgaaaatggaaccgagttcgtgtcctctaacaccgatatcatcgtgggaagcaattattcatcgcccagtaatatatccaaattcactgtcaataatctcgctgagcctcagaaagccccctctcatcagcaggctacaaccgccggcagccccctcagacacttgattgggaagaactccgtgctgaactcaagcacagcggagcactcttccccctactctgaggatccaattgaggatcctctgcagcccgatgtcaccgggattcgtctgctgtcactgggagccggcgaattcaaatcccaggaacacgccaagcataaaggtcctaaagtggagcgagaccaggccgccaaacacagattctcttggatgaagctcttggcacacaaggtaggcaggcacctttctcaggacaccggatctccttccgggatgcgcccttgggaagacctgccatcccaggataccggctccccctctcgcatgcgtccatggaaggatccgcccagtgacctgctgttgctcaaacagtcgaacagttccaagatcttagtcggtagatggcacttggcctccgagaaggggtcctatgaaatcatccaagacacagacgaggacaccgccgtaaacaattggctaatttccccccagaacgcctcaagagcctggggcgaatctaccccactcgctaataagccagggaaacagtctggacacccaaagttcccacgggtccgtcataagtctctgcaggttcggcaggacggtgggaaaagcaggctgaagaagtcccagttcctcattaagacgcgcaagaagaaaaaggaaaagcacacacatcatgcacctctgtcgcccaggacattccaccctctgcggtctgaagcgtacaataccttttctgaacgcaggctgaagcactccctggtgctgcacaagagcaatgagacatccctgccaaccgaccttaaccaaacactgcctagtatggacttcgggtggatcgccagcctgcccgatcacaatcagaattcctctaatgataccggccaggctagctgccccccggggctgtaccagacagtgccacctgaggagcattatcagacattccctattcaggaccctgatcagatgcactccacgagtgacccgagtcaccggagctcgtctccggagctttccgaaatgctggaatatgacagatctcataagagcttccctacagatataagccagatgagtccttctagcgagcatgaggtctggcagacggtgatctcaccggacctgagtcaagtgaccctctccccagaattgagccagacgaacctaagtccagatctgtcacatactaccctgagcccagaactcattcagcggaaccttagccctgcgctgggtcagatgcccatcagtcctgatctgagtcacaccaccctaagcccagatctgtcacacacgactctgagcttggatctgagccaaactaatctgagcccggagctgtcccagacaaacctgagccccgcactggggcaaatgcctctgtcgccagacttatcccacacgactttgtccctggattttagtcaaactaacctctccccagaattgtctcatatgaccctgtcacccgagctgtctcagaccaacctttccccggccctgggacagatgccaatttcacccgacctttctcacacaacactgtcactagacttctctcagactaatctgtcacctgaattgagccagacgaacctgagtccggcgcttggtcagatgcccctcagccccgacccctctcacactaccctaagcctggacctctcccagactaacctgagccctgagctgagccagacaaacctgtcccccgacctcagcgaaatgcctttgttcgcggacttgtctcagattccgctgacgcctgatctagaccagatgacgctgtcccccgacttgggcgagaccgacttgtcccccaattttggacagatgagtctgagccctgacctgtcccaggtcactctgtcccccgacatcagcgatactaccctgctgcccgacctgtcccaaatctcccccccacctgatctggaccagattttttaccccagtgaatcttctcagagcctgctgctgcaggaatttaacgagagcttcccttatcccgacctgggccagatgccgagccctagcagtcctacgctcaatgacacttttctgagcaaggaatttaatcctctcgtgatagttggcctgtctaaagatggcacagactatatagaaatcatccccaaggaggaagtgcagagctcagaggacgattacgccgagatcgactacgtcccgtacgacgacccctacaagaccgacgttaggacaaacatcaattcaagcagggatcctgataacatcgccgcctggtatctgaggtccaacaacgggaatagacgaaactattatattgctgccgaggagatcagttgggactactctgagtttgtgcaacgggaaacggatattgaggactccgacgacattcctgaagataccacttacaagaaagtggtgttccgtaagtatctcgactcgacattcaccaagcgggatccaaggggagaatacgaagaacatttgggcatcctgggaccaattattcgcgccgaggtggacgacgtcatacaggtccgcttcaagaatttggcgtcgcgcccatactcactccatgcccacggactgtcatacgagaagagttccgaaggtaaaacctatgaggacgactcccccgagtggtttaaagaagacaacgccgtacagccgaacagttcctacacatatgtatggcacgcaaccgaacgaagtggacccgaatcaccggggagcgcatgtagagcgtgggcctactatagcgcagtaaatccagagaaagacatacactctggacttataggacctctgctcatctgtcagaaggggatcctacacaaggactccaacatgcccatggacatgagggaatttgtgctcctttttatgacctttgatgaaaaaaagtcatggtattacgagaagaagtctaggtcctcttggcgactgacaagcagtgagatgaagaagagccacgagttccatgccattaacggcatgatctactcactccctggcctcaaaatgtatgaacaagagtgggtacgcttgcatctgttaaatatcgggggcagccaggatatccacgttgtccacttccatgggcagactctacttgagaatggaaacaagcagcaccagctcggcgtttggccattgctgcctggaagctttaaaactttggaaatgaaggcctctaagcctggttggtggctactgaacaccgaagtgggggagaaccagagagccggcatgcagaccccattcctgataatggatagggactgcaggatgcctatgggactgagtactggtataataagcgactcacagattaaagcatcagagtttctggggtattgggagccacggttagcccgactgaacaacggagggtcttacaatgcgtggagcgttgagaaattggccgccgaattcgcctccaaaccctggattcaggtggacatgcaaaaggaagtgattattaccggaatccagacccagggagccaaacattacttaaaatcctgttacaccactgagttctacgtggcctacagctcgaaccagataaactggcagatcttcaaaggtaatagcaccaggaacgtgatgtactttaatggcaactcagatgcatccacgattaaggagaatcagttcgatccacccattgtggctcgctacatacgtatcagtccaacccgcgcctacaataggcctactctgcggttggagctgcaggggtgcgaagtcaatggctgcagcactccgctggggatggagaatggcaaaatcgagaacaaacagatcacagcaagttcctttaagaaatcgtggtggggtgactattgggagccttttagggccaggctgaatgctcagggccgcgtcaatgcctggcaggccaaggctaacaacaataagcagtggctagaaatcgacctcctgaagatcaaaaaaatcaccgccataatcactcaggggtgtaagagcctatcgagcgagatgtacgtgaagtcctacaccattcactatagtgaacagggcgttgaatggaaaccatacagactgaaatcttccatggtcgataaaatatttgaggggaacactaataccaaggggcacgtgaagaacttcttcaatccccctatcatctccagatttatcagagtgatcccaaaaacttggaaccaaagcattgctctgcggctcgaacttttcggctgtgacatttat

SEQ ID NO: 9136 - DNA, 6672 bp, synthetic construct
  misc_feature 1..6672: note = source = /note="Description of Artificial Sequence: Synthetic coding sequence"
  source 1..6672: mol_type = other DNA
atgttccccggatgtccgaggctctgggtcttagttgtactgggcacttcctgggtggggtggggctcacagggcaccgaggctgcccagctgcggcagttctacgtcgctgcacagggtatcagctggtcatataggcctgagcccacaaactcttcactgaacttatccgtgacgagtttcaagaaaatagtctacagagaatacgaaccatattttaaaaaagaaaaacctcagagcacaatctctggactgttgggacctaccctatatgcagaggtaggtgacatcattaaggtccattttaagaataaggccgacaaacccctgtcaatccacccacagggcatcagatattccaagctgtcagagggggcaagttacctggaccacaccttcccagctgagaaaatggacgatgccgttgctcccggtcgggaatatacatacgagtggtcaatctccgaagactccgggcctacacacgacgaccctccttgcctgactcacatctactattctcatgaaaaccttatcgaagatttcaactcaggactgatcggcccactcctaatttgtaagaagggaacgttgaccgaaggcggaacccagaaaacctttgataaacagatagtgctgttattcgctgtctttgacgagagcaagagctggtcacagagttctagtctcatgtacactgtcaacggctatgttaacgggaccatgccggacatcaccgtgtgcgcacatgaccatatttcctggcatctgttgggaatgtcaagtggaccagagctgtttagcatccacttcaatgggcaggtcctcgaacagaatcatcacaaagtgagtgcgataacactggtaagcgcgacctcaacgactgccaatatgacggtgggccccgaggggaagtggattattagctcgctgactcctaagcaccttcaggccgggatgcaagcgtatattgacattaaaaactgccctaagaagacacggaacttaaagaaaatcaccagggagcagagacgtcatatgaaacgctgggagtacttcatcgccgcagaggaggtcatctgggactatgcaccggtcattcccgctaacatggacaaaaagtatcgttcccagcacctggacaatttctcaaatcagataggtaaacactacaaaaaggtgatgtacacacagtatgaggatgagtcgttcaccaagcataccgtcaatcctaatatgaaggaagatggtattctgggtccgataatacgggcgcaggtccgggatacacttaagattgtttttaagaatatggcgtctaggccttactcaatttaccctcacggtgtaacttttagcccatacgaggacgaggtaaactcaagcttcacaagtggcaggaacaacacaatgattcgcgccgtgcagccaggggagacatacacttataagtggaatattctcgaatttgatgagccgactgagaatgacgctcagtgtcttacccgcccctattactccgacgtcgacattatgcgcgatattgcatctgggcttattgggttgctactcatctgcaagagtaggagtctggatagaaggggcattcagcgagccgccgatatcgaacaacaagcggtgtttgcagtatttgacgagaataaatcctggtacctggaagataacattaacaaattctgtgagaaccccgacgaggtaaagcgggacgaccccaaattctacgaatctaatatcatgagtactattaatggatacgttccagaaagcataacaaccctgggattctgctttgacgatactgtccaatggcacttttgtagtgtggggacccaaaacgagatccttaccatccactttaccggtcactcttttatatatggcaagaggcacgaggacacactgacactcttccctatgagaggcgagagtgtaacggtgaccatggacaatgtcgggacttggatgttaacttctatgaattcatctccaaggtcgaagaagcttcgccttaagttcagggacgtgaagtgcatacctgatgacgatgaggattcctatgagattttcgaaccccctgagtctactgttatggcaaccagaaagatgcatgacagacttgaacccgaagacgaagagtcagacgctgactacgattatcaaaacaggttggctgctgcgctgggcattaggtcattcaggaattccagcctgaaccaggaggaagaagagtttaatctcacggctttggcacttgaaaatggaacagagtttgtgtcgagcaataccgacatcatcgtcgggtccaactatagttctcctagcaatatctcaaaatttaccgtcaataatctggcggaaccacagaaggctccaagccaccaacaggccacaactgctgggtctccacttcgtcatctaattggcaagaattccgtccttaatagcagcacggcggagcattccagtccatactccgaggatcccatcgaagatcctctgcaaccggatgttacagggatccggttactatcattgggggccggtgaattcaagagccaggagcacgccaagcataaagggcctaaggttgagagggatcaggccgctaagcatcgattttcatggatgaagctccttgcccacaaggtcggcaggcatttgtcccaggataccgggtccccgtcagggatgaggccatgggaagacctgccttcccaggataccggcagtccgtccaggatgcggccgtggaaggatccacccagtgacctcttacttctgaagcagtccaattcttctaagatcctggtgggccggtggcacctcgcatcggagaaagggtcctatgagatcattcaggacacagatgaagatacagccgttaataattggctcatcagcccgcaaaatgcctccagagcttggggtgagagcactccccttgcgaacaaaccaggtaaacagtccgggcatccgaagttcccgagggtgcgccacaaatctttgcaggtccgccaggatggcgggaaatcaaggctgaagaaatcacaattcttgatcaagaccaggaagaagaaaaaggaaaaacacacgcatcatgcaccattgagtcctcgaacttttcacccccttcggagtgaggcgtataataccttttcagaacggcgacttaagcacagcctcgtgctgcacaagtcaaacgagacctcgcttcccacagatctgaatcagactttaccctcgatggatttcggatggatcgcctccctgcctgaccataatcagaactcttccaacgatacaggacaagcatcctgtccacccggactctatcagactgtccccccggaagagcactatcagacatttcctatccaggaccccgaccaaatgcactctactagtgacccctcccataggtcaagctctccggaactctccgagatgctcgagtacgaccgctcacacaaatcctttcctactgatatcagccagatgagcccttcatccgagcatgaggtgtggcagaccgtgatctctccggacttgtcccaggtgacgttgtcacccgagttatctcagaccaacctgtcccctgacctctctcatactacgctgagccctgagctgattcagcggaacctgtctcccgcacttggacagatgcccatctctccagatctttcccacacaaccttgagccctgacctgtcacacacaaccctctcgctcgacctgagccagacgaacctgagccctgagctgtctcagacgaatttgagcccggcactggggcaaatgccactaagtcccgacttgagccatactacattgtcactagacttcagtcagaccaacctgtctcccgaacttagccatatgaccctgagccccgaactgagccagaccaacctttctccggcgctcggtcaaatgcctatatctccagacctgtcccacacaaccctgtctctggatttcagtcagaccaatctctcgccagagctcagccaaaccaatttgtccccagcattgggccagatgccacttagtcctgaccccagccacacgactttgagtttggacctgtctcaaactaatctatctcctgaacttagccagacaaacctgagtcccgacttgagcgaaatgcccctttttgccgacctgtctcagatacctttgactccagacctggaccagatgaccctcagtcccgacctgggggaaacagacctgtctcccaacttcggacagatgagtctatcccctgacctcagccaggttactctgagcccggacatttcagacaccacactgctgcctgacctgagccagatttctcctccaccagatctggaccagatcttctacccgtccgaaagttcacagagcctcttgctccaggagttcaatgaatctttcccctatcctgacctgggacagatgcccagcccaagctcaccgaccctcaacgacaccttcctgtcaaaggaattcaatccccttgtgatcgttgggttgtccaaggacgggacagattacatagagattatccccaaggaagaggttcaaagttctgaagatgattacgccgaaatcgattatgtcccctacgatgatccgtacaaaaccgacgtccgcaccaacattaacagctcccgcgatccagataacatcgcggcctggtatctgcgaagcaataatgggaaccggcggaattactatatcgctgcagaggaaattagctgggattactcagagtttgttcagagagaaacggacattgaggatagtgacgacattcctgaggataccacttataagaaggtggtgttcagaaagtacctggactcaacgttcacaaagcgggacccaagaggggagtacgaggaacacctcgggatattgggccccatcatccgcgcagaagtggacgatgtcattcaagtgcggttcaagaacctcgcttcccggccttactccctgcatgcacacggactctcgtatgagaagtctagcgaagggaaaacttatgaggatgactcaccagagtggttcaaggaagacaacgcggtgcagcccaattcgtcatacacttacgtgtggcacgccactgagcgcagcggccccgaatctcccggttcagcatgtagggcatgggcatactacagtgctgtgaacccggaaaaggatatccacagcggactgatcgggcccctcctgatttgtcagaaggggatcctccataaggattctaacatgcctatggacatgcgggagttcgtgttgctgtttatgacatttgacgagaaaaaatcttggtactacgaaaagaagtcacgaagtagttggaggctcacctcaagcgagatgaagaagagccacgaattccacgcaattaatgggatgatatactctcttccggggctgaagatgtacgagcaggaatgggttagattgcacctgcttaatatcggcggatctcaggatatccacgtggtgcatttccatggccaaactctactggagaatggcaacaagcagcaccagttgggggtgtggccactactgcccggctcctttaaaaccctcgagatgaaagcctcaaagcccgggtggtggttgctaaatacggaggtcggtgaaaatcagagagctggaatgcagacgcctttccttattatggatagggactgccgcatgcctatgggactgagcacgggtatcatttctgactcgcagataaaagccagcgaattcctgggatactgggagcccagactcgcacgactaaacaatggcggatcctataacgcgtggagtgttgaaaagcttgctgctgaattcgccagcaaaccttggattcaggtcgatatgcagaaggaagttatcataactggtatccagacacagggcgctaagcactatctcaagtcttgctatactaccgaattctacgtggcctacagctctaaccaaatcaactggcaaattttcaagggtaacagtacccgaaacgtgatgtacttcaatggaaacagtgatgcatcaacaatcaaagaaaatcaattcgacccccccattgttgctcggtacataaggatcagccccactcgggcgtacaacaggcctacattacgactcgagctgcaaggatgtgaggtgaatggttgttctacgcccctggggatggagaacgggaaaatcgaaaacaagcagatcacggcgtctagctttaaaaagtcatggtggggcgactactgggaacctttcagggcacgccttaatgcacagggccgggttaacgcctggcaggctaaggcaaacaataacaaacaatggctggagatcgatctactgaagattaagaagattacggccatcattacccaggggtgcaaatccttgtcctccgagatgtacgtgaagagctacacaatccattattcagaacaaggagtggagtggaagccgtatcgtctaaaatcctccatggtggataagatcttcgagggtaataccaacactaaaggccacgtaaagaatttctttaaccctcccattatttctcggtttattagggtcattccaaaaacttggaatcagagtatcgccttacgcctggagttattcgggtgtgacatatac

SEQ ID NO: 9137 - DNA, 6672 bp, synthetic construct
  misc_feature 1..6672: note = source = /note="Description of Artificial Sequence: Synthetic coding sequence"
  source 1..6672: mol_type = other DNA
atgtttcccggatgtccaaggctttgggtcttggtagtactagggacaagttgggttgggtgggggtcacaggggacagaagctgcacagctgcgccagttttatgtggctgctcaggggatctcttggtcctacagacctgaacccactaactcttcactgaacctatcagtgacatcctttaaaaaaatagtgtatcgagaatatgaaccttactttaaaaaggaaaaacctcaatcaacaatctcaggattactaggaccaacactatatgccgaagtgggggatataattaaagtacactttaagaacaaagccgataaacctctttccatacacccccaggggatcaggtattcgaaactgtctgagggggcttcctatctcgatcacactttcccagctgaaaaaatggatgatgccgtcgcaccaggacgtgaatatacttacgaatggtcaatctccgaagattctggaccaacgcatgatgatcccccatgtctgacacatatctattattcgcatgaaaacctaatagaggacttcaacagtgggctgattgggcccctactgatttgcaaaaaagggactttaactgaagggggaacacagaaaacatttgataaacagatcgtgcttttattcgctgtcttcgatgagtctaaatcttggagtcagtcctccagtttgatgtacacagtcaacgggtacgtgaatggaactatgcccgacatcacagtgtgcgctcatgatcatataagttggcatctcctggggatgagtagtggacctgaattgttctctatccactttaatggacaggtccttgaacagaatcatcataaagtctccgcaattactctagtctccgccacttcaacaacagctaatatgacagtcgggcctgaaggaaagtggataatctcctcgttaactcctaaacatctccaagcggggatgcaggcttatatcgatataaaaaattgccctaaaaaaactcgcaaccttaaaaagatcacacgggaacagcggcgacacatgaaaaggtgggaatattttatcgccgccgaagaagtgatatgggattacgcccccgtaatccccgctaacatggataaaaaatatcgatctcagcacctcgataatttttcgaaccagattgggaagcattataaaaaggtcatgtatacacagtacgaagacgaatcttttactaaacatacagtgaaccctaacatgaaagaggatggaatcctggggccaataatccgtgcccaggttcgcgatacactcaaaatcgtgttcaaaaacatggcgtctaggccatattctatctatcctcacggggttacatttagtccctatgaagatgaagtaaacagttcttttactagtggaaggaacaatactatgatacgcgccgtgcagcccggggaaacttacacttataaatggaatatcctggaatttgatgaacctacagaaaatgatgcacagtgtctgactaggccctattactccgatgtggatattatgcgggatattgcctccgggctgatcgggctactactcatttgtaaatccaggtccttggataggagagggatccagagggcagccgatatagaacaacaggccgtcttcgcagtattcgatgaaaacaagagttggtacctggaagacaatattaataaattttgtgaaaaccccgatgaggtgaaaagagacgatcccaagttttatgagtctaacatcatgtcaactattaatggatacgtacctgagtctatcacaactttaggattctgttttgatgatacagtgcagtggcacttttgttccgtagggacgcagaatgagattctcacaatacatttcactgggcattcattcatctatggaaaacgccacgaagatacattgactcttttccccatgaggggagaatctgtgacagtaactatggacaatgttggaacttggatgctaacatctatgaatagtagtcctcggtctaaaaaactccggttgaaattcagagatgttaaatgcattcctgatgatgatgaggattcttacgaaatattcgagccacccgaatcaactgtgatggctacacggaagatgcatgatagactagaacctgaggatgaggagtccgacgccgattatgattatcagaacaggctagccgctgccttagggatacggtcttttcgaaactctagtctgaatcaggaagaagaagaatttaatcttacagcattagctctggagaatgggacggaattcgtgtcctctaatactgatatcatagtgggatcaaactattcaagtccttcaaatatctccaaatttacagtgaataaccttgctgaacctcagaaagcccccagtcatcagcaggccacaacagcagggtctcctttacggcatctcatagggaaaaattctgtacttaactcctcaacagccgaacactcctccccctatagtgaagatccaatagaagatccactgcagcctgatgtgactgggataagattgctctcactaggagcaggagaattcaaatctcaggagcacgctaaacacaaagggcccaaagtcgagcgagaccaggcagccaagcatagattctcttggatgaaattacttgcccacaaggtgggacggcacttatcccaggatacagggtccccttcagggatgaggccatgggaagacttacctagtcaggatactggatctccctcccggatgcgaccatggaaagatcctccaagtgacctccttctactgaaacagtccaattcttcaaaaatactcgtcggaaggtggcaccttgcctcagaaaaggggagttatgaaattatccaggatacagatgaggatacagctgtgaataattggctcatcagtccccagaacgcctcccgagcctggggggaatcgactccccttgctaacaaacctggaaaacagtcagggcaccccaaattcccacgggtcaggcataaaagtctccaggtaagacaggacgggggaaaatcacgccttaaaaaatcccagttcttaatcaaaacaaggaagaaaaaaaaagaaaaacatacacaccatgctcccctgtctccccggacattccaccctctgaggtccgaagcttataacactttctccgagcgacggctgaaacactccctcgtgctgcacaagagtaatgagacgagtcttcctacagatttgaaccaaacactgccttcaatggacttcggatggatcgcgtcactcccagaccataatcagaacagttctaacgatacagggcaggcttcgtgtccaccaggactctatcagactgtcccccccgaggaacattatcaaacgttcccaatccaggatcctgatcaaatgcatagtacttcagatccctctcacagatcttcttctcctgaactttccgaaatgctagaatatgatcggtcccacaaatccttcccaactgatatcagtcagatgtctccttcttccgagcacgaagtctggcagactgtgatctctccagatctctctcaggttacacttagtcctgagctgtctcaaacaaatttgagtcccgatctgtctcacactacgctgtctccagaactcatacagaggaatctcagtcccgctttggggcagatgcccatctcccctgatctctctcatactactctcagtccagacctttcccatacaacactctccctcgatctctcccagacaaacctgtcccctgaactctctcagacaaatctgtccccagcacttggacaaatgcctctctcaccagatttgtcgcatacaacgctgtctctcgatttttctcagactaacctttcgccagaactgagtcatatgacgctctcccccgaattaagtcagactaatctgtcccctgcgctcggacaaatgcccatatcaccagatctaagtcacactacgttatctctcgattttagtcagacaaatctctctcctgagctctctcagacgaatctgtcaccagccctcgggcagatgccactatcccctgatcctagtcacactacattatcactagatctcagtcagacgaacttgtcaccagaactttcccagacaaatctttcccctgacctcagtgaaatgccactattcgccgatttatcccaaattccactgacacctgatttagatcagatgacactctccccagacctcggggagactgatttatcccctaactttggacagatgtccctgtcccccgatttgtcacaggtgacactttcaccagatatatccgatactacactcttgcctgatctgtcccagatatcacccccgccggatctagatcagatcttctacccaagtgaatcatctcagtcactcttacttcaggaatttaatgagtcctttccttaccctgacttgggacagatgccttctcccagttccccaactcttaatgatacatttctaagtaaggaattcaaccctctggtaatagtgggattatctaaagatgggactgactatatagagatcatccccaaagaggaagtgcaatcatctgaggatgattatgcagaaatcgattatgttccatatgatgatccctataaaactgatgtgcgaacaaacataaactcatcacgagacccagataatatcgcagcttggtatcttcgctcaaacaatggaaacaggcgaaattattatatagccgccgaggaaatatcatgggattattcagaatttgtacagcgagaaacagatattgaagattccgatgatattcccgaagatacaacatacaaaaaagtggtgttcaggaagtatcttgattccactttcactaaaagggatccccggggggaatatgaagaacatctaggaatacttgggcccataatacgagccgaagtagatgatgtaatacaggtgcgctttaagaatctagcgtcaaggccttactccctgcatgctcatggactgagttacgagaaatcttctgaagggaaaacttatgaagatgattccccagaatggtttaaagaagataatgcggttcaaccaaatagttcatacacatatgtatggcatgcaacagaacggtctggacccgaatctcccgggtccgcttgcagggcctgggcttattatagtgcggtgaatcctgagaaagatatccactccgggctgattggacctctgctcatttgtcagaaggggatcctccataaggattcaaacatgccaatggatatgcgagaattcgttctcctattcatgacattcgatgaaaaaaaatcttggtattatgagaagaaatcgcgatcatcctggcgattaacatctagtgaaatgaaaaaaagtcacgaattccatgcaatcaatgggatgatctatagtcttcctggactgaagatgtatgagcaggaatgggtaagactccatctcctgaatataggggggtctcaagatatacatgtggtccatttccacggacagactcttctcgaaaacggaaacaagcagcaccagttgggggtgtggcccctacttcctggatccttcaaaacacttgaaatgaaagctagtaaaccagggtggtggctactgaacacagaagtaggagagaatcagcgcgcaggaatgcagactccttttctcataatggaccgggactgtagaatgccaatgggactgagtactgggataatcagtgattctcagataaaagccagtgaatttctcggatattgggaacctcgactcgcccggcttaataacggagggtcatacaacgcttggtctgtcgaaaaactcgctgccgaatttgcctctaaaccttggatccaggtggatatgcaaaaggaagtgataatcacaggaatccagactcagggggccaaacactatctgaaatcttgttatacaactgaattctatgtggcctactcctccaatcagataaactggcagatcttcaagggaaatagtacacgtaacgtgatgtattttaacggaaattcagatgcatccactataaaagaaaatcagttcgatcctcccatagtggcccggtatatcagaatttcccctactcgggcgtataatcggcccactctccgcttggagttacaggggtgtgaagttaacgggtgttcaactcctcttggaatggagaacgggaaaattgaaaacaaacagatcacagccagttctttcaaaaagagttggtggggagattattgggagccattccgagcacgccttaacgcacaggggcgagtaaacgcctggcaggctaaagccaataacaataagcagtggctcgaaatagatctgctgaaaattaaaaaaattactgcgatcatcacacaggggtgcaaaagtcttagtagtgaaatgtatgtgaaatcatacactatacattactcggaacagggagtggaatggaaaccctataggcttaaatcttctatggttgataaaatattcgaagggaacacaaacacaaaagggcatgtaaaaaatttttttaatcctcccattatatctcgattcatccgagtcattccaaaaacttggaatcagtcaatcgccttaagactcgaactatttgggtgtgatatctat

SEQ ID NO: 9138 - DNA, 6672 bp, synthetic construct
  misc_feature 1..6672: note = source = /note="Description of Artificial Sequence: Synthetic coding sequence"
  source 1..6672: mol_type = other DNA
atgtttccaggatgtccaagactatgggttttagttgttttaggaacaagctgggttgggtggggaagtcaaggtacagaagcagctcaattaagacagttttatgtagcagctcaagggataagttggtcatatagaccagaaccaacaaattcttcattaaatttatcagttactagttttaaaaaaattgtatatagagaatatgagccttacttcaagaaggaaaagccacaatctactatttcaggacttttaggaccaactttatatgcagaagttggagatataattaaagttcatttcaaaaataaagcagacaaacctttatccatacatcctcaaggaattagatactcaaaattatcagaaggagcaagttatcttgatcatacttttccagcagaaaaaatggatgatgcagtagctccaggtcgtgagtatacttacgaatggagtatttcagaagactcaggtcctactcacgatgatccaccatgtttaacacatatttattatagtcatgaaaatttaattgaagattttaactctggattaattggtcctttacttatttgtaaaaagggaactcttacggagggtggaacacaaaaaacatttgataaacaaattgtgcttttatttgcagtattcgatgaatcaaaatcatggtcccaatcaagttcacttatgtatactgtaaatggatatgttaatggaactatgccagatattacagtttgtgctcatgatcatatatcttggcatttacttggaatgtcttctggaccagaacttttttctatacattttaatggtcaagttcttgaacaaaatcatcataaagtatcagctattactttagtttcagcaacatcaactactgctaacatgacagtgggaccagaaggaaaatggattatttcttcattaactccaaaacacttacaagctggtatgcaagcatacattgatattaaaaattgtcctaaaaaaacaaggaatttaaaaaaaattactagagaacaacgtagacatatgaagagatgggaatactttattgcagctgaggaggtcatttgggattatgcaccagttataccagcaaatatggataaaaaatatagatcacaacatttggacaatttttctaatcaaattggtaaacattataaaaaagttatgtatactcaatatgaagatgaatcatttactaaacataccgttaatccaaatatgaaagaagatggtatattaggtccaattattagagctcaagttagagatactcttaaaattgtttttaaaaacatggctagtagaccatattctatttatccacatggagtaactttctctccatatgaagacgaagttaatagtagttttacatctggacgaaataatacaatgataagagctgttcaaccaggagaaacatatacttacaaatggaacattttagaatttgatgaaccaactgaaaatgatgcacaatgtttaacgagaccatattatagtgatgtcgatataatgagagacattgcaagtggtttaattggtttacttttaatctgtaaatcaagatctttagacagaagaggaattcaaagagcagctgatattgaacaacaagctgttttcgctgtatttgatgaaaataagagttggtatttagaagataatattaataaattttgtgaaaatcctgatgaagttaaaagagacgaccctaaattctatgaatctaatattatgtctacaattaatggatatgttcctgaaagtataacaactttgggattttgttttgacgatactgtacaatggcatttctgtagtgttggaacacaaaatgaaatcttgacaatacattttacgggtcatagttttatttatggaaaaagacatgaagatacacttactttatttccaatgagaggtgaatctgtaacagtaacaatggataatgttggaacttggatgttaacatcaatgaacagttctcctaggagtaaaaaattaagacttaaattcagagatgttaaatgtattccagatgatgatgaggattcttatgaaatcttcgaaccaccagaatcaactgttatggctacaagaaaaatgcatgatagattagaaccagaagatgaggaaagtgatgctgattatgattatcaaaatagattagcagcagcattgggtattagatcatttagaaattcttctcttaatcaagaagaagaagaatttaatttaacagcattagcattagaaaatggtactgaatttgtatcttctaatacagatattattgttggatctaattattcatcaccaagtaatattagtaaatttacagtaaataatttagcagaacctcagaaagctccatctcatcaacaagctacaacagcaggaagtccacttcgtcatttaattggaaaaaattctgtattaaattcatctaccgcagaacatagctctccatattcagaagatcctatagaagatccattacaaccagatgttactggaattagacttctttcacttggagcaggagaatttaaatctcaagaacatgcaaaacataaaggaccaaaggttgaaagagatcaagctgctaaacaccgtttctcttggatgaaattattagctcataaagtaggtagacatcttagtcaagatacaggatctccaagcggaatgagaccatgggaagatttaccatcacaagatactggaagtccatcacgtatgagaccatggaaagatccaccatctgatttgctattattaaagcaaagtaattcatctaaaattctagttggtagatggcatttagcaagtgaaaaaggatcatatgagattatccaagacacagatgaagatacagctgttaataattggcttatttcaccacaaaatgctagtagagcttggggagaatcgactccacttgcaaacaaacctggaaaacaaagtggacatccaaaattcccaagagttagacataaatctcttcaagttcgtcaagatggaggaaaatctaggttaaaaaaatcgcaatttttaatcaaaactaggaaaaaaaaaaaagaaaaacatactcatcatgctccattatcaccacgaacatttcatcctttaagaagtgaggcttataatacattttcagaacgaagattaaaacatagtcttgttcttcacaaatcaaatgaaacttctctccctacagatcttaatcaaacactaccatctatggattttggatggattgcatcattaccagatcataatcaaaattcatctaatgatactggtcaagcttcttgtccaccagggttatatcaaactgttccaccagaagaacattatcaaactttcccaattcaagatccagatcaaatgcatagtacttcagatccttcacatcgaagtagtagtccagagctaagtgaaatgttagaatatgaccgtagtcataagtcattccctacagatatttctcaaatgagtccttcaagtgaacatgaggtttggcaaacagtcattagtccagatttatcacaagttactttatctccagaattatcacaaactaatctatcaccagatttatctcatacaactttgagtccagaacttattcaaagaaatttatctcctgccttaggtcaaatgccaattagtccagatttaagtcatactacgctttcaccagatttatcacatactactttgtcattagatctttcacaaactaatttaagtcctgaattatcacaaacaaatttaagtccagcacttggacaaatgccattaagtcctgatttatcacatactacactatccttagacttctcacaaacaaacttgtcaccagaattatctcatatgacactttcaccagaactatcacaaactaatctttcaccagctttaggacaaatgccaatttctccagatctttcacatacgactcttagtttagacttttctcaaaccaatttatcaccagaactttcacaaactaatttgtcacctgcattaggacaaatgccattatcaccagatccttcacataccactctttcacttgatttatcacaaactaatttatcaccagaattaagtcaaacaaatctttcaccagatctttcagaaatgccattattcgcagatttatctcaaattcctttaactccagatttagatcaaatgacacttagtccagatttaggagaaactgatttatctccaaatttcggacaaatgtcactttctccagacctttcacaagttacattgtctccagatatatctgatacaacattattacctgatttgtctcaaatttctcctccaccagatttagatcaaattttttatccatcagaatcttctcaatcattacttttacaagaatttaatgaaagtttcccatatccagatttaggacaaatgccatctccaagtagtccaactcttaatgatacctttttatctaaggaattcaatcctttagttatcgtaggattatcaaaagatggaactgattatattgaaattatcccaaaagaagaggttcaatcatcggaagatgattacgcagaaattgattatgtaccatatgatgatccatacaaaactgatgttagaactaacattaattcatcaagagatccagataatattgctgcatggtatttaagatcaaataatggaaatagaagaaattactacattgctgctgaagaaattagttgggactatagtgaatttgttcaaagagaaacagatatagaagattcagacgatattcctgaagatactacatataaaaaagtagtttttagaaaatatcttgattcgacattcacgaaaagagatcctagaggagaatatgaagaacatcttggaattttaggtccaattattagagcagaagttgatgatgttattcaagttagatttaaaaatttagcttcaaggccatatagtttacatgctcatggactttcatatgaaaaatcatctgaaggaaaaacatacgaagatgattctccagaatggtttaaagaagacaatgctgttcagccaaattcaagttatacttatgtttggcatgcaactgaaagaagtggaccagaatctccaggaagtgcttgtagagcttgggcatattacagtgcagtcaatccagaaaaagatattcattcaggattgatcggaccacttcttatatgtcaaaagggaattttacataaagattcaaatatgccaatggatatgagagaatttgttttactttttatgacttttgatgaaaagaaaagttggtattatgaaaaaaagagcagatctagttggagattaacatcaagtgaaatgaaaaaatctcacgaattccatgctattaatggaatgatttattctttaccaggtcttaaaatgtatgaacaagaatgggttagattacacttgttaaatataggaggaagtcaagatattcatgtagttcattttcatggacaaactttattagaaaacggtaataaacaacatcaattaggagtctggccacttcttccaggatcttttaaaacattagaaatgaaagctagtaaaccaggatggtggctattaaatacggaagttggagaaaatcaaagggcaggtatgcaaactccattccttattatggatagagattgtagaatgcctatgggactttctacaggtattatttcagattctcaaattaaagcttcagaatttttaggttattgggaaccaagattagctagattaaataatgggggatcttataatgcatggtcagttgagaaattggctgcagaattcgcttctaaaccatggatacaagtcgatatgcaaaaagaagttataataactggaattcaaacacaaggagctaaacattatcttaaaagttgttatactacagaattctatgttgcttattcttcaaatcaaattaattggcaaatttttaaaggaaactctacaagaaatgttatgtattttaatggaaattcagacgcaagtacaattaaagaaaatcaatttgatccaccaatcgtagctaggtacattagaatctctccaacaagagcttataatcgtccaacattaagattagaacttcaaggatgtgaagttaacggatgttcaaccccattaggaatggaaaatggtaaaattgaaaataaacaaattacagcatcatcttttaaaaaatcatggtggggagattattgggagccattccgtgctaggttaaatgcacaaggaagggtaaatgcttggcaagctaaagcaaataataacaaacaatggcttgaaattgatttacttaaaattaaaaaaattactgcaataattacacaaggttgcaagtcactttcatctgaaatgtatgttaaatcttatactatacattatagtgagcaaggtgttgaatggaaaccatatagacttaaatcttctatggtcgataaaatattcgaaggaaatacaaatactaaaggtcatgttaaaaatttctttaatcctccaattatttcacgattcattcgagttattccaaaaacatggaatcaatcaattgctcttagattagagttatttgggtgtgatatttat

SEQ ID NO: 9139 - DNA, 6672 bp, synthetic construct
  misc_feature 1..6672: note = source = /note="Description of Artificial Sequence: Synthetic coding sequence"
  source 1..6672: mol_type = other DNA
atgtttcccggatgtccccgactgtgggtgctcgtcgttttaggcacgagttgggttggctggggcagccagggtacggaggctgcacagttgcggcagttttacgttgcagcgcaggggatcagctggtcatatcgacctgagccaacaaattctagcctgaatcttagtgtgacatcatttaaaaaaatcgtgtaccgagaatacgagccttactttaagaaggaaaaaccccagagcaccatcagtggtctcctgggacctactctgtatgctgaggtaggtgacatcataaaagtacattttaaaaataaggctgacaagcccctcagtatccatccccaggggattcgctatagcaaactgtccgagggggcctcttatttggatcataccttcccagctgaaaaaatggatgacgcagtcgctcctggccgagagtacacatacgagtggtccataagcgaggattcaggccctactcatgatgatcctccgtgtctgacccacatatactacagtcacgaaaatctgatcgaagactttaatagcggactcattggaccactcctgatctgtaaaaagggtacacttactgagggcggaacccagaagacgttcgataagcagatcgtgctgcttttcgccgtgtttgatgagtctaagtcttggtcccagagttcaagtctgatgtacactgtcaatggatacgtaaatgggaccatgcctgacatcacagtgtgtgcacacgaccacattagttggcatctcctaggaatgtcttccggcccagagctgttttcaattcacttcaatggacaggtcctggaacagaaccaccacaaggtgtccgctattactctggtatccgctacttccacaacggcaaatatgacggtgggacccgagggcaagtggatcatctcttcactgacgcctaaacacttacaagcaggcatgcaggcttatatcgacatcaagaactgtcctaaaaaaacccggaacctgaaaaagatcacccgagagcagagaaggcatatgaagagatgggagtactttatcgctgccgaagaggtcatttgggattatgccccagtcatccccgcaaacatggataagaaatatcgatcccagcacctggacaacttctcgaatcagattgggaaacattataagaaagtgatgtacacccaatacgaggatgagagcttcaccaaacatacagttaatccaaatatgaaagaggacggcatcctcggtccaattattagagcccaagtgagggataccctcaaaatagttttcaaaaacatggcttcccgtccttattccatttacccccacggcgtaaccttttccccctacgaggatgaagtcaactctagttttacctccggacggaacaacaccatgatcagggctgtccaacccggcgagacatacacgtacaaatggaacatattggagtttgacgaacccacagaaaatgatgctcagtgcctaacccgaccatactattctgacgtggacattatgcgagatattgcctccggcctgattggcctgttgcttatctgcaagtccaggagccttgacaggcgaggcatacagcgcgccgccgacatagagcagcaggcggtgttcgctgtttttgatgaaaacaagagctggtatctggaagataatattaacaaattctgcgagaaccctgatgaagtaaaaagagacgaccccaaattttatgagtctaacatcatgtccactattaacgggtacgtgcccgaatcgataaccacactggggttttgttttgatgacactgtacagtggcacttttgctctgtgggaacacagaatgaaatcttaactatacacttcactggacattcatttatctacggaaaacgccacgaagatacgttgacgctttttcccatgcgcggcgaatcagtcactgtgaccatggacaacgtgggcacctggatgttaacgagcatgaattctagccctaggagtaaaaaacttcggctaaagtttcgcgacgttaagtgtattccagacgatgatgaagattcttatgaaatatttgagccacctgagtctacagttatggccacgagaaaaatgcacgacaggctggagccggaagatgaagaaagcgatgcagattacgattaccaaaatcggctagccgcggccctgggcatcaggagctttcgaaattctagcctgaatcaggaggaggaagaatttaacttgacagcactggctctggaaaatggcacagaattcgtctccagcaatactgatatcattgtgggctcaaactattcctctcctagcaatatctccaaatttaccgtaaataatctagcggagccgcagaaggcaccttctcatcagcaggccacaacagccggttcacctctccgccatctcattgggaagaatagtgttctcaactcctctactgccgagcactcctccccctactctgaggacccgatcgaggatcccctgcagcctgatgtaactggtataagattgctctctctaggggccggagagttcaaaagccaggaacatgccaagcacaagggccctaaggtggagcgtgatcaggcagctaagcaccgattcagctggatgaagcttctggcccacaaggttggcaggcatctgtcacaggataccgggtccccctctggaatgcgtccctgggaggatctcccatcacaagacaccggtagccccagcagaatgagaccatggaaggatccgccctcggacctgttattacttaaacagagcaactcaagcaagatactggtggggagatggcatctggcgtcagagaagggctcatatgaaatcatacaggacacagatgaagacactgctgtgaataactggctgattagtccccagaacgcgtcccgggcctggggcgagagcacgccactggcgaataagcctggaaaacagtctgggcaccctaaattccctagggtgcgccacaagagcctccaagtgcggcaggacggtgggaagagtcgcttgaaaaagtcccagttcctgattaagacgcgaaaaaaaaagaaagagaaacatacacaccatgccccactgagcccacgcacgttccatccgctccgctctgaggcatacaatacattttccgagaggaggcttaagcatagtctggtgctgcacaaatccaacgagacttcactccctacagacctaaaccagaccctgcccagtatggacttcggatggatcgcctccctccctgaccacaaccagaactcatccaacgacactggacaggcctcctgtccaccaggattataccagactgttcctccagaagagcactaccagacctttccaatccaggatccagaccagatgcattccacaagtgacccctcacatcgaagctcctcccctgaacttagcgaaatgttggagtatgacaggtctcacaagagctttcctaccgatatttcccagatgtccccttcctccgagcatgaggtgtggcaaacagtgatcagtccggacctgtcccaagtcacgctgtcgcccgagcttagccaaactaatctgagtcccgatttgtctcacacaaccctgagccctgagctcatccagcgaaatctgtctccggctttggggcagatgcctatatctcccgacctttctcatacgacgttaagtcctgacctatcacatacaacccttagcctggatctcagtcagactaatctctctcctgagctgagtcaaactaatctgtcacctgccctggggcagatgcccctatccccagatctgtcacataccacactgtctcttgacttctctcagacaaatttatcccctgaattatcccatatgaccctctcgcccgagcttagtcagactaacctttcccccgccctgggccaaatgcccatttcaccggatctgagtcacaccactctgtccctcgatttctctcagaccaacctctctcctgaactttcccagacaaatttgtcccccgctcttggtcagatgccactcagccccgatccgagccacacgactttgtcattggatctgtctcagacaaacctgtccccagaattgagccagacaaatctgagtcctgatctgtctgagatgcccctctttgccgatctctcacagatccctctgactccagatctagatcagatgaccctgtctccagatctcggagagacagacctttcgccaaactttggccagatgagcctctccccggacctgagtcaggttactctgtctccggatatttccgacacaactctcctccctgacctatcccagatctcccccccacccgacctggatcagatcttttaccctagcgaatcttctcaatccctccttctgcaggagtttaatgaaagcttcccttaccccgacctcggccagatgccatccccgtcatctccaacactgaacgacacgtttctttccaaggagttcaaccctcttgtcatcgtgggactaagcaaggacggaacggattacatcgaaatcatccctaaagaggaggttcagtcttcagaggacgattacgccgagatcgactacgtgccctatgacgacccttacaagacagatgtaagaacaaacatcaattcctccagggatcctgacaatatcgctgcctggtacttgagatcaaacaacggcaatcgcaggaattactacattgctgccgaggaaatttcttgggactactcagagttcgtgcagcgagagaccgacatcgaagacagtgatgacatcccggaagatacaacttataagaaagtagtgttcaggaaatatctggactcaacctttactaaacgcgacccccgaggggagtatgaagagcatctcggcattctcgggcctatcattcgcgctgaagttgatgatgtgatccaggtacgttttaagaacctggctagccggccttactcgttgcatgcccacggactttcttatgaaaagtcctctgaggggaagacatatgaagatgacagcccagagtggtttaaagaagacaacgctgtgcagcctaatagctcctatacctacgtgtggcacgctacagagcgaagtggcccggagtctcctggatcagcgtgtcgcgcatgggcatattactcagccgtgaaccccgagaaagacatacattctggcttgatcggtcccctgctcatttgccagaagggcatcctgcacaaagattcaaacatgccaatggacatgagggagtttgtcctgcttttcatgacattcgatgagaaaaaaagctggtattatgagaagaagtcccggtcctcttggcgacttactagcagcgaaatgaagaagtcccatgagtttcacgcaatcaacggaatgatttactctttgccgggtcttaaaatgtatgaacaggagtgggtcagactgcatctgctcaatattggaggatctcaggacattcacgtggtccacttccatggtcagactcttctggagaacggcaacaagcagcatcagctcggcgtgtggcccctgctgccaggctcattcaaaacactggagatgaaagcaagcaaacccgggtggtggctgttgaataccgaggtgggggagaaccaacgggcgggaatgcaaacaccctttctgatcatggacagagactgtagaatgccaatgggtctctccaccggaatcattagcgatagccagatcaaagcctctgagttcctcggttactgggagcctagactcgcaaggcttaacaatggcggctcctacaacgcatggagcgtggagaaactggcagctgaattcgcctccaaaccatggatccaagtggatatgcagaaagaggtgatcatcaccggtattcagacccagggggcgaaacattacctcaagagctgctatactaccgaattctacgtggcctattcgagtaaccagataaactggcagatctttaagggaaacagcacgcgaaacgtgatgtactttaatggcaattcagatgcttctaccattaaagagaaccagttcgatcctcctattgtcgcaagatacattcgtattagtcccactcgcgcgtacaataggcccacgctacgcctcgagttgcagggttgcgaggtcaatgggtgcagtactccacttgggatggagaacgggaagatcgaaaacaagcaaataacagcaagcagtttcaagaagtcttggtggggtgattattgggagccattcagggcaagactgaacgcccagggtagggttaacgcctggcaggcgaaagccaacaataacaagcagtggctcgagatagatctgttgaaaatcaagaaaatcacagccattattacacagggatgtaagtccctatctagtgaaatgtacgtaaaatcttatacgatacactactccgagcagggcgttgagtggaagccttatcgcttgaagtcttctatggtggacaaaatcttcgaggggaacactaacaccaaaggacatgtgaagaacttcttcaacccaccaatcatctctcgcttcattcgcgttattcctaagacttggaatcagtcaattgctttgagactggagctcttcggctgcgacatttac

SEQ ID NO: 9140 - DNA, 6672 bp, synthetic construct
  misc_feature 1..6672: note = source = /note="Description of Artificial Sequence: Synthetic coding sequence"
  source 1..6672: mol_type = other DNA
atgtttccaggatgtcccaggctatgggtgctcgtggtgctgggtaccagttgggtggggtggggttcacagggcacggaggccgcccagctgcgacagttctacgtcgctgcccagggcatctcgtggagctacaggcctgaaccaaccaattcaagccttaatttatctgtgacctccttcaagaagattgtgtatcgggaatatgagccttactttaagaaggagaagcctcaaagcacaatctccggcctgctgggccccacactgtatgccgaagtcggcgacattattaaggtgcattttaaaaataaggcggacaagcccctgtctattcacccacaggggattcgttattctaagctgtcagagggagcctcatacctggaccatacgtttccagccgagaaaatggacgatgcagtcgccccagggcgtgagtacacctatgaatggagcatctcggaggattcagggcctacgcatgatgatcccccctgcctgacccatatttactattctcatgagaacctgatcgaggattttaatagtgggctaattggtcctcttctcatctgcaagaaaggcaccttgactgagggagggacacagaagactttcgataagcaaatcgtccttttgtttgccgtctttgatgagagtaaatcatggagccagtccagtagcctgatgtatacggtcaatggatacgtgaacggcaccatgccagatatcaccgtgtgcgctcacgaccatatatcttggcatctgctgggcatgtcctcagggcctgagcttttttcaatccactttaatggccaagtgctggaacagaaccaccataaagtttctgcaataaccctcgtcagcgccacctctaccaccgctaatatgacagtgggccccgaaggcaagtggataatctccagtctgactcctaagcatctgcaagccggaatgcaggcctacattgacataaagaattgtccaaaaaaaacccggaacctgaagaagattacacgagaacaaaggaggcatatgaagaggtgggagtattttattgcagcagaggaggttatctgggattatgccccagtcataccagctaacatggacaagaagtaccgctcgcagcaccttgataactttagtaaccaaattggcaaacactacaagaaggttatgtatacacagtacgaggatgagagtttcacaaagcacacggtcaaccctaacatgaaggaggacggcatactcgggccaatcatccgggcacaggtgcgggataccctgaagatcgtattcaagaacatggcctctagaccttactctatctatccgcacggcgtaacattctctccgtacgaagatgaagtcaatagttctttcactagcggacgtaacaacaccatgatcagggctgttcagccaggagaaacatatacctataaatggaacatcctggaattcgacgaaccaactgagaacgacgcacagtgcctgacccggccctactacagcgatgtggacattatgcgagacattgcctccggcctgattggtttgttgctgatctgcaaaagccggagtctggaccgccgcggtatccaacgggctgctgatatagaacaacaggcagtatttgcagtgttcgatgagaacaaatcctggtaccttgaagataatattaacaaattctgcgaaaatcctgatgaggtcaagcgggatgatcccaaattctatgaatccaatatcatgtccacaatcaacggctacgtgcctgagtccataaccacactcggattctgtttcgacgatactgttcagtggcacttctgctcagtgggcacccaaaatgaaattcttacaatccattttactggccattcatttatctacggcaagcggcatgaggacacacttactctgtttcccatgaggggcgaatcagtaacagtcacgatggacaacgtaggcacctggatgttgacctctatgaattcatcccctcgaagcaagaagctgcgcctgaagtttcgcgacgttaagtgtattcctgatgacgacgaagattcgtacgagattttcgaaccccctgagtcgaccgtaatggctactcgaaagatgcacgaccggctagaaccagaggacgaggaaagtgacgccgattacgattatcagaatcgcctagcggcagctctaggaattcggtccttccgtaacagtagcctgaatcaggaagaggaggagtttaacctaacagccctggctctcgaaaatgggaccgagtttgtgtccagtaatactgatatcattgtcggcagtaattactcctcacctagtaacatttcaaaatttaccgtcaataacttggctgagcctcaaaaagccccatctcaccagcaggccaccactgccggcagtcctctacgccaccttatcgggaagaactccgtgttgaactcgtctacggcggaacactcttccccctatagcgaagaccctattgaagatcctttacaacctgacgttaccggcattcggctcctgagcctcggcgcgggcgagtttaaatctcaggaacacgccaagcataaaggacccaaagtcgaaagagaccaggctgcgaagcatcgctttagttggatgaagctcctggcccacaaagtgggccggcatcttagccaggacacaggaagcccctctgggatgcggccatgggaggatctgccctctcaggacacaggctccccatccaggatgcggccatggaaagatcccccaagcgatctgctcctactgaaacaaagtaatagcagtaagatactcgttggtagatggcacctggcctcagaaaaaggttcctatgagattatccaggataccgacgaagatacagcagtgaataactggctgatttctcctcagaacgcgtcccgagcctggggagagagtactcctttagccaataaaccagggaaacagagtggacatcccaagttccccagagtccggcacaaatccctacaggtacggcaggacggtggaaagagtagattgaaaaagagccagttcctgattaagacacggaagaagaagaaagagaagcacacacaccatgccccgttgtcaccccgaactttccatcctcttagatctgaagcttacaacacattctctgagcgcaggctgaagcacagcttagtgctgcataagagtaatgagacttccctgccaactgatttgaatcagaccctaccatctatggactttggctggatcgcaagcctcccagaccacaatcaaaattcctctaatgacaccgggcaggcgagctgtccgccaggcctgtatcagactgtaccgccggaagaacactatcagacctttccgatacaggacccagaccaaatgcattctacaagcgatcccagtcaccgaagcagtagccccgaactgtctgagatgttggagtacgaccggagccacaagtctttccccaccgatattagccaaatgtctccatcatcagaacatgaagtctggcagactgtgatttccccagacctatcccaagtgacattgagcccggagctttcacagactaatctttctcctgacctgagccacacgaccctaagccctgaactgatacagaggaacctaagccctgctctcggacaaatgccaatttcccctgaccttagccacacgactctgtcccccgacctctcgcataccactctgtctttagatctgagtcagacaaacctgtcaccagagttatcacagaccaacctttcaccagcactcggccagatgcccttatcacctgacctgagtcacaccactctaagcttagatttctcccaaacgaatctgtcgcccgaactcagccacatgactttgtctccagaattaagccaaactaatcttagccctgcactcggccaaatgcccatctcccctgacctttcccatacaactttgagtctggatttttcccagaccaacctgtctccagagctatcccagaccaacttgtcgcccgcgcttgggcaaatgcccctaagccctgatccctcccacacaaccctctccctggacctctctcagactaaccttagcccagagctcagccaaaccaatctcagtcccgacctttcggagatgcccctcttcgcagatctctcccagattcccctcactcccgaccttgaccagatgaccctgtcaccggacttgggtgagactgacctctctccaaactttgggcagatgtctctgtcccccgatctgtctcaggttactctgtcccccgacatctccgacacaacactgctgccggatctgtcacagatttcgcctcccccagatctcgatcaaattttctaccctagcgagtctagccagtctctgctgctgcaggagtttaatgagagtttcccataccctgacctgggacagatgccctccccttcgtctcccacactgaacgatacatttctctctaaggaatttaacccgctcgtgatagtaggtctgtctaaggatggtacggattacatagagattatcccaaaagaggaggtccagagtagcgaagatgactatgccgagattgattatgtgccttatgacgacccttataagacagacgtgcggacgaacataaacagtagccgggatcctgacaatattgccgcctggtatctccggtccaataatggaaaccgacgcaactattatatcgccgcagaggaaatcagttgggactatagcgagtttgtacagcgcgagacggatattgaagattcggatgacatcccggaggataccacctataagaaggtagtctttcgtaaatacctcgactctacttttactaaacgggatcccagaggcgagtacgaagaacacctgggcatactggggccaatcattcgagccgaagtagacgacgtgattcaagtgaggtttaaaaacctggcctctcgaccatactccctgcatgcacatggtctgagctacgaaaagtcctccgagggaaagacctatgaagatgactcaccagaatggtttaaggaagacaacgccgtgcagccaaattctagctatacctatgtatggcatgccacggaacgctccgggcccgagagccccggctctgcttgccgtgcttgggcgtattacagcgctgtgaacccagaaaaggatatccactcaggcctgattggaccccttctgatttgccagaagggaatcctgcacaaggacagcaacatgcccatggacatgcgcgaatttgttctactctttatgacgtttgacgagaagaaaagctggtattacgagaagaagtcccgctcttcatggagactcacatcatcagagatgaaaaaatcccacgagtttcacgctattaatggtatgatttatagccttcctggcctcaagatgtacgaacaagagtgggtacgtctgcatctccttaacatcggcggcagccaggatatacacgtggttcactttcatgggcagacgctcctggaaaatgggaataagcagcatcagctgggcgtttggccactgctgcccggcagttttaagaccttggaaatgaaagcttctaaaccgggctggtggttgctgaacacagaggtgggagaaaatcagcgagctggcatgcagactccttttttaattatggatagagattgtcggatgcccatggggctgagtacgggaattataagcgatagccaaattaaggcctcagagttcctcggatactgggaaccgaggctggcccggctaaataatgggggttcctacaatgcctggtcagtggaaaagctggccgcagagtttgctagcaagccctggatccaagtggatatgcagaaggaagtaattattacaggaatacagacccagggagcaaagcattatctcaagtcatgctacacaacggagttttatgtcgcctatagctctaatcaaatcaattggcagatcttcaagggcaactctacccgcaacgtcatgtactttaatggaaacagcgacgcctcaactatcaaggagaaccagttcgatccacccatcgtggcccggtatatccgtatcagccccacgcgggcctataaccgacctactctacgactggagctgcagggttgtgaggtgaacggatgcagcacaccattggggatggagaatggaaagatcgaaaataagcaaataacagcaagctcctttaagaaaagttggtggggcgattattgggagcccttcagggcacggttgaacgcgcaaggcagggttaacgcttggcaggcaaaagcgaataacaacaagcaatggttagagatagatcttctaaaaatcaagaagattactgccataataacgcaggggtgcaagagtctgagtagtgaaatgtacgtgaaatcctatactatccactatagtgagcagggagttgaatggaagccataccgcttaaagtcatcgatggtggacaaaattttcgagggaaacactaataccaagggacatgttaaaaacttctttaaccccccgattatttcgagattcatccgcgtgattccaaaaacttggaaccagtctatcgcgctgagactggaactgtttggctgcgacatctat

SEQ ID NO: 9141 - DNA, 6672 bp, synthetic construct
  misc_feature 1..6672: note = source = /note="Description of Artificial Sequence: Synthetic coding sequence"
  source 1..6672: mol_type = other DNA
atgtttcccggttgtccacgcctgtgggttctcgtagttctgggcaccagctgggtcgggtggggaagccagggtaccgaggccgcacagttaagacagttctatgtggcagcacagggcattagttggtcctatcgcccagagccaaccaattccagtctgaacctctccgttacatcttttaaaaaaatagtttacagggaatacgagccctacttcaagaaagagaagccacaatcaactataagcggcctgttaggacccacactatacgccgaggtaggcgacatcataaaagtccactttaagaataaggctgacaaaccactaagcattcatcctcaagggatacgatattcaaagctcagcgagggcgcctcttaccttgatcacacatttcccgcagagaaaatggatgatgccgtggcacccggcagggaatacacctatgaatggagtatcagcgaagatagtggcccaacccatgacgatcccccatgcctgacccacatctattactctcatgaaaacctaattgaagatttcaattctggcctgattggacctctgctgatttgtaagaaaggcactctcactgaaggaggcacccagaaaacctttgataagcagattgtgttactgtttgccgtgttcgacgagtcaaagagctggtcacagagctcatcattaatgtacacagtgaatggctatgtgaacgggaccatgcctgacatcacagtctgtgcacatgatcatatatcttggcatctgctgggcatgtcctcaggccccgagctgttcagcatccacttcaatggccaggtcctagaacagaatcaccataaggtaagcgcaataactctagtttctgctacaagtactacagccaacatgaccgtcggtcccgaggggaagtggatcatctccagtctgacccctaagcatctgcaggccggaatgcaggcatatattgacataaagaattgtccaaaaaaaaccaggaatttaaagaagatcacacgtgaacaacggcggcatatgaagcggtgggagtatttcatcgcagccgaagaagtgatctgggactatgcacctgtgatcccagccaacatggacaaaaagtatagaagccagcaccttgataactttagcaatcagataggcaaacactacaagaaggtgatgtatactcagtacgaagacgagagttttactaagcacactgtgaatcccaatatgaaggaggatggaatcctgggacctataatccgggcccaggttcgggataccttgaaaatagtgtttaagaatatggcctcccgcccctattctatctatcctcacggcgtgacattctccccttacgaggatgaggtgaatagcagtttcacttctgggcgaaataacacaatgataagagccgtgcagcctggtgagacatacacatataagtggaacattttagagttcgacgagcccaccgaaaacgatgcccaatgtttaaccaggccttattattcagacgtcgatattatgagagatatcgctagcggcctgatcggactcctgcttatttgtaaaagtcgctctctggatcggcgtgggatccagcgggctgctgatattgagcagcaagccgtttttgctgtttttgacgaaaacaaatcctggtacctggaggacaacattaataaattctgtgagaacccagatgaagtaaagcgagacgaccccaagttttacgagagtaatataatgagcacaataaacggctatgtgccagaaagcattacaacactcggcttttgtttcgatgacacagtccagtggcatttttgcagtgttgggacccagaatgagattctcacaattcactttacaggccacagcttcatatacgggaaaagacatgaggacaccctcaccctcttccctatgaggggggagagcgttaccgtaactatggataacgtaggcacctggatgttaacaagcatgaacagctccccacggagcaagaagctgagattaaagttcagggacgttaagtgcattcccgatgacgacgaggattcttacgaaatttttgaaccccctgaatcaaccgttatggcaacacgcaagatgcatgatcgccttgagcctgaggacgaggagtctgatgccgattacgattatcagaatcgactggctgccgccctgggcatcagatcttttaggaactcttccttaaatcaggaggaagaagagtttaacctgaccgcactggccctcgaaaatggcaccgagttcgtgtctagtaataccgacataattgttggatccaattattcctctcccagtaacatctctaagttcacagttaacaatctggccgagccccaaaaggccccaagccaccagcaggcaactaccgcaggtagtcctctgaggcatctcattggcaaaaatagtgtgttaaattcctccactgccgagcattccagtccttactccgaagaccctatagaggatccactgcaacctgatgttacaggtataaggttactgagcctaggcgctggcgagttcaaaagccaagagcacgcaaaacacaaaggccctaaggtcgagagagaccaagcagccaaacatagattctcctggatgaagctgctggcccacaaagtggggaggcatctaagtcaggacacaggctcccctagcggtatgcggccatgggaggatctccccagccaggacaccgggagcccttcaagaatgcggccctggaaggacccaccctccgacctactattgctaaagcagagtaacagcagcaagatactggtgggcaggtggcacctcgccagtgaaaagggcagctacgagataattcaggatacagacgaggacaccgccgtgaacaattggctgattagccctcagaatgcctcccgcgcttggggggaaagtactcctctcgccaacaaaccaggaaaacagtccggacacccaaagttccccagggtgcgacataagtccctgcaggttcgacaggatggcggtaagtctcgtctgaagaagagccaattcttgatcaagacaagaaaaaagaagaaggagaaacatacacaccatgcccccctttcaccacgaacattccaccccctacgctccgaagcctataacacctttagcgagcggcgcctgaagcattccctcgtcctccacaagtccaacgagacatccctccctactgatctcaaccagaccctaccgtctatggacttcgggtggatcgcctccttacctgaccacaaccagaattctagcaacgacaccggccaagcctcttgcccaccaggtctgtaccagactgtgccccctgaagaacattatcagaccttccctatccaagaccctgaccagatgcactctacatcagatcccagccaccggagctcttccccagagctatccgaaatgctggagtatgatcgatctcataaatcatttcccaccgatatcagccagatgtcaccctctagcgaacacgaggtctggcagaccgtgattagtcctgatctgagtcaggttaccttgtcccccgagctgagtcagacaaatctgtcccccgatctgtcccacaccaccctctcccctgaattgatccaaaggaacctgtcccctgccctgggacagatgcctataagcccggacctcagtcacacaaccctgagtcctgatctgtctcataccactctgtctctggatctctcccaaaccaatctgagcccagagctcagccaaaccaacctgtctcctgcactaggccagatgccactgagtccagacctttcccacaccaccctatccctggatttttcacagactaacctgtcacccgaactgagtcatatgaccctatctcccgaactctctcaaacaaacctcagccccgccctcggacaaatgcctataagcccagatctctcccataccacactgagtctggacttcagccagacaaatctctctccagaactgagtcagacaaatctatcacctgcactaggacaaatgcctctgagcccagatccatcacatactactctgtctctggacctctctcaaacaaacctgagccctgagttaagtcaaactaatctgagtcctgacctcagtgaaatgcccctgttcgcagacttaagccaaatccctctgacacccgacctggaccagatgacactgtctccagatctaggcgaaactgacctgtcccccaactttggccaaatgagtctgtctccagacctgagtcaagtgacattatccccagacatctctgatacaactcttctcccagatctgtcccaaattagcccccctcccgacctcgaccagatattttaccctagcgagtcctcccagtctttactattacaggaattcaacgagtcatttccttatcccgacctcgggcagatgccttctccatcctccccaaccctcaatgatacattcctgtccaaggaattcaaccctttggtaattgtgggtctgagcaaggacggtaccgactacattgagatcataccaaaggaggaagtacagagttctgaggacgactatgccgagattgactatgttccctatgacgacccatacaaaaccgacgtacgcacaaacattaattcctcccgcgaccccgacaatatcgccgcctggtatttgaggagtaataatggaaaccggaggaattactacatcgccgctgaggagatttcctgggactacagtgagttcgtgcaacgcgagactgatatcgaggacagcgacgacatcccagaggatacaacatacaaaaaagtggtctttcgaaagtatctggacagtacatttacaaaacgcgatcctcgaggggaatatgaagaacacctgggcatactgggcccaataatccgggctgaagtggacgacgttatccaggttcgattcaagaacctggcatcacggccctacagtctgcatgcacatggtctgagctatgaaaaaagttctgaaggaaagacttacgaggacgatagcccagagtggtttaaagaagataatgccgtgcaacctaactcttcttatacctatgtgtggcatgccactgaacgttcaggacctgagagtcccggctcagcatgccgcgcatgggcatactattccgccgtgaatccagaaaaggacatacacagtgggctaatcggccctttactaatatgccagaaagggatcctgcataaagattctaacatgcctatggacatgcgagagttcgtgttactctttatgaccttcgacgagaagaagagttggtactacgagaaaaagagtaggtcatcttggcgactgaccagctccgaaatgaaaaagtctcatgagtttcatgccataaatggcatgatctattctctgcctggtctaaaaatgtatgagcaggaatgggtgcggctgcatctcctgaacatcgggggtagtcaggatatacatgtggtgcactttcacgggcagactttactggagaacggcaacaagcagcaccagctgggagtgtggccactcctaccaggatccttcaaaacactggagatgaaggcatcaaagccagggtggtggcttctgaacaccgaagtcggcgagaatcagagggctggtatgcagacccctttcttaatcatggaccgcgactgtagaatgccaatgggtttatcaaccggtattatctccgatagccagataaaggcaagtgaatttctgggctactgggaaccacgactagcaagactaaacaatggagggtcatacaacgcatggtccgtcgagaaactagctgctgaattcgcctctaaaccttggattcaggtggacatgcaaaaggaggtgattatcactggcatacagactcagggggctaaacattacctgaagagttgttataccacagaattctacgtggcctactccagtaaccaaattaactggcagatctttaagggcaacagcactagaaatgtcatgtacttcaacggcaacagtgatgcatcaacaatcaaggaaaaccaattcgaccccccaatcgtcgctagatacatacggatttccccaaccagagcttacaacagaccaaccttaaggctagaactgcagggatgcgaagttaatgggtgctcaactcccctgggcatggaaaacggcaaaattgagaacaaacaaatcaccgctagctcattcaagaagtcttggtggggagactattgggagccttttcgtgcccggctaaatgcacagggcagagtgaacgcttggcaggctaaggccaataataataagcagtggctggagattgatctgctgaaaataaagaaaatcaccgccatcataactcaagggtgtaaaagcctgagtagcgagatgtatgtcaagagttataccatacactactccgaacagggcgtggagtggaagccttaccgtctaaaaagttctatggttgataaaatttttgaaggtaatacaaatacaaaaggccatgtgaaaaatttcttcaaccctcctataatctctcgatttattcgagtgatccccaaaacctggaaccaaagtatagcactacgcctcgaactgtttggctgcgatatttat

SEQ ID NO: 9142 - DNA, 6672 bp, synthetic construct
  misc_feature 1..6672: note = source = /note="Description of Artificial Sequence: Synthetic coding sequence"
  source 1..6672: mol_type = other DNA
atgttcccaggatgcccacgtctgtgggtgctcgtagtgctggggaccagctgggtggggtggggatctcagggcacggaagcagcccagctccgtcagttttacgttgcggcccaggggatatcttggtcatatcgtcccgagcccacaaactctagccttaacctgtcagtgaccagcttcaagaagatcgtgtatcgggagtacgaaccatacttcaaaaaagagaagccacagtccaccatcagcggattgcttggacccacgttgtacgctgaggtgggcgatattatcaaagtgcattttaagaacaaagctgataagcctctgtctatccacccccagggcatccgctacagtaagttatccgaaggagcctcgtatttagaccatacctttccagccgagaagatggatgacgcagttgcgccaggacgcgagtacacatacgagtggtctatttcagaggatagcggcccaacccacgacgaccccccctgtcttactcacatctactactcccatgaaaacttgatagaagattttaattcgggcctcattggtccacttctgatctgtaagaagggcactttaactgagggcgggacccagaagacatttgacaagcaaatagttctactattcgctgtattcgatgagagtaaatcttggagccagagctcctcgctcatgtatacagtgaacggctatgtcaatgggacaatgccggatatcactgtttgtgctcacgaccacatctcatggcatttgctgggaatgagctctggcccagaactgttttctattcactttaacgggcaggtgctggagcagaatcaccataaggtgagcgcaatcacgcttgtcagtgctacctccactaccgctaacatgacagtggggcccgagggcaaatggattattagctcccttaccccaaagcatctgcaggctggtatgcaagcatatatagatataaaaaactgcccaaagaagactcgtaacttaaagaagattaccagagagcagcgacggcatatgaagcgctgggagtactttatcgccgccgaagaggtcatctgggactatgctccagtgatccccgctaatatggacaaaaagtatcgttcacagcatctggataatttcagtaatcagatcggcaagcactataagaaagtgatgtatactcagtacgaggacgaatctttcacaaaacacacagtcaaccctaatatgaaagaagacggaatactgggaccaattatccgagcacaggtgagggacaccctcaaaatagtgttcaagaatatggcatccaggccctactctatctacccccatggtgtcacattttccccctatgaagacgaggtcaactccagtttcaccagcggccgaaacaatacaatgattcgggccgtccagccgggcgagacttacacctataagtggaacattctcgagttcgatgagcccaccgagaacgatgctcagtgccttacgcgaccttactactctgacgtggatataatgagggacatcgcctccggcttgattggcctgctcctcatctgcaaaagcaggagtctggatcgccgggggatacagcgcgcagcagatatcgagcaacaggccgtctttgccgtctttgacgagaataaatcctggtacctggaagacaacattaacaaattttgtgagaatcctgatgaagttaaacgtgacgatcctaagttctatgagtcaaatatcatgtccacgattaacggatatgttccggaatctattaccactctggggttctgcttcgatgatacagtgcagtggcatttctgttcggtagggacccagaacgaaatcctcacaatccactttaccgggcactccttcatttacggcaagcggcacgaggacacccttacattatttccgatgcgcggcgagagcgtgactgtgactatggacaatgtgggcacttggatgctgacgagcatgaactcttcccctcgatccaagaagttaagactgaagtttcgagatgttaaatgcatacctgacgatgatgaggactcctatgagattttcgaacccccggagagcaccgtgatggcaacgcgtaagatgcacgatcgcttggaaccagaggacgaggaatccgatgctgactatgattaccagaatcggctcgctgcagccctcggaatacgaagtttccggaactcatcattgaatcaggaggaggaagaatttaacctgaccgccctggcactggaaaacggcaccgagtttgtcagctctaataccgacatcatcgtgggatcgaattactcaagcccatcaaacattagtaagtttaccgtcaataacctcgccgagccgcagaaggctccgtcacatcagcaagccacaacagcgggcagccccctgaggcacctgatcggcaagaactcagtgctcaattctagcacagctgaacatagttctccatactccgaggatccaatcgaggacccactgcaaccggatgttacaggcatcaggctgctgtccctgggcgccggcgagtttaaaagccaggagcacgccaagcacaaagggccaaaggttgaaagggaccaggccgccaaacaccgcttctcatggatgaagctccttgctcataaagtgggacggcatctctctcaggacaccggcagcccaagtgggatgagaccatgggaagatttaccgagccaggatacgggcagtcccagtcgtatgcggccgtggaaagaccctcctagcgaccttttgctgcttaaacagtcaaacagcagcaagattctggtcggtcgctggcacttagcttctgaaaagggaagctacgaaattattcaggacaccgacgaggacaccgcagttaacaattggctaattagtccacagaacgccagcagggcctggggcgaaagcacccccctggcaaataagcctgggaaacagtccggtcatcctaagttccccagagtgaggcacaaatccctgcaggttcgccaagacggcggcaagagcaggctcaagaagagccagttcctgatcaagactcgaaagaagaagaaggagaagcacacccatcacgctccactgtccccgaggaccttccatcctcttaggtccgaagcatataatacctttagcgagaggcggctcaaacactccctggttctacacaagtcgaacgaaacaagcctcccaaccgacttaaatcagacccttccatctatggacttcggatggattgctagcttgcctgatcacaaccagaacagttccaatgacacgggccaggccagttgcccccctggcctttaccagacagtgccccccgaagaacattaccaaactttcccgatacaagacccggaccagatgcactccacgtctgacccctctcacaggtcatccagcccagagcttagcgagatgctagagtacgatagatcacacaagtccttcccgaccgatatttcacagatgtctcctagctccgagcacgaagtctggcagacagtcatctcaccagacttatcccaagtaacactaagccccgaactgagtcagacaaatcttagtcctgatctcagtcatacgaccctgagtccagagctgatccagcgaaacctatcacccgccctgggccagatgcctattagtcccgatttgtctcacaccacactgtctccagacttgtctcacacaactctctccctggacctaagtcaaaccaatctatcacctgaactttctcagacaaatctgtcgccagctctggggcagatgcccttatcacctgatttgagtcataccacattgagtttagattttagccagaccaacctgagtccagagctgagccacatgactctgtctcccgagcttagccagaccaatctgtcaccagccctgggccagatgcccatcagtcccgacttaagccacacaaccctgtcacttgatttctcacaaaccaacctttcccctgagctgagccagacaaatctctcgccagccctgggtcaaatgcccctcagccccgacccgtcacataccactctgagcctcgacctctctcaaaccaatctctctccagagctctcccagaccaatctgagtcccgacctgagcgagatgcccctgttcgcagacctatctcagattccacttaccccggacctggaccagatgactctctctccagacttgggagaaacggatctgagccctaatttcggccagatgtctctctcccccgatctctcccaggtaacactatcgccggacatcagcgacaccaccttgttaccagatcttagtcagatatctcctccacctgacctggatcagatcttctaccccagcgaaagttctcagagcctcctgttgcaggagttcaatgagtccttcccttacccagacctagggcagatgccatccccgagctcccctaccctgaatgatacgttcctcagcaaagagttcaatcctttggtaattgtggggctctcaaaggatggcacagactatattgagataattcccaaggaggaagttcagtcgagcgaggacgattatgcagaaatcgattacgttccatatgatgacccgtacaagacggatgtccggaccaatattaactccagccgggacccagataatatcgctgcctggtacctccggtccaacaacggaaaccggcgcaactactatatagccgccgaagagattagctgggattatagtgagttcgtccagcgggaaacagacattgaggacagcgatgacatccccgaggatacaacctacaagaaggttgtttttcgcaagtaccttgactctacgttcaccaaacgcgaccccagaggcgagtatgaagagcacctgggcatcttggggcctatcatcagggctgaggttgatgacgttatacaggtgcggttcaaaaatctcgcctcccgaccgtactccctccacgcccacggactgtcttacgaaaaaagctctgaaggaaaaacctacgaggatgacagtccagagtggttcaaagaagataatgccgtccagcctaactcaagctacacctacgtatggcacgcaaccgagcgcagtggaccagagtcaccaggatcagcatgccgagcttgggcgtattatagcgctgtgaatccggagaaagatatccactctgggttgatcgggccactgctgatctgccagaaagggatactacataaggattctaatatgcccatggacatgcgcgaatttgttctcctctttatgacattcgacgagaagaagtcttggtactacgagaaaaaaagtcgcagttcatggagacttacatcttctgaaatgaagaaatctcacgaatttcacgctatcaacggtatgatatatagtttgcctggcctaaagatgtacgaacaggagtgggtccggttgcaccttttgaacatcgggggaagccaggacatacacgtggtccactttcacggacagaccttattagagaatggaaacaaacagcaccagctgggggtgtggcctctgctcccgggttcctttaagacgttggagatgaaagcatcaaagcccgggtggtggctactaaacaccgaagtcggggagaaccagagagccggcatgcagacaccttttttaattatggaccgcgattgcaggatgccgatggggctgagcactggaataataagtgactcccagattaaggcttctgaatttcttggatattgggaaccccgactcgcgcgcctgaacaatggcggcagctacaacgcgtggtcagtcgagaagctggccgccgagtttgctagcaaaccctggattcaggttgacatgcaaaaggaggttatcatcacagggattcaaacccagggtgctaagcattaccttaagtcatgttatactacagagttctacgtggcttatagtagcaaccagatcaactggcagatctttaagggtaactcaactcgcaacgtgatgtactttaacggcaacagcgatgcctcaactattaaagaaaatcagtttgacccccctatcgtcgcaaggtacattagaatctcgcctacgagggcatataatcggccaactctgaggcttgagctgcagggctgtgaggtaaatgggtgttctactccgctgggcatggaaaacggtaaaatagagaacaagcagatcacagcttcatccttcaagaagagttggtggggagactattgggagccatttcgggctcgccttaacgcacaagggagggtcaatgcctggcaagctaaggctaataataacaagcaatggcttgagattgacctgctcaagatcaagaagatcacagcaattatcacccaagggtgtaagagcctgtcatcagagatgtatgtcaaaagctataccatacattactctgagcagggggtagaatggaagccttacaggttgaaatcttctatggtcgacaagatctttgagggcaacacgaatacaaaggggcacgtgaaaaattttttcaatcctcctatcatttcaagatttatccgggtgattcccaaaacctggaaccagagcatcgccctgcgtttagaactgtttggatgcgatatttat

SEQ ID NO: 9143 - DNA, 6672 bp, synthetic construct
  misc_feature 1..6672: note = source = /note="Description of Artificial Sequence: Synthetic coding sequence"
  source 1..6672: mol_type = other DNA
atgttccctggatgtcctcggctctgggtattggtggttcttggaaccagctgggtaggttggggctcccagggtactgaggccgcccaactgcgccagttttacgtagccgcacagggaatttcatggtcataccgaccagagccaaccaattcgtccctcaatctcagcgtcacctctttcaaaaagattgtctatcgggaatatgagccgtactttaagaaggaaaaaccacagtccacaatttcaggactgctgggtccaacgctttacgcggaggttggtgacattattaaggtccattttaagaacaaagccgataaaccactttctattcacccgcaaggtattagatatagcaaacttagcgaaggagcttcttatttggatcatacgttccccgccgaaaagatggatgatgcagtagctcctggaagagagtacacatatgaatggtccatcagtgaagattcgggaccgacccatgatgatccaccatgccttacacacatatattacagtcatgagaatctcattgaggattttaactctggtcttatcgggcctctcctcatttgtaagaaaggaactttgacagaaggaggaactcaaaagacgtttgataaacaaatcgttcttctattcgctgtttttgatgagtcgaaatcttggagtcaaagttcctcgctaatgtacacagtgaacggatacgtaaatggtaccatgccagatattaccgtatgtgcccacgatcatatttcttggcatctcctaggtatgagctccggaccagaacttttcagcatccactttaatggacaagtactggaacagaaccatcataaggtatcagcaatcactctcgtgagtgctacctctacgacagctaatatgactgtcggaccagaaggaaaatggataatttcatctcttaccccaaagcatttgcaggctgggatgcaggcttatattgatataaaaaactgtccaaaaaaaacaagaaacctaaaaaagattacaagagagcaacgcagacatatgaaaagatgggaatattttatcgcagctgaggaagttatttgggattatgcgccagttattcctgctaatatggataagaaatatagaagtcaacatttagataacttttcgaatcagataggaaaacattataaaaaggtgatgtatacacagtacgaagacgaatcgtttacaaaacacacagtcaatcctaatatgaaggaagatggaatcctcggacccatcattagggcccaagtaagagacacactgaaaattgtttttaagaatatggcatctagaccgtatagtatttatccacatggggtcactttctcaccttacgaggatgaggtaaattcgtcctttacatctggacgaaacaacacaatgattagggcggtccaaccgggagaaacctatacatataagtggaatatattggaatttgatgaaccgactgagaatgatgcacagtgcttgacaagaccttattattctgacgtggacattatgagagacatagccagtgggctaataggtcttcttttgatttgtaaatctcgttcacttgatagaagaggcattcaacgggccgccgatatagaacaacaggccgtattcgcagtttttgatgaaaacaaatcatggtaccttgaggataacatcaacaaattttgtgaaaatccggatgaagtcaaacgcgatgatcctaagttttatgaatcaaatataatgtccactatcaacggatatgttccagaatcaataacaaccttgggattttgttttgatgatacggttcaatggcacttttgttcagtaggcacgcaaaatgaaattctaaccatccatttcacaggacatagcttcatatatggaaaacggcacgaggacactttgactttgtttccgatgcgaggggaatctgttaccgtcacaatggataatgtaggaacctggatgttgactagtatgaatagctccccgaggtcaaaaaagctacgcttgaagtttcgtgatgtgaagtgcattccggatgacgatgaagatagttatgaaattttcgaacctccagaatcgacagttatggcaactcgaaaaatgcacgatagacttgagccagaagatgaagaatcagatgcggattatgattatcaaaatcggcttgccgctgcactcggaatccgatctttcaggaactcttctctcaatcaagaagaagaagaattcaatttgactgctttggcgttggaaaatggaactgaatttgtcagttccaacacggatattatcgttgggtcgaactattcctcgccgagtaacatatccaaatttacggttaacaacttggcagaaccccaaaaggcaccatcacaccaacaagctacgaccgcaggctcaccgctacgacatctgatcggaaagaatagtgtgctaaattcttccaccgccgagcattcgtctccctattccgaagaccctatagaggacccactgcaaccagatgtgacaggaatccgtctgctatcattgggagcaggtgagtttaaatctcaggagcatgctaagcataaaggacccaaggtcgaacgtgaccaggctgccaaacatagattttcatggatgaagcttcttgcccacaaagtaggacgacatctgagtcaggatactggcagcccgtccggtatgcgcccatgggaagacctcccaagtcaagatacaggatctccgtcacggatgaggccatggaaagacccaccttcagaccttctgttgctaaaacaatctaacagctccaaaatattggtcggaaggtggcatcttgcgagcgaaaaaggctcctacgaaattatccaagacactgacgaggacactgctgtcaacaattggctgatctcaccacaaaatgcgtcccgcgcatggggagagagcacaccattagcaaataaaccaggaaaacagtctggacatccaaaatttccgcgtgtgcgacacaagtcacttcaagttagacaagacggaggcaagtcgagactcaaaaaatcgcaattcttgattaaaacccgtaagaaaaaaaaagagaaacacacacatcatgctccgctctctccaagaacctttcatccattgagaagtgaggcctataatactttcagcgaacgacgactcaagcattctttggtgttgcataagagcaatgaaacttcgctgccaacggatcttaatcaaactctgccttcgatggattttggatggattgcatctcttcctgatcacaatcagaattcatctaacgacaccggccaagcatcctgcccacccggtttgtatcagactgtgccaccagaggagcattaccaaaccttccctatccaagaccctgatcaaatgcactcaacatcagatccttctcatcgtagttctagcccagagttgtcagaaatgctggaatatgacagatctcacaagagctttccgaccgatattagtcaaatgtcgccatcttccgagcatgaagtatggcaaactgtgatctcgccagaccttagtcaggtgacattgagtcctgaattgtctcagacaaatttgtcccctgatctttcacacacaactttgagtccagagttgatacagcgaaatctgtcaccagcacttggacagatgccgatatcaccagatctcagtcatacaacgctctcaccagacttatctcacactactctttcactcgacctgtcacaaacaaacctatcacctgagttaagtcaaactaatctctcgcctgcattaggacagatgccactgtctccagatttgtcccatacaacactctccttggacttctcacaaacaaacctctctcccgagctgtcacacatgactcttagcccagagctttcccagactaatcttagcccagcgctgggacaaatgccaatttctcccgatctatcgcacactacactttccctggatttttcacagacaaatctaagtccggagctgtcgcagacaaacctaagtccggcccttggacaaatgccgttatcccccgacccatctcatacaacattgtcgcttgatttaagtcagacaaatttgtcgccggagctctcccagacaaatctgagtcccgatttgtcggaaatgccactgttcgcagatttgtcacaaattcctttaactccagacctcgatcaaatgaccttatcaccagatcttggagaaacagatctctctccgaattttggacagatgtccttatcacctgacctttcccaagtgacacttagtccagatatatccgacactactctattgccagatctatcccaaatttcaccacctcctgatttagatcaaattttctacccctctgagtcatcacaaagtttgttacttcaagaattcaatgaatcgttcccatatccagatctcggacagatgccatcaccatcgtcgccaaccttgaacgatacttttctgtctaaagagtttaatccattggtgatcgtcggactgtcaaaagatggaaccgactacatagagattattccaaaggaggaagtgcaaagtagtgaagatgattacgctgagatcgactacgtaccatatgacgatccctataagacggacgtacgaacgaacataaattcaagtagagatcccgataatattgcggcttggtatcttagatcgaataatggtaatcgcagaaactactacattgctgcggaggagatctcctgggattatagcgaattcgtgcaaagggaaactgacatagaggattctgatgatattccagaagatactacttataaaaaagttgtatttcgtaagtatttagactctactttcaccaaacgtgatccacgtggagagtatgaagaacatctcggaatacttggtccaatcattagagcagaagtagatgatgttattcaggtgcgttttaagaatcttgcaagcagaccgtactcgctccatgctcatggtttgtcttatgaaaagtcttcggaaggaaaaacttatgaagatgactctccagagtggtttaaggaggataatgctgttcaaccaaattctagttacacgtatgtttggcatgccaccgagagatcaggaccggagtctccaggaagtgcctgtcgggcttgggcttactattccgctgtaaacccagaaaaggacatccatagtggactcatcggtccgttgcttatatgccaaaaagggattcttcacaaggattccaatatgccaatggacatgagagagttcgtactcctatttatgacgttcgatgaaaaaaagtcgtggtattatgagaagaaatccagatcatcttggcgactaacatcgtccgaaatgaaaaagagccatgaattccacgctatcaacggtatgatatattcacttccaggattgaaaatgtacgaacaagaatgggtacgactacatttactgaacattggtggaagccaagatattcacgttgtccatttccacggtcaaacgttgttggaaaacggtaacaagcaacatcaacttggagtctggccgcttctccctggatcatttaaaacactcgagatgaaagcttctaagccgggctggtggttgttgaatactgaagtgggagaaaaccaacgagcgggtatgcagactccgtttttaataatggatagagattgtcgtatgccaatgggactttcgactggaatcatatccgacagtcaaattaaggcctccgaatttctcggatactgggagccgcggttggcacgtcttaataacggaggatcgtacaatgcatggtcagtcgagaaactcgcggcagaatttgcatcaaaaccatggatacaggtggatatgcaaaaggaagtaattattaccggaattcaaactcaaggagctaagcactatctcaaatcttgctacacaactgagttctacgttgcatatagctctaaccaaatcaactggcaaattttcaagggaaatagcacaagaaacgtcatgtatttcaacggcaactcggatgctagtacaattaaggaaaatcagttcgatccacccatcgtagcacgctatattcgtatctcaccaactcgcgcttacaaccgaccgacgctgcgtttggaattgcaaggatgtgaagttaacgggtgttcaacgcctttgggaatggagaatggtaagattgaaaataaacaaattaccgcctcatcttttaagaagtcgtggtggggagattactgggaacctttcagggcccgtttgaacgcacaaggtcgagtaaatgcttggcaagctaaagctaataacaacaagcaatggcttgaaattgatttgctcaagattaaaaagattactgctatcatcactcaaggatgcaaaagtttgagttctgagatgtacgtgaaatcatacactattcattattctgaacaaggggttgagtggaagccttaccgtcttaaaagttcaatggtcgataaaatatttgaaggaaataccaatacaaagggacatgtcaaaaatttttttaaccccccaattatctcgcgatttattagagtaattccaaagacatggaatcaatcaattgccttgcgacttgaactttttggatgtgacatctat

SEQ ID NO: 9144 - DNA, 6672 bp, synthetic construct
  misc_feature 1..6672: note = source = /note="Description of Artificial Sequence: Synthetic coding sequence"
  source 1..6672: mol_type = other DNA
atgttcccagggtgccctaggctctgggtgctcgtcgttctgggtacaagttgggtcgggtggggctcacagggaacggaggccgcacaattgcgccagttttatgtcgcggcccagggaatcagctggagttacagacctgagcccaccaattccagtttgaatctttctgttaccagttttaagaagattgtgtatagggagtacgagccttactttaagaaggagaagcctcagagcactatctctggcctcttaggacctactctctatgccgaagttggcgacattataaaggtgcacttcaagaacaaggcagataagcctttaagcatccatccacagggcataagatacagcaagcttagcgaaggcgcatcctatctcgatcacaccttccctgcagaaaaaatggacgacgcagttgcaccggggagagagtacacctacgaatggagtatcagcgaggattctggccctacacacgatgacccaccttgtttgactcacatttattactcacatgagaacctgatagaggacttcaatagtggcctgataggtcctctgttgatttgcaagaaaggcaccctgactgaggggggaacccagaagacattcgacaaacagattgtgctgctttttgccgtgttcgacgaatctaagtcctggtcccagagttcgtcactaatgtataccgttaatggatatgtaaatggcactatgcccgatattacagtgtgtgcccacgatcatatctcctggcacctgctgggcatgtcatctgggccagaattgttctcaattcacttcaatgggcaggtgctcgaacagaatcatcataaggttagtgccataaccctggtctccgctacctcaactacagccaatatgactgttggtcctgagggaaagtggatcatctcttctttgaccccaaaacatctgcaggctgggatgcaagcttacatagatatcaagaattgcccgaaaaagacccgcaacctaaaaaaaattacgcgcgaacagcgcaggcacatgaagcggtgggagtactttatcgccgcagaagaagtgatctgggattatgctcccgtaattcccgcaaacatggacaagaaataccgctcgcagcacctggacaacttttccaatcaaataggcaaacattacaagaaggtgatgtatactcagtacgaggacgagtcgttcacaaaacacaccgtcaacccaaatatgaaggaggatggaatcctagggcccattattcgcgctcaggtcagagatacactgaaaatcgtgtttaagaatatggcgagtaggccatatagtatatacccccacggtgtgactttcagcccatacgaggatgaagtaaacagctcctttacaagcggtcggaataacaccatgattcgcgccgtgcagcccggcgagacgtacacctacaagtggaacatactggaatttgatgaacctacagagaacgacgctcaatgcctgaccagaccctactactccgatgtggacattatgagggatatcgccagcggcctgatcgggttgcttctgatctgtaagagccggagtctcgataggcgcggcattcagcgagccgcggacattgagcagcaggctgtattcgccgttttcgatgagaacaagtcatggtatctggaagacaatatcaataaattctgcgagaaccccgacgaggttaagagggacgatccgaagttctatgagtccaatatcatgagtacaataaatggatacgtcccagagtcaattacaactttgggattctgtttcgatgacaccgttcagtggcatttttgcagcgttggtactcagaacgaaattctcacaatccacttcacaggccactcctttatttacgggaaaagacacgaagatactctcaccctgtttccaatgcggggcgagtcagtgaccgtaacaatggacaatgtaggaacatggatgctcacttctatgaacagcagcccaagatcgaaaaagcttcggttgaaattccgcgatgtgaaatgcatccccgacgacgacgaagattcttacgaaatctttgaacctcccgagtctacagttatggcaacacggaaaatgcatgacagactggaaccggaggacgaagagtccgacgctgattatgattatcagaacagactggcggcagccctggggattagaagcttccgcaatagctcgttgaaccaggaggaagaggaattcaacctcactgcattagctctcgagaacggaaccgaatttgtgagcagcaacaccgatattattgtcgggtctaactacagctcaccctccaacatttcaaagtttaccgtcaataatcttgccgaaccacagaaggccccctcccaccagcaggcaaccacggctgggtcacccctccgccatcttattggtaaaaacagtgtactaaattcctctacggcggagcattcatccccctacagtgaagaccctatcgaagatcccttacagcccgatgtcacagggattcggctgctgtctctgggagctggagaattcaagagtcaagagcacgccaagcataagggccctaaggttgagcgggaccaagccgcaaagcacagatttagttggatgaagcttctggcccacaaggtgggccgccacctcagccaggacaccggaagccccagcggtatgaggccctgggaagatctaccttcacaggacaccggaagcccaagccgcatgcggccctggaaggatcccccatctgatctgctgctgttaaagcagagcaacagttccaaaatattggtgggaagatggcatctcgcctctgaaaagggaagttacgaaatcatccaggacacggacgaagatacggcagtaaataactggctgatcagcccacagaacgcatctcgagcttggggcgagagcacccctctggctaacaagccagggaagcagtctggacaccctaaatttccacgggtccggcataaatcactccaggtacgccaggacggagggaagtcaaggcttaaaaagagccagtttctgatcaagacccggaagaagaagaaggagaaacacacccatcacgctcccctatcccctaggacttttcatccactgcggtcagaggcatacaacacattttctgagagaaggctgaaacatagcttagtgctccacaaatccaatgagacatctctgcccactgatctaaaccagactctcccgagtatggattttggttggattgcctctcttcccgaccacaaccaaaactcatctaacgacaccgggcaggccagctgtcctcctggcctttaccagactgtccctcccgaagaacactaccaaacgttccccatccaagaccctgatcagatgcattctacctcagaccccagtcaccgctcctccagcccggagctctccgagatgcttgaatatgatcgctcccacaaatccttcccaaccgacatcagtcagatgtctccgagttccgaacatgaggtatggcagactgttatcagtccagacctgtcccaagtaaccctgtcaccggaactctcacaaactaacctgtccccagacctgagccacaccaccctgtcgcccgaactgattcagcgcaatttaagccccgcattgggccagatgccgattagcccggacctctcacacacaaccttgtccccagacctgagccacactaccctttcgctggatctttcgcagaccaacttgtctccggagctgtctcaaacaaatctgtcccccgctctggggcagatgccactgagtccggacctgagtcacactactctgagcctggatttttcgcaaaccaatctgtcccccgagctttcacatatgacccttagcccagagctaagccagactaacctttctcctgctttggggcagatgccgatctctcccgacctcagccacaccactctgtcccttgacttcagccagacgaatctctcacctgaacttagtcagaccaatctgagtccagcactgggacagatgccgctgagccctgacccctctcacactactctgagcctggatcttagccagacaaatctgtcccccgagttgtctcagactaatctgagtcctgatctgtccgaaatgcccctattcgctgacctgtcccaaataccactcacaccggatttagaccagatgaccctaagtcctgatctgggagaaaccgacctgagccctaatttcggccagatgtctttatcgcccgacctctctcaagtgaccctgtcaccagacattagtgacactacactcttaccagatctgagccaaataagccctcctcccgatctagatcagattttctatcctagtgaatcttcccagtccctcttgctgcaggaatttaacgagagcttcccataccccgacctcggacagatgcctagcccttcctctccgacactaaacgatacatttctcagtaaggagttcaatcctctggtcatcgttggactctcaaaagatggaactgattatattgagatcatccctaaggaggaagtccagtcatccgaggatgattacgctgaaattgactacgtcccttatgacgatccgtataagacggacgtgaggaccaatataaacagctccagggacccagataatatcgctgcatggtatctgcggtcgaacaacgggaatcgaagaaattattatatcgccgcggaggaaatatcatgggactacagtgaattcgtgcagcgcgagaccgatatcgaagattccgacgatatcccagaggatactacttataaaaaagtcgttttcaggaaatacctggattctacttttactaaaagagaccctcgcggtgaatatgaggaacacctgggcatcctcggccctatcatcagagctgaggtggatgacgttatccaggtgcgattcaagaatttagcctctagaccatacagcctgcatgcacacggtctctcctacgagaagtctagcgagggtaagacgtacgaagatgatagtccagaatggtttaaagaagacaacgctgttcagcccaattctagctatacctatgtatggcacgcgaccgaacgctctggccccgagtcaccgggaagcgcttgccgagcctgggcctattattcggcagttaatccagagaaggatatacattccgggctgataggtcctctgttgatctgtcaaaaaggcatcctgcacaaggatagcaatatgccaatggacatgcgggaattcgtgctgttattcatgacatttgatgagaagaagtcttggtactacgaaaaaaagtcccgctctagctggcggttgaccagtagcgaaatgaagaaatcccatgaatttcatgccatcaacggcatgatttacagtttacctggcctgaaaatgtacgaacaggagtgggtgagactgcatctgctgaatattggggggtcacaagacattcatgtagtacactttcacggacagacacttttggagaatgggaacaaacagcatcagctgggcgtgtggcccctgttgcccggcagcttcaaaactcttgagatgaaggcgtcaaagccggggtggtggctcctgaacaccgaggtaggggagaatcaaagagcggggatgcaaacacctttcttaatcatggatcgcgactgtaggatgcctatgggactcagcactggcatcatctccgattcccagatcaaagcgagtgagttcctggggtactgggagcccagattggcgaggctcaataacgggggatcctataatgcttggtctgtcgaaaagttggcagcagagttcgccagtaagccttggattcaggtggatatgcagaaagaggttattataacaggcatccagacacagggcgccaaacattatctcaagagctgctacacaactgagttttacgtggcgtattcatcaaaccagattaattggcagatctttaaaggcaatagtacacggaacgtgatgtacttcaacggcaactctgatgcaagcaccataaaagaaaaccagttcgatcctccaatcgttgctaggtacattcgcatcagtcctactcgggcttacaatagaccaacacttcgactggagcttcaagggtgcgaggtgaacggctgcagtactcctctgggcatggagaacggcaaaatcgagaacaaacagattactgcctcaagctttaaaaaatcctggtggggcgattactgggaacctttccgcgcacgactcaatgcacaaggccgcgtcaatgcatggcaggctaaggcgaataataataagcagtggctagaaattgacctgctaaaaattaagaaaatcacagctattataacgcagggatgtaaatcccttagcagtgagatgtacgtgaagagctacacgatacattatagtgaacagggggtcgaatggaaaccttacaggctgaagtcttccatggttgacaagatatttgaaggaaacacaaacactaagggacacgtgaagaactttttcaacccacctattatctcacgcttcatccgcgtcatcccaaagacatggaaccagagcatcgccttgaggcttgaactgttcggctgcgatatctac

SEQ ID NO: 9145 - DNA, 6672 bp, synthetic construct
  misc_feature 1..6672: note = source = /note="Description of Artificial Sequence: Synthetic coding sequence"
  source 1..6672: mol_type = other DNA
atgttccctggctgcccgaggctgtgggtgctggtggtcctgggaacctcgtgggtcggttgggggtcccaaggcaccgaggctgcacaactgcggcagttctatgtggcagcccaaggtatctcatggtcgtaccgcccggagccgaccaactcgtcgctcaatctgtcggtgacctcatttaaaaagatcgtttacagagaatacgagccgtacttcaagaaagaaaagcctcaatcaactatctccggattgctgggaccgactctgtacgccgaagtgggcgacatcatcaaggtgcattttaagaacaaggctgacaaaccgctgtcgatacacccgcagggcatccgatacagcaaactctcagagggtgcgtcatacttggatcacaccttcccggccgaaaagatggacgatgctgtggcgccgggcagggagtacacgtacgagtggtcgatcagcgaggactcgggcccaactcatgacgacccaccttgcctgactcacatctactacagccatgagaatctcattgaagatttcaatagcggcttgatcgggcccctgttgatctgcaagaaggggaccctgaccgagggaggaacccaaaagacctttgacaagcagattgtgttgctgttcgcagtgtttgacgaatccaaatcatggtcccagtcgtcgagcctcatgtatacggtcaatgggtacgtcaatggaaccatgccagacatcactgtctgcgcccacgaccacatcagctggcatttgctgggtatgtcgtccgggcccgaattgttctcgatccacttcaacggtcaggtgctggaacagaaccaccacaaagtctcggcgatcactctggtgagcgccacctcgaccactgctaatatgaccgtgggaccggaaggaaaatggatcatttccagcctgactcctaagcacctccaggcaggaatgcaggcctacatcgacatcaagaactgcccgaagaaaactcggaacctgaagaaaatcacccgcgaacagcgccgacacatgaagcgttgggaatacttcattgcagcagaggaagttatttgggactacgcaccggtcatcccggctaacatggacaagaagtacagatcccaacatctggacaacttcagcaaccagatcggtaagcattacaagaaggtgatgtacacccaatacgaagatgaatcattcaccaagcacactgtgaacccgaacatgaaggaggacggaatcctggggccaatcatcagggcacaggtgcgcgacaccctgaaaatcgtgttcaaaaacatggcttcacggccatactcgatctacccacacggggtcaccttctccccttatgaggacgaagtcaactcttcgttcacctcgggccgcaataatactatgattcgggccgtgcagcccggagaaacctatacgtacaaatggaatatcctggagttcgatgagccaactgaaaacgatgcacaatgcctcactagaccttactacagcgacgtcgacatcatgagagacatcgcctccggcctgatcgggttgctcctgatctgtaaatcgcgctccctggaccggcggggaatccagagggccgcggacattgaacagcaggccgtctttgccgtgttcgacgagaacaagtcatggtacctggaggacaatatcaacaagttctgtgagaaccccgatgaagttaagcgcgacgaccctaagttctacgagagcaatattatgtctacgatcaacggttacgtcccagaatcgataaccaccctgggattttgcttcgacgacactgtgcagtggcatttctgcagcgtgggaacccagaacgagatcctgactattcatttcaccggtcactcgttcatttacggaaagaggcatgaggataccctcactctcttccccatgagaggagaatcagtgaccgtgactatggacaatgtgggcacttggatgctgaccagcatgaatagcagcccacggtccaaaaagttgcggctgaaattccgggatgtgaaatgtatcccggacgatgacgaagattcgtacgagattttcgagcctccagaaagcactgtgatggcgactcggaagatgcatgaccggcttgaaccggaagatgaggaatcggacgccgactacgattaccaaaaccgccttgccgccgcgctcggaatccggtcgttccgcaactcctcactcaaccaggaagaagaagaattcaacctcacggcactggctcttgagaacggaactgaattcgtgtcctcaaataccgatatcatcgtcggctcgaactactcgtcgccatcgaacattagcaagttcaccgtgaacaacctggcagagccacagaaggccccctcgcaccagcaagcaaccaccgcgggatcaccactgagacatctgatcggaaagaatagcgtgctcaactcctcgaccgcggaacattcctccccgtactcagaagatccgatcgaagatccgctgcagccggatgttactggcatcagactgctgtcgctgggcgccggggaatttaagagccaggaacacgccaagcacaagggcccgaaggtggaacgcgaccaagcggcgaagcatcgcttctcatggatgaagctcctggcgcataaagtggggagacacctgtcacaggataccggatccccgtccggaatgcgtccttgggaggacctcccaagtcaggacactggatcgccctcgcgcatgcgaccgtggaaggacccaccctccgacctgctccttctgaagcagtccaattcatcgaaaatcctcgtgggaaggtggcacctggcttcagaaaaaggatcgtacgaaatcatccaggacacggacgaggacaccgccgtcaataattggctgatctccccacagaacgcctccagagcctggggtgagagcaccccgctcgcgaacaagcctggaaagcagtccggccacccaaaatttccgcgggtgagacacaagagcctgcaagtccggcaggatggcggcaaatctcgcctcaagaagtcacagttcctgattaagacccggaaaaagaagaaggagaagcacacccaccatgcccctctttcaccgcgaacttttcacccgctgcggagcgaggcctacaacactttctcggagagacggctgaaacactccctggtcttgcataaatccaacgaaaccagcctgcctaccgacctgaatcagaccttgccaagtatggactttgggtggatcgcttccctgcctgatcacaatcagaactcatcaaatgacactggccaagcctcctgcccgccaggcctttaccagaccgtccctccggaagagcactaccagaccttcccaatccaggacccggaccagatgcattccacttcggacccgtcacaccgcagctcgtccccagaactgagcgagatgctggaatacgaccgtagccataagtccttcccgacggacatctcacagatgtcaccgtccagcgaacacgaagtgtggcagaccgtcatctcgccagacctcagccaggtgactctttcccctgaactttcgcaaaccaacctctcgcccgatttgagccacacgactctcagccccgaactcatccaacgcaatctgtccccggctcttggacaaatgcctatctcaccagatctgtcgcacactactttgtccccggacctgtcccataccaccctctcgctggacctgtcgcaaactaatctcagccctgagctctcacagacgaacctgagccccgctctcgggcagatgcctctgtcacctgatctgagccatacgaccctttccctggatttcagtcagactaacctttctccggagctcagccatatgaccctcagtccagaactttcccagaccaatctcagtccggcgctgggccagatgccaatatcccccgatttgtcgcatactaccctctcccttgacttttctcaaacgaatctgtcaccagagctctcccagactaatctgagccctgctctgggacagatgcccttgagcccggatccttcacacactactctctcgttggatctgagtcagaccaacctttcaccggaactcagtcaaactaacctgtcccccgacctctctgagatgccactgttcgctgacctctcgcaaatccctctgactccagaccttgaccagatgaccttgtcaccggacctgggtgagactgacctgagtccaaactttggccagatgtccctttcgccggatctttcacaggtcaccctgtcgcctgacatcagcgatactactctgctgccagatttgtcacagatctccccgcctcctgacctggaccaaatcttctacccctccgaaagctcgcagagcctgctcctgcaagagtttaacgaatcgtttccgtacccggatctgggccaaatgccttcgccgagcagcccgaccctcaacgacactttcctgtcaaaggagtttaacccattggtcatcgtaggactctccaaggatggtaccgactacatcgagatcatccccaaagaggaagtgcaaagcagcgaagatgactacgcggagatagactacgtgccgtacgacgacccgtacaagacggatgtccgcaccaacatcaactcgagccgggatccggataatatcgcggcttggtacctgagatcaaacaacggcaaccgacgtaactattacatcgcagcggaggaaatcagctgggactattcggaattcgtgcagcgggagacggatattgaggattcggatgatatcccagaggataccacttataagaaggtcgtgttccgcaagtacctcgattcaactttcaccaagagggatccccgcggagagtacgaagaacacctgggaatccttggaccgattatccgggccgaggtggacgatgtcattcaagtgcgcttcaaaaacctcgcgtcgcggccgtactctcttcacgcccacggactcagttacgaaaagtcctccgaaggaaaaacgtacgaggacgactcgccggagtggtttaaggaagataacgccgtacagcctaattccagctacacctacgtgtggcacgccaccgaaaggtcggggccagaaagcccagggtcggcgtgccgcgcctgggcatactattccgctgttaatccggaaaaggacattcacagcggactcatcggccctctcttgatctgtcaaaagggaatcctccataaggactccaacatgccgatggatatgcgcgaattcgtcctcctgttcatgacctttgatgaaaagaaatcctggtactacgaaaagaagtcccgctcaagctggcgcctgacgtcgtcggaaatgaagaaatcccatgagttccacgcgatcaatggaatgatctactcgctcccaggacttaagatgtacgaacaagaatgggtgcgcctccacctgctgaacatcggaggaagccaagatatccatgtggtgcacttccacggacagaccctcctggagaatggtaataagcagcaccagttgggtgtgtggccgctcctcccgggcagcttcaagactctggagatgaaggcatccaaaccaggatggtggctgttgaatacggaggtgggagaaaaccagcgggccggaatgcaaactccgtttctgatcatggacagagactgcagaatgccaatgggactttcaactgggattatcagcgactcacaaatcaaagcatcagaattcctgggctactgggagccgagactggccaggctgaacaatggaggctcctataacgcctggtccgtcgagaagctcgctgctgagttcgcgtctaagccgtggatccaggtggatatgcaaaaagaggtgatcattaccggaattcaaactcagggagccaaacactacctgaaatcctgctacactactgagttctacgttgcctactcttcaaaccaaatcaattggcagatcttcaagggaaactcgactcgcaatgtgatgtattttaacggaaactccgatgcttccacgatcaaggagaaccaatttgatccgccgatcgtggccagatacatccgcatttcccccactcgggcctacaatcggcccaccctgcggctcgagctgcagggctgtgaggtcaacgggtgttctacccccctgggaatggaaaacggaaagatcgaaaataaacaaattactgcgagctcgttcaaaaaatcgtggtggggggactactgggaaccgttccgcgcacggctgaatgcccagggacgcgtgaacgcatggcaagccaaagcaaataacaacaagcagtggctcgaaatagatctcctgaagattaagaagatcactgcgatcatcacccaagggtgcaagtccctttcttccgaaatgtacgtcaagagctacaccatccattactcggaacaaggagtggagtggaagccgtacagactgaagtcgtctatggtggacaaaatcttcgaaggtaacactaacaccaagggccatgtgaagaactttttcaaccctccaatcatctcaaggttcatccgcgtgatcccaaagacttggaatcagtcgatcgcgctgagactggaactgtttggttgcgatatctac

SEQ ID NO: 9146 - DNA, 6672 bp, synthetic construct
  misc_feature 1..6672: note = source = /note="Description of Artificial Sequence: Synthetic coding sequence"
  source 1..6672: mol_type = other DNA
atgtttcctggatgtccgcgactttgggttctcgtggttttaggaacttcttgggtcggctgggggtcccagggaacagaagccgcccaactgcggcagttctatgttgccgcacagggaatatcctggagctatcgccctgagcctacgaattctagtctcaacctcagcgtgacctcctttaaaaaaatcgtgtaccgagagtatgagccctattttaagaaagaaaagccacaatcaacaattagcggtctcctgggccccacattatacgctgaggtcggggatattataaaagtgcattttaagaataaagcagacaagcccctctcaatccatcctcagggtattagatacagcaagctttcggagggcgcctcatatcttgaccatacgttccctgcagagaagatggatgacgccgttgcacctggaagggagtacacatatgaatggtcgatatctgaagacagcggtcccacacacgacgaccccccttgccttacccacatctactatagtcatgagaacctcatagaagacttcaacagtggccttatcgggcctttactgatttgtaaaaaaggcaccctcacagagggcgggactcagaagacttttgataaacagatcgttctgttattcgcagttttcgacgagtccaagagttggagtcagagtagtagtctgatgtatacagtcaacggctacgtgaacggcaccatgcccgacattacggtatgcgcacatgatcacatttcgtggcatctattgggtatgagtagcggccccgagcttttcagcattcacttcaatggacaggtcctggagcagaaccaccacaaggtttccgcaatcactctggttagtgccacctccaccacagcaaatatgacagtcggccctgaagggaagtggatcataagcagcttgacccctaaacacctgcaggccggtatgcaggcatacatcgacattaagaattgcccaaaaaaaacgcgcaacttgaagaaaattaccagggaacagaggcgacacatgaagcgatgggagtacttcatagccgccgaagaggtgatttgggactacgctcctgtgattccggccaacatggataaaaagtacaggtcccaacacttggacaactttagtaatcagattggaaagcactataagaaggtcatgtacacgcagtacgaagacgagtccttcacaaaacatactgtcaacccaaacatgaaggaagacggaattcttggtccaatcatcagagctcaggtgcgcgatacgctgaagattgtgtttaagaacatggcatcccgcccttacagtatctaccctcacggagtgaccttttctccttatgaggacgaggtgaattcctctttcacttcaggtagaaacaatactatgattcgcgcagtccaacccggcgaaacatacacctacaagtggaacatccttgaattcgatgagcctactgagaacgatgcccaatgcctgaccaggccttattatagtgatgtagacatcatgcgtgacatcgcttctggcttgattggactcttgcttatctgtaagagtagatcccttgacaggcgcggaatccagcgggctgccgatatagagcagcaagctgttttcgctgtttttgacgagaacaaatcgtggtatctggaggacaacatcaataagttctgtgagaaccccgatgaggtgaaacgcgatgaccccaagttctatgagagcaatatcatgtccactatcaatggctatgtgcctgagtcgataacgacattgggattttgtttcgatgacacagttcagtggcatttttgctctgtcggaacccaaaatgaaatccttacgattcacttcactggccattcattcatctacggcaagcggcacgaagacaccctaacactcttccccatgcgaggggaaagtgtaaccgtgacaatggataatgtaggtacctggatgttaacttccatgaatagctcacctcgtagcaagaagttacgcctgaagttcagagatgttaaatgcattcctgacgacgacgaggactcttatgaaatatttgagcctcccgagtctaccgtgatggccactagaaaaatgcatgatcgcctcgagcccgaggacgaagaatctgatgctgattatgattaccaaaaccgtttggccgccgcactcggtatccgctccttcagaaacagttctcttaaccaagaggaagaggaattcaatctaactgctctggcacttgaaaacggaaccgagtttgtgtcaagcaacaccgatatcatcgtaggaagcaattatagctccccgagcaatatatctaaattcacggtgaacaacctggcggagccacaaaaggctccatcccatcagcaagcaactacagcgggatcaccccttcggcacctgatcgggaaaaacagcgtgttaaactcatctacagccgagcatagcagtccatattctgaagacccaatcgaagatccgcttcagcccgatgtgaccggtatacgcctgcttagcctgggagcgggcgaattcaagtctcaggagcacgctaagcataaagggcccaaggtggaaagagaccaagctgccaaacaccgtttctcgtggatgaaacttttggcccacaaggtaggacggcacctaagccaagacaccggtagcccaagcgggatgaggccctgggaggatctcccttctcaggacaccgggtctccttctcggatgagaccctggaaggaccccccaagtgatctcctgttgttgaagcagtcaaactcctccaagatcctggtaggacggtggcaccttgccagtgagaaagggtcctatgaaattatccaggataccgatgaagacactgccgtgaacaactggctgatatccccacagaacgcctcaagagcctggggagaatctacccctctggcgaataagcccggcaagcagtccggtcaccctaagttcccgcgcgtgcgtcataaatccctgcaagttcgacaggacggggggaaaagtagactcaagaaatcacagttcctcatcaagacaagaaagaaaaagaaggagaaacatacccaccacgcgcctctgagcccacggacatttcatccgctgcggagcgaagcgtataacacattcagtgaacgccgcttgaagcatagtctagtgctgcacaagtccaacgagacttctctacctacagatcttaaccagacactacctagtatggattttggctggatcgcttcactcccagatcataatcagaacagctccaatgacactggccaggcctcctgtccacccggcctatatcagactgtcccacctgaagagcactatcagacattcccaatacaagaccctgaccagatgcattcaacttccgatccaagtcataggagttcctcccctgaattgtccgaaatgctggaatatgacagatcccacaaatccttccctacagacatttcccagatgagtccttcaagcgagcacgaggtgtggcagactgtgatctccccggacctctctcaagttacgctctcaccagagctgtctcaaactaacttgagcccagacctcagtcataccactctctcgcccgaattaatccaaaggaatctatcccctgcccttggtcagatgccgatttcccctgatctgagtcatacaacgctttctccagatctctcccacacaactttgagccttgatttgtctcagacaaacctctccccggagctttcacagactaatctatccccagctctgggccagatgcccctttccccggatctgagccacacgactctgtcactggattttagtcagacaaatctttcccctgagctgagccatatgactctgtcccccgaattgtctcagacgaacctctcccctgccctgggccagatgccaatcagtcccgaccttagtcacaccacactgtctctggatttctcacaaacaaatctgtcgccggagctctcccagactaacctgtcccccgcattagggcagatgcccttgtctcccgacccaagtcataccaccctctcccttgacttgagccaaaccaatttgagtccagaactgtcacaaacgaacctgagtcctgatctttcagaaatgcccctattcgccgacctgtctcagatccccctgacacccgacctcgatcaaatgaccttgtcccccgacctaggcgagaccgaccttagcccgaattttggtcagatgtccctgagtccggacttgtcacaagtcaccctctctcccgatatctcggacaccacactgcttcctgacctgagccagatctcccctccccctgacctggatcagatattctacccaagtgaatcttcccaatcactgctgctgcaggagtttaacgaaagcttcccctaccctgatcttggtcaaatgccaagtccgagctctccgaccctcaacgatacttttttaagcaaggaatttaacccgcttgtgattgttggcctgtctaaagatgggacagattatatcgagatcatccccaaagaggaagtgcaaagtagcgaagacgactacgcagagatcgactacgtgccatatgacgatccatacaaaacggacgtacggaccaacattaattcctccagagatcctgataacattgcagcatggtaccttaggagcaataatgggaataggcgaaattactacatcgcagccgaagaaattagctgggactattctgaatttgttcaacgtgagaccgacatcgaggactctgatgatattccagaggatacaacatacaagaaagtggtgttccgtaaatatctagactcaaccttcacgaagcgcgatccccgtggggagtacgaggagcatctcggtatcctggggccgatcataagggcagaggtggatgatgtgatccaggtccggttcaagaatctggcgagtcggccttattctcttcatgctcacggtttgagctatgagaaatcatctgaggggaagacctacgaagacgactccccagaatggtttaaggaggataatgccgtgcagcccaacagttcgtatacctacgtatggcatgccaccgaaagatctggcccggagagtccagggtctgcatgccgcgcctgggcttattactccgcagtcaatcccgaaaaggacatccactccgggctcattggaccactgcttatctgccagaaaggaatactgcataaggatagcaacatgcccatggacatgcgcgaattcgtacttctctttatgacttttgatgaaaagaagtcttggtattatgagaagaaaagccgtagcagttggagactgacaagctcggagatgaaaaaatcccacgagttccacgctattaacgggatgatttattctctgccgggactgaaaatgtatgaacaggagtgggtgagactacatctgctcaatatcggaggcagccaggacatccacgtggtgcattttcatggccaaactctgctcgagaacggcaataagcaacaccagctgggcgtctggcctctgttgccaggctcctttaagactctggagatgaaggcaagtaaaccgggctggtggcttcttaacaccgaggtcggcgagaaccagagggcagggatgcagacaccttttctgatcatggatagggactgcagaatgcctatgggcctctcgaccgggatcatcagcgacagtcagataaaagccagcgaatttcttgggtactgggaaccccggctggctaggctgaataacggaggcagttataacgcatggagcgtggaaaagttagctgcagagttcgcctccaagccctggatccaagttgacatgcaaaaagaggtgatcatcaccggaatccaaacacagggggccaagcactacctgaagtcatgctacactactgagttttatgtggcatacagtagcaatcagattaactggcagatattcaaaggaaatagcactcggaatgtgatgtactttaatggcaacagtgatgcgtccacaataaaggagaatcaattcgatccccctatcgtggcacgttacatcaggatctcccccaccagggcctacaatcgacctaccctgcgcttagaactccagggctgcgaggtgaacggctgctctaccccactaggaatggagaacgggaaaattgagaataaacagattaccgcttctagctttaagaagagctggtggggggactattgggagccattcagggccaggcttaacgcccagggtcgtgtcaatgcatggcaggccaaagctaataacaacaagcagtggttggagatcgacctgcttaagattaagaagataactgctattatcacacagggttgcaaaagcttgtccagcgagatgtatgttaagtcctacacaatccactactccgagcagggtgttgagtggaaaccttacaggctaaagagcagcatggtggataagatttttgaggggaacacaaatacaaagggacacgtcaagaactttttcaacccaccaattatctccagatttatacgcgtgatcccgaagacttggaatcagtcaattgcccttcgattggagctttttggatgtgacatctac

SEQ ID NO: 9147 - DNA, 6672 bp, synthetic construct
  misc_feature 1..6672: note = source = /note="Description of Artificial Sequence: Synthetic coding sequence"
  source 1..6672: mol_type = other DNA
atgtttccgggctgtccccgtttgtgggtgctagtcgttttgggcacctcatgggtggggtggggatcccaggggaccgaagctgcgcagcttcggcagttctacgtggctgctcaaggtatctcttggtcatatcgtcccgaacccactaactcctcactgaatctgtcagtgacttcgtttaaaaagatagtgtacagagagtacgaaccttactttaaaaaagagaagccacagtcgacaatttctggcctgctagggcccaccttgtatgcagaggtcggcgatattatcaaagtgcattttaaaaacaaggctgataaacccttgtccatccacccccaggggatacgctactcaaagttaagtgaaggagccagttatctggatcacaccttcccagccgagaaaatggacgatgccgtggcccctggccgggagtacacatacgagtggagtatttcggaagatagcggaccaacgcacgacgacccaccctgtcttacccacatttattattcgcacgaaaacctcattgaagacttcaattcaggattgatagggcctctgcttatatgtaaaaaagggacccttacagagggcgggacgcagaaaacttttgataaacaaatcgtgttactcttcgccgtcttcgacgaaagtaaatcctggtcacagtcctcctcactgatgtataccgttaacggctacgtaaacggaaccatgcccgacataaccgtctgtgcccacgatcatattagttggcacttactggggatgagttccggacccgagctgttttccatccatttcaatggacaagtgctggagcaaaaccaccataaagtttccgctatcactctcgtttccgctacctccaccactgctaatatgacggtgggccccgaggggaaatggatcatctcatctttaaccccgaaacatctgcaggctgggatgcaggcttacatcgatatcaaaaactgccccaagaagacccggaatttaaaaaaaataacgcgcgaacaacgtcgccacatgaaacggtgggagtacttcattgctgcagaggaagtgatctgggactacgcacctgtaattcctgccaatatggataagaagtataggagtcagcacctcgacaacttctccaaccaaattggcaagcactacaagaaggtcatgtacacacaatatgaagatgagagcttcacgaagcacaccgtgaaccccaatatgaaggaggatgggatcttagggcctataattcgagcccaggtccgtgacaccctgaaaattgtgttcaaaaacatggcctcccgaccctactcaatctacccacacggggtaaccttctccccttacgaagatgaagtgaactcgtcatttaccagtggaagaaataatactatgatcagagcggtacaaccaggcgagacctatacatataagtggaacattcttgagttcgatgagccgaccgagaacgacgcgcaatgtctcacccgcccatactactctgatgtcgatatcatgagagatatcgcttctggcctgatagggctgctattgatttgtaaaagccgctctctggacaggaggggcatccagcgtgcggccgacattgagcaacaggcagtctttgccgtgtttgacgagaacaagtcctggtatcttgaggataatatcaataagttctgtgagaatcccgacgaagtgaaaagggatgaccctaagttttatgaatcaaatatcatgtccacaatcaatggatacgtgcccgagtctatcactacactgggattctgttttgatgacactgttcaatggcacttctgctccgtggggacccagaatgagattttgacaatccactttaccggccatagtttcatctacggtaaacgccatgaggataccctgaccctatttccaatgcgcggagaatccgttaccgtcactatggacaacgtggggacttggatgcttacctcgatgaactctagtcctcggagtaagaaattaagactgaagttcagggacgtgaagtgtatcccagatgatgacgaagattcctacgaaattttcgagccgccagaatcaaccgttatggctactcgcaaaatgcatgataggttagaacccgaggacgaggaatcagatgctgactatgactatcagaaccggctcgctgcggctcttgggatacggtcatttaggaactcaagtctcaatcaagaagaggaagagttcaaccttacagctctggcgttggaaaacggcaccgagttcgtcagctctaacaccgacattatcgtgggatcaaattactcctctccttcgaatatttccaaattcaccgtgaataatttagctgagccccagaaggcaccatcccaccaacaggcgaccactgcaggaagccctctgcggcatttaatcgggaaaaatagcgttttgaacagctcaacagctgagcactcaagcccctacagcgaggaccctatagaggatccattacaacccgatgtgaccggcattaggctactttctctcggtgcgggtgaattcaaatcccaagagcatgccaagcataagggacctaaagtagaacgagaccaggccgctaaacatcggttctcatggatgaagctcctggctcacaaggtcggcagacacctctcccaggacaccggctctccgagtggcatgcggccctgggaggacctgcccagtcaagatactgggtcaccctcgaggatgaggccttggaaagaccccccatctgatctactcttactgaaacagtccaactcatccaagattctcgtgggccgctggcaccttgcctccgaaaaaggcagttacgagataatacaagacaccgatgaggataccgctgtcaataattggttgattagtccgcagaatgccagtcgtgcatggggcgagtccacgcctctggctaacaagcccgggaaacagagtggccacccaaagttccctcgcgtgcgacacaaaagcctccaggttaggcaggatggagggaaaagcagattaaaaaagtctcagttcctgattaagacccgcaaaaagaagaaggagaagcacacccaccacgctccacttagtccccgaacctttcaccccctgagaagtgaagcctataacaccttttcagagcggcggctcaaacactccctggtactccataaaagcaacgagacatctctgcccacagatttgaatcagacccttccctccatggatttcgggtggatagcatccctcccagatcataaccagaacagcagcaatgatactggccaggcctcgtgcccacctggtctttatcagactgtgccacccgaggaacactatcagacatttccgatccaggatccggatcagatgcattcaacctccgatccatcccacagaagttccagccccgaactgtccgagatgcttgagtacgatcgatcgcacaaaagtttccccacagacattagccagatgagtccgagcagcgagcacgaggtctggcagaccgtcatctccccagatctctcacaggttaccttatctccagaactcagccagacaaatttgagcccggatctctcacacactaccctgtctcctgagctgatccagcgcaacctctcaccggctctcggccaaatgcccatatcacctgatctgtctcacaccacactcagcccggatctgtctcatacaactctgtccttggatctgtcacaaaccaacctgagtcctgagctgtcccagactaatctgagccccgctcttggccaaatgcccctgtctcctgatcttagtcacacaactctttcacttgatttcagtcagactaatttgtcaccagaactttcacatatgactctgagccctgaactctcacagactaacttgagtccagcactcgggcagatgccaattagccccgacttatcacacacaacccttagtctggacttctcgcagactaacctgtcgcccgaactgagtcaaacgaatctgagtccggccctcgggcagatgcctttgagccctgatccttcccacacaaccctgagccttgacctgtcccagaccaatctgtcccccgagctgtctcagactaacctgagtccggaccttagcgaaatgcccctgttcgctgatttgtcccaaattcctctcacccctgatcttgatcagatgacgttaagtcccgacctgggggagaccgacctaagtccaaatttcggacagatgtccctttcacctgatttgtcacaggtgacactttcccccgatatctctgacactacgctgcttccagacctctctcagatcagtcctcccccagatcttgatcaaatattttacccctctgaatctagccagtccctactgcttcaagagtttaatgagagcttcccataccccgatttggggcagatgccttcccccagctctccaacactcaacgacacttttctttctaaggagttcaatccccttgtcattgtgggcctgagcaaagacggaaccgactatatagagatcatccctaaagaagaagtgcagagtagtgaagacgactatgccgagatcgattacgtaccttacgatgacccgtacaagactgatgtccgtaccaacataaatagctctagggatcccgacaacattgccgcctggtatctgcgtagcaacaatggaaatcgaagaaactattatatagccgctgaagagatatcttgggactactcggaatttgtgcagcgcgagaccgacattgaggactctgacgacatccctgaggacacgacctacaagaaggtcgtgttccgtaaatatcttgatagtaccttcactaaacgcgacccccgtggcgaatacgaggaacacctggggatcctggggccaatcataagggccgaggtggatgatgtgattcaagtgcgatttaagaacctggcgtcacggccatactctctgcacgctcatggactgtcttacgaaaagtcaagcgaaggcaagacttacgaagacgatagccccgaatggttcaaggaggataatgccgtgcaaccaaattccagctacacctacgtatggcacgccactgagaggtctggccccgaaagtccaggtagcgcatgtcgagcctgggcttactattcggcagtcaaccctgaaaaagatattcattccggactaatcggacctctactaatctgccaaaagggcatcttgcacaaggatagcaacatgcccatggatatgcgggagtttgttctcttgtttatgacgttcgatgagaagaagtcgtggtattatgagaaaaagtctcgctctagctggagactgacaagctctgaaatgaagaagtcccacgaatttcacgctatcaatggcatgatctacagtctgcccggtctaaagatgtacgagcaggagtgggtgaggctgcatctactcaatatcggcggttcccaggatatacacgtggtgcactttcatgggcagacactgttagaaaatggcaacaagcaacaccagttgggtgtatggcctcttctccctggcagcttcaaaactctggagatgaaggccagtaagcccggatggtggctgcttaacactgaggtgggcgagaatcagagggcaggcatgcagactccattcttgataatggatcgggactgccggatgcctatgggtctgtccacgggcataatcagcgactctcaaataaaggcgagcgagttcctcggttactgggaaccgcggttggcccggctaaacaatgggggaagctacaatgcatggtctgtcgagaagctggccgcagaatttgcttccaagccgtggattcaagtggatatgcagaaagaagtgataattactggcattcagactcagggcgcaaagcactacctgaagtcatgctacacaaccgagttttatgtcgcctattcctcaaatcagatcaattggcaaattttcaaaggtaactcaacccgcaacgtcatgtattttaacggcaatagcgacgcctccacgataaaagagaaccagttcgaccccccgatcgtcgccaggtacattaggatcagcccaactcgggcctacaaccggccaacccttagattagaacttcagggctgtgaggtcaacggttgtagcaccccccttggcatggagaacggaaagatcgagaataagcaaatcactgcaagtagctttaagaaatcttggtggggagactactgggagcccttccgggctaggctgaacgctcagggccgggtgaatgcgtggcaggcaaaagcgaacaacaacaaacagtggctggagatcgatctgcttaagattaagaaaatcaccgccattataacacagggttgtaagtctttatcctcagagatgtatgtaaaatcctataccattcattactcggaacaaggtgtcgagtggaagccatatcgactgaagtcgtccatggtggataagattttcgaagggaacacaaacactaaggggcacgtgaagaattttttcaatcctccgatcatctcccgctttattcgtgttatccctaagacttggaatcaaagcattgctctgcgattagagttgttcgggtgcgatatctac

SEQ ID NO: 9148 - DNA, 6672 bp, synthetic construct
  misc_feature 1..6672: note = source = /note="Description of Artificial Sequence: Synthetic coding sequence"
  source 1..6672: mol_type = other DNA
atgtttcccggatgccccaggctttgggtcctggttgtgcttggcaccagctgggtgggctggggctcacaaggaaccgaggcagctcaacttcgtcagttctacgtcgcagctcaggggatctcttggtcatacaggccagagcctacgaactcaagcctgaacctctcggtcacttcatttaaaaagatcgtatacagggaatacgaaccttattttaaaaaagaaaagccacagagcacgatcagtggcttattgggccctactctctacgcagaagtgggagacatcatcaaggtccacttcaagaacaaagctgacaaacctctcagcatccatccacagggcattagatactctaaactgagtgaaggagcttcatacctcgaccacaccttcccagccgagaaaatggacgatgctgtcgcaccaggccgtgaatatacttacgagtggtctatcagcgaggacagtggtcccacccatgatgaccctccttgtctgacccacatctactattctcatgaaaatcttatcgaggatttcaattcaggcctcatcggtcctctgctgatatgtaaaaagggcaccttaaccgaagggggtacacaaaagacattcgacaaacaaatagttctgcttttcgctgtctttgacgaatctaagtcctggagtcagagctcatctctgatgtacaccgtgaatggatatgtcaatggtacaatgccagacatcactgtgtgcgcccacgatcatatcagttggcatttgctgggcatgagctctggaccagaactcttttctattcatttcaatggccaggtgcttgaacagaatcatcataaggtgtcagcaattaccctggtgagcgcaacttctacaaccgctaatatgactgtaggacccgaagggaaatggattattagctctttgaccccaaaacacctccaagctgggatgcaagcctacatcgatattaagaattgtcctaaaaagacacgtaacttgaagaagatcacaagagagcaacgacggcacatgaagcgctgggaatattttatcgcagccgaggaagtgatttgggactatgctcccgtcatccccgccaacatggataagaagtaccgcagtcagcacttagacaatttcagcaaccaaattggaaaacattataaaaaggtcatgtacacccagtatgaagacgaaagttttaccaaacacactgtgaacccgaacatgaaagaggatggcatactcggcccaatcatccgggctcaagtaagggatacactgaaaatcgtgttcaaaaacatggcaagccgaccttacagcatttatcctcacggcgtgacatttagcccatatgaagacgaggtgaacagttccttcacatcaggtcggaataatacaatgatccgggccgtccagccgggcgagacatacacatacaaatggaacatcctcgaatttgatgaaccgacagagaacgacgctcagtgcttaactcgcccatattatagtgacgtagacattatgagggatattgcttctggcctgataggactgctgctgatctgtaaatcccgcagtttggataggaggggcatccagagggccgcagacatcgagcagcaggcagttttcgctgtatttgatgaaaataaatcatggtacttagaggacaacattaataagttctgcgaaaacccagatgaagttaaacgggatgatcctaaattttacgagtctaacatcatgagcaccataaacggatacgtccctgagagcatcaccactctgggtttttgttttgatgatacagtgcaatggcacttctgcagcgttggcacgcagaacgaaatcctcactatccacttcacaggacactcattcatctacggcaagaggcacgaggacactctcacgctttttcccatgcggggagagtccgtcactgtgacaatggataatgtcgggacttggatgctgacctcaatgaacagctctcctcgcagcaagaaattgaggctgaaattcagagatgtgaaatgcatcccggacgatgacgaagatagctatgaaatctttgagcctcctgaaagcacagtcatggccaccagaaagatgcatgacagactagaaccagaggatgaggagagcgacgcagactacgattaccagaaccgcttagctgcagctctgggcattagaagtttcaggaactcaagtcttaaccaagaggaggaggagtttaaccttacggccctcgctctggagaacggaacagagttcgtgagctcaaataccgacatcatcgtgggctccaattactcttcaccttctaatatctcaaaatttaccgtgaacaatctggctgagccccagaaggctccctctcatcagcaagccactactgcggggagtccactgagacacctgatagggaaaaacagcgtgttgaatagcagcaccgccgagcactcaagcccatacagcgaagatcctatcgaggacccgctgcagcctgatgtaaccgggatcagattactttctctgggtgctggcgagttcaaaagtcaagaacacgctaagcacaaagggcctaaagtagagagggaccaggcagctaagcacaggttcagctggatgaagttgcttgctcataaggttgggaggcaccttagtcaggacaccggatcaccatccgggatgcgtccttgggaggaccttcctagtcaggacactgggtcaccatcaaggatgaggccctggaaagatcctcctagtgacctgctgctgcttaaacagagcaactcttccaagatacttgtggggagatggcacctcgcaagcgagaaaggatcgtacgagatcatccaagatacagatgaagatactgcggtcaataattggctaatatcgccgcaaaacgctagccgcgcatggggagaaagcacccctcttgcaaataagcccgggaaacagagtggacatcctaaattccctcgcgtgaggcacaaaagcctgcaggtcaggcaggacggcggaaagtctcgcctcaaaaaaagccaattcctgatcaaaactagaaaaaagaagaaagagaaacacacacatcatgctcccctaagccctcggacctttcacccactaaggtccgaagcttataacactttctccgagaggcggcttaagcacagcttggttctgcacaaatcaaacgagaccagcctgcctacagacctgaatcaaactcttccaagtatggacttcgggtggattgctagtctgcccgatcataaccaaaattccagcaacgatactggccaagcatcatgccccccaggactgtatcaaacggttcctcccgaagagcattatcagacctttccgattcaggatccagaccagatgcatagcacctccgacccttcccatcggtctagctctcccgagctgtcggaaatgctggaatacgatcgtagtcataagagtttccctactgatatatcgcaaatgtcacccagttcagaacacgaagtctggcagacagttattagccctgatctgtcccaggtcactctcagcccagaacttagccagacaaacctgagccccgacctgtcacacacaaccctcagcccagaattgattcagcgaaaccttagccccgcattgggccaaatgccgatttcaccagatctttcgcacaccacactgtcgccagacctgagccacacaaccttaagtcttgatctgagtcaaaccaaccttagcccagaactgagccagacaaatctgagccccgctctgggacagatgccgttgtccccagaccttagccacaccaccctgtctctcgactttagtcaaaccaacctgtcaccagagctcagtcacatgaccctgagccctgagctgagtcagacgaacttgtctcccgcactgggccagatgcccatctcgcccgacttgtcacataccactttgagtctggattttagtcaaacaaacctgtcacctgagctgtcgcagaccaacctgtccccagcactgggccagatgcctctgtctccagatcctagtcacactaccctgagtttggaccttagccagacaaacctctctccagagctcagccaaacgaacctgagtcctgatctgagcgagatgcccctattcgccgatctgagccagatcccccttacacccgacttggaccaaatgacacttagtcccgatcttggtgagaccgacctgagccccaattttgggcagatgtccctgtctcccgacctgagtcaggttactctatcacctgatatcagcgacacaaccctgctgccggacttgagccaaataagtccaccccccgacctggaccaaatcttttaccccagcgaaagctctcagagcctcctgttgcaagaatttaatgagagttttccttaccctgacctggggcaaatgccttcaccttcttctcctaccttgaacgatactttcctgagcaaagagttcaacccactagtgatcgtcgggctgagcaaagatggcaccgactacattgagattatccccaaggaagaagtccagtcttccgaagatgactacgccgaaatcgattacgtgccgtatgacgacccatataaaacagatgtgaggacaaatataaacagcagtagggaccccgacaacatagcagcctggtacttgagatccaacaacgggaacagaaggaactattacatcgccgctgaggagatttcctgggactactctgagttcgttcagagagagaccgacatcgaagattcagacgatatcccagaagacaccacatacaaaaaggtcgtgttccgtaaataccttgatagcactttcactaagcgcgatccaagaggagagtacgaggaacatttggggatcctcgggccaatcattagagccgaagtcgatgatgtaatccaggtgaggttcaaaaacctggcttctagaccgtactccctgcacgcgcacggcctgtcttacgaaaaatcgagcgaaggcaaaacatacgaggatgatagcccagaatggttcaaagaagataacgctgtgcagccgaacagctcttacacatacgtgtggcacgctaccgagagaagcggccccgagagtccaggaagcgcgtgcagggcttgggcatactactccgctgtgaaccctgaaaaagacattcacagtggactcattgggccgctgctcatctgccagaagggcatacttcataaggactcaaacatgcctatggatatgcgggagttcgtactcctttttatgacctttgatgaaaaaaaatcatggtactacgagaagaaatctcgctctagctggcgcctgacatcaagcgagatgaagaaaagccacgaattccacgctatcaacggcatgatctactctctccccgggctgaaaatgtacgagcaagagtgggtaagactccacctgcttaacataggaggcagccaagacattcatgtcgtacatttccatgggcaaactctcttagaaaacggcaacaagcagcaccagctgggcgtgtggcctctccttccaggatccttcaaaactttggagatgaaagcttcgaagcctggctggtggctcctcaacaccgaagttggagaaaaccagcgtgctggtatgcagacccccttcctgattatggatcgggactgccgtatgcctatgggcctgtctacgggaattatcagcgacagccaaattaaagctagcgaattcctgggttactgggagcctagacttgctcgcctcaacaacggcgggagttacaacgcctggagcgtagaaaaactggcagcagaattcgcttctaaaccatggatacaggtcgatatgcaaaaggaggttattatcactggaatccagacccagggcgcaaaacactatctgaagtcttgttacacaaccgaattctatgtagcatattcatctaaccagatcaactggcagatctttaaaggaaactcgactagaaatgtcatgtactttaacggaaatagtgatgcgtccaccatcaaagagaatcaatttgatcctcccattgtcgcccgctacatcaggattagccccactagggcctacaacagaccaactctccgcctggaactccaaggctgcgaggtaaatggctgcagcaccccgcttgggatggaaaatggtaagatcgagaataagcagatcacagcttcaagctttaagaaaagctggtggggcgactactgggagccgtttcgggcacggctcaacgcccagggaagagttaatgcctggcaggcaaaagctaacaataacaagcaatggctggagatcgatttgctcaaaatcaaaaaaattaccgcgattatcacacagggctgtaaaagcctgtcgagcgagatgtacgtcaagtcctacaccattcactactcagagcagggcgtggaatggaaaccttacaggctgaaatccagcatggtggacaaaattttcgagggcaacactaacaccaaaggccatgtgaagaacttcttcaacccccccatcattagccggttcatcagagtgatccctaaaacgtggaatcaatcaatagctctgaggctcgagctgtttgggtgcgatatctat

SEQ ID NO: 9149 - DNA, 6672 bp, synthetic construct
  misc_feature 1..6672: note = source = /note="Description of Artificial Sequence: Synthetic coding sequence"
  source 1..6672: mol_type = other DNA
atgttccccgggtgtccccggttgtgggtgctagtcgttctgggcacgtcatgggtggggtggggttctcagggcactgaagccgctcaattgcgtcaattttacgtcgccgcccagggtatatcctggtcgtatcgaccggaaccaacaaactcatctctcaatctcagcgtgacctcatttaaaaagattgtgtaccgcgagtatgagccctattttaaaaaggaaaaaccacaaagtactatcagtgggctgttgggccctaccctgtatgccgaggtgggtgatatcatcaaggtccactttaaaaacaaagctgataaacctctatccatccatcctcaggggatccgttactcaaagctaagtgaaggcgcttcttatttggaccacacctttccagccgagaagatggatgatgctgtcgctcccggacgcgagtacacgtatgagtggtctatttccgaagactctggtcccactcacgatgatcccccctgcctgacccacatatattattcacacgagaatctcatcgaagattttaactccggattgatcggccctttgctaatttgcaagaaaggcacactgactgaagggggtacacagaagacattcgataaacagattgtgctgctctttgctgtcttcgacgaatctaaatcgtggtctcaaagctcaagcttgatgtacacggtgaacggctatgtcaatggcaccatgccagatatcacagtgtgcgcgcacgaccatatcagttggcacctcttgggtatgtcttctggacccgagttattctcaatccacttcaatggccaggtgttggagcaaaatcaccacaaagtttccgctatcacactagtttcggcgacctcaactaccgcgaatatgacggtggggccagaaggcaagtggataatctcttccctaacccccaagcacctgcaagccgggatgcaggcctacatcgatataaagaactgtcccaaaaaaacacgcaatctgaagaagatcacccgagagcagcgccgacacatgaaaagatgggagtactttatcgctgccgaagaagtcatttgggactatgcgcctgtcataccggctaatatggacaagaagtaccgctcacaacatttggataatttctccaatcagatcggaaaacattacaagaaagtcatgtacactcagtatgaggacgagtctttcacgaagcacaccgtgaatcccaacatgaaagaggatgggattttggggcccatcatccgcgctcaggtgagggataccctgaagatcgtgtttaagaatatggcttcccgtccttattcaatctacccccacggtgttactttctcaccctatgaggatgaggtgaatagcagctttacctccgggagaaataataccatgatcagagctgtgcagccgggagagacctacacgtacaagtggaatatactcgaatttgacgaacccactgagaatgatgcgcagtgtttgacacggccatactactctgacgtggacatcatgagggacatcgcctccggcctcattggccttctgctgatctgcaagtctaggtcccttgaccggcgaggaatccagcgagctgcggatattgagcagcaagctgtcttcgcagtgtttgacgaaaacaagagttggtatctggaggataacatcaacaagttctgcgagaaccccgacgaggtaaagcgggatgacccgaaattttacgagtccaacattatgtctactattaacggatatgtgcctgaatctataacgacacttggtttttgctttgatgacaccgtccagtggcatttctgctctgtgggaacccagaacgagattttaacaatccacttcactggacattccttcatttatggaaagagacacgaggacaccctgacactatttccaatgagaggcgagagcgtcacagtgactatggataacgtgggcacatggatgctgacctccatgaatagctccccccggagtaagaaactgcgcctgaagttccgggatgtgaagtgcattcccgatgatgatgaggactcgtatgagatatttgaacccccagagagcactgtcatggccacacgtaaaatgcatgacaggctcgagcccgaggatgaggaaagtgatgcggactatgattatcagaatcgactggccgctgccctcggaattcggtcgtttcgcaatagtagcttgaatcaggaggaggaagaatttaatcttacagctcttgccctggaaaatgggaccgagtttgtgtcctcgaatacagatatcatcgttggcagtaattacagcagtccgtctaacattagcaaattcaccgttaataatcttgctgaaccccagaaggcaccgtcccatcagcaggcaaccaccgcagggtcaccactacggcatctcataggaaaaaattctgttctgaactctagcactgccgagcactcctctccatattctgaggatcctatagaggatccacttcaacctgacgtcactggcattcgtttactcagcctgggcgcaggggaattcaagagtcaagagcatgccaagcacaaagggccgaaggtggagcgtgaccaggccgccaaacaccggtttagctggatgaaactgcttgcccacaaagtcggtagacatctctcccaagatactggcagtccttccggcatgaggccttgggaggatctgcctagtcaggacacaggctctccctcccgcatgaggccctggaaagaccctccttcagatttgctcttgctgaagcaatccaactcaagtaagattctggtcggaaggtggcacctggccagcgagaaggggtcatatgaaatcatacaggatacagacgaggataccgcagtgaataactggttgataagtccacaaaacgcatcacgcgcctggggagagtccacgccccttgccaacaagccgggaaaacagtctggccatcctaagttccctcgggtaaggcataaatctctacaggtcagacaggatggcgggaagtcccgactgaaaaagtcgcagttcttgataaaaacgcggaaaaagaagaaggaaaagcacacacaccacgcacctttgtctccccgcacctttcacccactgcgaagtgaggcctataatacattctcggagcgtagactgaagcattctctagttctgcataaatctaacgaaacctctctccccaccgatctgaatcagaccttaccatcaatggattttgggtggatagcgagcctgcccgaccacaaccagaattcaagtaatgataccggtcaagcgagctgcccccctggcctgtaccagactgtgccgccagaggagcattatcaaacctttcccatacaagacccagaccagatgcacagtaccagtgatcctagccataggagttcttcaccagagcttagcgaaatgctggaatatgaccggtcccacaaatcatttccaacagacatcagccagatgtcaccttctagcgagcacgaggtgtggcagaccgtgatcagccccgacctgtcgcaggtgacactctcaccagaactatcccagacgaatctttctcccgacttgtctcacacaaccctgtcaccagagctgatccagaggaacttatcgcccgcactgggacagatgccgattagtcccgatttgagccataccaccctgagccccgatctttcccacaccactttgagccttgacctcagccagaccaatctgagcccggagctctctcagacaaacctgagccccgcactgggccagatgcctctgtcccctgacttgtcacataccacacttagtctcgatttctctcagactaacctctccccagaactgtcccatatgacactgtcaccagaactgagccagaccaacttatctcccgctctgggccagatgcctatctctcctgatctgagtcacacgacattgtccctggattttagtcaaacaaatcttagccccgagctgtctcaaactaatctgtcacctgctctggggcaaatgcccctgtctcccgacccaagccatactactttatcgttggacctgtctcagacaaatttaagtccagagctgtcccagaccaacctttctcccgatctgtcagagatgcccctctttgctgacctttctcagatcccactgactcccgatctggatcagatgaccctgtccccagacttgggcgagactgacctgtcccccaattttggccagatgtccttatcgccggatctgtcacaggtgactctgagtccagacataagcgacactacattgcttccggacctttcgcaaatatcacccccaccagatctcgaccaaatcttttatcccagtgagtctagtcagagtctgctattgcaagaatttaatgagagcttcccctatccagatttaggccagatgcccagcccctcatccccaacgttgaacgataccttcttgagtaaggagtttaatcccctggtgatcgtaggacttagtaaagatggcacagactacatagaaattatccccaaagaggaagtccagtcctcggaagatgattacgccgaaatcgactacgttccatacgacgatccatataagacggatgtgaggacgaacatcaactcaagccgtgacccagataacatcgcggcatggtacctgaggtctaataacggcaatagaagaaattattacatcgctgcagaagaaatttcttgggactactccgagtttgtacagcgagagactgacattgaggattccgatgacatccccgaggacacaacttacaagaaagtggtgttcagaaaatatttagactccaccttcaccaaaagggatccaagaggggaatacgaggagcacctggggattttgggcccaataatccgcgcagaggtggacgacgtgatccaggtgcgtttcaagaacctcgcaagccgcccctactccctgcacgcacacgggctgagttatgagaaaagctcagagggaaagacatatgaagatgattctcctgaatggttcaaagaagacaatgccgtgcagccaaatagtagctacacttatgtctggcacgcgaccgaacgctcagggcctgaaagtcctggaagcgcctgcagggcctgggcatactatagtgccgtaaacccagaaaaggatattcacagcgggttgataggccctttattgatctgtcagaagggcatcctacataaggactcaaacatgccgatggacatgcgtgaatttgtcctactattcatgaccttcgatgaaaaaaaatcatggtattatgagaaaaagtcacgtagttcctggcgcttaacgagttcagagatgaaaaagtcccacgagttccatgcaatcaacggcatgatctactcgctcccagggctgaagatgtatgagcaggagtgggtccgcctgcatctgctgaatatcggagggtctcaggacatacacgtagttcactttcatggacagactctgctcgagaatggtaacaaacagcaccagcttggagtgtggcccttgctaccagggagcttcaaaactctggaaatgaaggctagtaagcctggatggtggctcctcaataccgaggtgggggagaaccaaagggcaggcatgcagacccctttcctcatcatggaccgggattgccggatgccgatgggactctctactggtatcatcagcgatagtcagatcaaggcttccgaattcttggggtattgggagccgcggttagctcgtctcaacaatggtgggtcatacaatgcctggtcggtggagaagctggccgcagagttcgcaagcaagccctggatccaggttgacatgcaaaaagaggtcataattacgggaatccagactcagggagctaaacattatttgaagtcttgctatactactgagttctacgtcgcttattcaagtaaccagattaattggcagatattcaagggcaactccaccagaaatgtgatgtatttcaatggcaacagcgatgcaagcaccatcaaagagaaccagtttgaccctccgattgtcgcccggtacatccggatctctcccacacgcgcctacaaccggcccaccctgaggctcgagctgcaaggatgtgaggtgaatggctgtagcactccactggggatggagaacggtaagatcgagaataagcagattaccgccagtagttttaagaagtcttggtggggcgactattgggaacccttcagagcccgccttaatgcgcagggacgagttaatgcatggcaggcaaaggctaataacaacaagcagtggctggagattgacctcctgaagatcaaaaagatcacagccattataactcaagggtgtaaatccctgtcgtccgagatgtacgttaagtcgtatactatccactacagcgagcagggggtggaatggaagccctatagattaaagagtagtatggtggacaagattttcgagggtaatactaacacaaagggacatgtgaagaatttctttaatcctcccataatctctcgtttcatacgagttatcccaaagacatggaatcagtctattgcactccgtctggagctctttggttgcgacatctac

SEQ ID NO: 9150 - DNA, 6672 bp, synthetic construct
  misc_feature 1..6672: note = source = /note="Description of Artificial Sequence: Synthetic coding sequence"
  source 1..6672: mol_type = other DNA
atgttccccggttgcccaagactgtgggtactggtggtgttagggaccagttgggtaggctggggatcacagggcactgaagctgcccagctgcgacagttttacgttgccgctcagggcatcagctggtcctacaggccggaacccacaaactcatcccttaacctaagtgtcacctccttcaagaaaatcgtataccgcgaatacgagccatacttcaagaaagagaaaccacaatcgaccatttctggcctgctgggccccacgctgtatgcagaggtcggcgacattatcaaagtccacttcaagaataaggccgataaacccctcagtatccatccacaggggattcgttattccaagctcagtgagggggcaagctacctggaccacaccttcccagccgaaaaaatggatgatgccgtggcacccggaagagaatacacctacgaatggagcatatctgaggactctggccccactcacgatgaccctccttgtctaacccatatttactatagccacgaaaatcttattgaagactttaacagcggcctgatcggtccccttctcatctgcaagaaggggaccttgactgagggtgggacccagaaaaccttcgataagcagattgtactcctcttcgccgtgttcgacgagagtaagtcctggtcacagtcttctagccttatgtacaccgtgaacggctacgtgaatgggaccatgcccgacattacggtgtgcgcccatgaccacatctcctggcatctgctaggaatgtctagcggaccggaattgttcagtatacacttcaacggacaggtgctagaacagaaccatcacaaagtctccgcgatcacactggtcagtgccacctctaccaccgccaacatgacggtcggcccagaggggaaatggattattagctcattgactccgaaacaccttcaagcaggaatgcaggcatacatcgatatcaagaattgccccaagaaaactcggaacttgaaaaagatcacccgggaacagcggagacacatgaaaagatgggaatatttcatcgccgccgaagaggtgatttgggactacgcccctgtcattcctgccaacatggataaaaagtaccgatcccagcacctggataacttttcaaaccagattgggaagcactacaagaaagttatgtacacgcaatatgaggatgagtcctttacaaagcacacagtgaaccccaacatgaaggaagacggtatcctggggcctatcattagagcccaggtcagggacactctgaagattgtgttcaagaatatggccagccggccttatagcatctacccgcatggcgttaccttctcaccttatgaggatgaggttaactcttcctttacttccgggcgcaacaatactatgatccgcgcggttcaacccggcgagacgtatacttataagtggaacatcctggagtttgatgagccaaccgagaacgacgcccagtgccttacccggccgtactacagtgacgtggacatcatgagggacatcgccagcggacttatcggcctgcttctgatctgtaagtctcggtccctggacagaagaggaatacagcgggcagccgacatcgagcagcaggcagtcttcgcagtgttcgatgagaataagtcctggtacttggaagataacatcaacaagttctgtgagaatccagacgaggtaaagagagacgacccaaagttttatgaatcaaacataatgtcaaccattaacggctacgtgcctgaatccattactaccctggggttctgtttcgacgacactgttcagtggcacttttgtagcgtgggtacccagaacgagatcttaaccatccacttcacggggcacagttttatctacggcaaaaggcatgaggacacgctgacactgttccccatgcgcggtgaatcagtgacggtgaccatggataacgtggggacttggatgctcacaagtatgaatagttcaccacggtcaaaaaaactgagactcaaattcagggatgttaaatgtatccccgacgacgacgaagattcctacgagatcttcgagccaccagaaagcactgtcatggctaccaggaaaatgcacgatcggcttgagcctgaggacgaagaatccgacgcagactatgactaccagaatagactagctgccgcccttggcatacgatcattccggaattccagtttaaatcaagaagaggaggaattcaatctcacagcgctggctctcgagaacggaaccgagttcgtctcctcaaacacggacatcattgtcgggtcaaactactctagtccctcaaacatttctaaattcaccgtgaataacctggcggagccccagaaggccccatcccatcagcaagctaccacggcggggtctccacttcgccatctgatcggtaagaattcggtgctcaatagttctactgccgaacactcatcgccgtactcagaagacccgattgaggacccgttacagccagatgtgaccggtattcggttgctcagtctcggagccggggagttcaagagccaggagcatgctaaacacaaggggcctaaggtggaacgcgaccaggccgccaaacacagattcagttggatgaagctgttagcccacaaggtggggagacacttgtcccaggacactgggagccccagcgggatgcgaccttgggaggacctcccttcccaggataccggatctccctctcgcatgcggccttggaaagatcctcctagtgatctgctgctcttgaagcaatctaattcctcaaaaatccttgtgggacgttggcacttggctagcgagaaagggagctatgaaatcatccaggatacagatgaggatacggccgtgaataattggttgatcagtccgcagaacgctagccgggcatggggggaaagcacccccctggccaacaaaccaggcaagcagagtgggcaccccaaatttcctagagtgcgtcacaaaagtctgcaggtgcggcaggacggcggtaaatctcgtctgaagaagtcccagtttttgatcaagactaggaaaaagaaaaaagaaaagcatacacaccacgctcccctgtcaccccggacgtttcatccacttcggagcgaagcctacaatacattctccgaaagacgcctgaagcactccctcgtgctccacaaatctaacgagactagcctgcccaccgatctgaatcaaacgctgccgtctatggatttcggctggatcgcatccttgcccgaccataaccaaaatagtagtaatgacacaggtcaggcgagttgccctcccggattgtaccagactgtgcccccagaggagcattatcagacttttcccatccaggaccccgaccagatgcatagtacatcagatccctcgcacagatcctccagccctgagctctccgagatgctggagtatgaccggtcacacaagtccttccccactgacatctcgcagatgagtccatcaagcgagcatgaggtgtggcagaccgtgataagtcccgacctgagccaggtgactctgtctcccgaactaagccaaactaatctgagtcccgatctgtcccacaccaccttgtctccagagcttatacagagaaatttaagccccgctcttgggcagatgcccatctcccctgacctgtcccacactaccctgagccctgacttgtcccacaccacattatcactcgacctatctcagacaaacctttctccggaactgtctcaaaccaacctgagccccgccttggggcagatgcctctgagtccggacctctcccacaccaccctgtcactggacttttcacagactaatctttctccagagttaagccacatgactttatcgcctgagctctcgcagaccaatctgtccccagcgctcggtcaaatgcctatctctcccgatttaagccacaccactctttctctggatttctcacaaactaaccttagccccgaattgagtcagaccaatctgtcccccgccctgggccaaatgccattgtcaccagacccttctcacacaactctgtcgcttgacctgtctcaaaccaatctgagtccagagctttcccagactaacctcagtcctgatctctctgagatgcccctctttgcagacctctcacaaataccgctgactccagacctggatcagatgacactgtcccctgatctgggcgaaactgaccttagcccaaacttcggccagatgtccctctcccccgatctttcccaggttactctgtctcctgacatctccgacactacgcttctccccgaccttagtcagatctcccccccacctgacctcgaccagatcttctatccatccgaatcatctcagtctctcttgttgcaggaatttaacgaatctttcccgtatcccgatctggggcaaatgccttctcctagctcaccgacgctcaacgatacctttctgagtaaagagttcaacccactggtcatcgtagggttatccaaggacggaactgactacattgaaatcatccctaaggaggaggtgcagagttcagaggatgattatgccgagatcgattacgtgccgtacgacgacccatacaagactgacgtgcgcaccaatatcaactcctcccgtgacccggacaacattgctgcctggtacctgaggagcaataatggcaaccgtaggaattactatatcgcggcagaggagatatcctgggattactcagagtttgtgcagagggagacagacattgaggacagcgatgacatccctgaagacaccacctataagaaggtggtgtttaggaagtacctggacagtacttttacgaagcgcgaccctagaggcgagtacgaggaacacctaggaattctgggacccatcatccgggctgaggtcgacgacgttattcaggtgaggtttaaaaacctcgcgtcccgaccatatagcctgcacgcccatggactgagctatgaaaagtcttcagagggaaaaacatacgaggacgacagtcctgagtggttcaaggaggacaatgcagtacagcctaacagctcctacacctacgtgtggcatgccactgagcgaagcggcccagaatcaccgggttccgcctgcagagcgtgggcttactactcagccgtgaatcctgaaaaggacatccactcagggctgattggacccctgcttatctgccaaaaggggatattacacaaggattccaacatgcctatggacatgcgggagtttgtgctattatttatgacattcgacgaaaaaaagtcttggtactatgagaagaagtcgcgaagctcttggcgccttacaagcagcgagatgaaaaagtcacatgaattccacgctatcaatgggatgatctacagcttaccaggtctaaaaatgtacgaacaagagtgggtgcgactgcacctgctcaacattggcggatcacaggacattcacgtggtccattttcacggccagaccctattggaaaacggcaataagcagcaccagctcggtgtgtggcctctgctgcctgggagcttcaagacccttgagatgaaggccagcaagcctgggtggtggttgctgaacacggaagtcggtgaaaaccagcgtgctgggatgcaaacgccatttctcataatggacagggattgccggatgccaatgggtctcagtaccggtattatttccgacagccaaatcaaagccagcgagttcctgggttactgggagcctcgcttggctcgcctgaacaatggcggaagttacaatgcttggagtgttgaaaagctggctgcagaattcgccagtaaaccatggatccaagtggatatgcagaaagaagtgatcatcactgggatccagactcagggcgccaaacactacctgaaatcctgttacacgaccgaattttacgtggcctactcttcgaatcagatcaattggcagatattcaagggaaactctacccgcaacgttatgtacttcaacggaaactccgatgcgtccaccataaaggagaaccagttcgacccgccaattgtggcgagatatataaggatctctcccactcgggcatacaacagacctacgttgcggctggaactccaggggtgcgaggtcaacgggtgctctacgcctctcgggatggagaacggaaagatcgaaaataagcagattaccgccagttccttcaaaaagtcttggtggggggactattgggagcctttccgagccaggctgaatgcacagggcagggtcaatgcctggcaagctaaggccaacaacaacaagcaatggcttgagatcgatctgctgaaaataaagaagataaccgcgatcattacgcaaggctgcaaatccctctccagtgagatgtatgtgaaatcctacaccatccactattccgagcagggagttgaatggaagccttaccgattgaagtcaagcatggtagataagatttttgagggcaacacaaatactaagggccacgtcaagaacttcttcaaccctccgatcatttcaagattcatacgagtaattcccaagacgtggaatcagtcaatagcactgaggctggagttgtttggatgtgatatctac

SEQ ID NO: 9151 - DNA, 6672 bp, synthetic construct
  misc_feature 1..6672: note = source = /note="Description of Artificial Sequence: Synthetic coding sequence"
  source 1..6672: mol_type = other DNA
atgttccccggttgtcccaggctctgggtgctcgtcgttcttggaaccagctgggttggatggggtagccagggcaccgaggcagcccagctgagacagttctacgtcgccgcgcaggggatcagctggagctaccgccctgagcccacgaactcatcccttaacctttcagtgacctccttcaagaagatcgtttaccgtgagtatgagccctactttaagaaggagaagcctcagtccaccatcagcggtctcctaggcccgaccctgtacgctgaggtgggcgacatcatcaaggtccactttaagaacaaggccgacaaaccccttagcattcatccccaaggcatccgttacagcaagctttcggagggtgcctcgtacctcgatcacaccttcccggccgaaaagatggacgacgccgttgcacccggcagggaatatacctacgagtggagtatcagcgaagactcaggccccacacatgatgacccgccctgcctcacccacatctattactcgcacgagaacctgatcgaagactttaattcgggcctgatcgggccactgcttatctgtaagaagggcacgttgaccgagggcgggactcagaagaccttcgacaagcaaatagtgctcctttttgccgttttcgacgagtcgaagtcgtggtcccaatcctcttccctcatgtacaccgttaacggttacgtaaacggcactatgccggacatcacagtttgcgcacacgatcacattagctggcacctcctcggaatgtcgtcgggccccgagctgttttcgattcatttcaacggccaagttctggagcagaaccaccacaaggtcagcgctatcactctggtctctgcgacatccaccaccgctaacatgactgtcggccccgagggtaagtggattatctcttccctgacccctaagcaccttcaggcaggaatgcaagcttacatagacatcaagaactgtcctaagaagacccgcaacctcaagaagattacccgcgagcagcggcgccacatgaagcgctgggagtatttcatcgccgcggaagaggtcatctgggactacgctcctgttatccccgccaatatggacaagaagtacagatcgcagcatctcgacaacttctccaatcagatcggcaagcactacaagaaggtcatgtacacccagtacgaggatgagtcgttcaccaagcacaccgtgaatcccaacatgaaggaggacggcattttgggccccatcattcgtgcgcaggtccgggacactttaaagatcgtcttcaagaacatggcctccaggccatatagtatctatccccacggcgttacattctccccctacgaggacgaagtgaacagtagcttcaccagcggccgcaacaacaccatgatcagggcggtgcagcctggcgagacctatacatacaaatggaacatccttgagttcgatgagcctactgagaacgatgcgcaatgcctcacgaggccttactactccgatgttgacattatgcgtgacatcgcgagtggactgatcggcctcctcttgatttgcaagtcccgttccctcgatcgccgcggcattcagcgtgcagcagatatcgaacagcaggcagtgttcgctgtctttgacgagaataagagttggtatctcgaggataacatcaacaagttctgcgagaaccccgatgaggtaaaaagggatgaccccaagttctacgaatccaacatcatgagcaccattaacggctacgtcccggaatccattaccacactcggcttttgctttgacgataccgtgcagtggcatttctgctccgtaggaactcagaacgaaatcttgactatccactttacaggccactccttcatctacggtaagcgtcacgaagataccttgaccctgttcccgatgagaggcgagtctgtcaccgtgactatggacaatgtcggcacatggatgcttaccagcatgaactcttctcctcgttctaaaaagctcaggcttaagttccgtgacgtgaaatgcattcccgatgatgacgaggattcttacgagatctttgaacctcccgagtccaccgtcatggctactcggaaaatgcacgaccgcttagagccggaggacgaggaatcggatgcggattacgactaccagaatcggctggccgccgcactcggtattcgttcttttcgcaacagcagtctgaaccaggaggaggaggaattcaacctgaccgccttggcactggagaacggtactgagttcgtctcaagcaacactgacattatcgtaggttctaactactcctcgccatccaacatttcgaagttcaccgtcaacaacctggctgagcctcagaaagcacctagccaccagcaggccaccaccgccgggtctccgctcaggcatctcatcggaaagaactccgttctaaactcctccaccgcggagcactcctcgccctattcggaggatcccatcgaggaccccctgcagccggatgtaactggtatccgcctccttagtctgggtgcaggagagttcaagagccaggagcacgccaagcacaagggacctaaggtcgagagggatcaagccgccaagcaccgcttcagctggatgaaacttctggcccacaaggtgggtcgtcatctgtcccaagataccggatctccgtcgggtatgagaccatgggaagatttgccgtctcaggacaccggatccccgtcccgtatgcggccgtggaaggacccgccttccgacctcctccttttgaagcaatcgaactcctccaagatcttggtgggccgttggcacttagcaagtgaaaagggctcgtacgagataatccaggataccgacgaagacacggccgtaaacaactggctcatttccccccagaacgcgtcccgcgcttggggtgagagcacccccctcgcaaataagcccggaaaacagtccggccatccgaagttccctcgggtccgtcataagtctctgcaggtccgccaggatggaggtaagagcaggcttaagaagagccagttcctcatcaagacccgtaagaagaagaaggagaagcatacacaccacgcccctctttcgccaaggaccttccatcccctccgctcagaggcgtacaacaccttttcggaaagacgtttgaagcatagtctcgttctgcacaaatccaacgaaacttcgttaccgaccgatctcaatcagaccttgccgtcgatggacttcggctggatcgcaagccttccggaccacaaccagaactccagcaacgacaccggccaggcgagctgtccgcccgggctctaccagactgtccctcccgaagaacactaccagacgttccccatccaggacccggatcagatgcactccacgtcagatccatcgcatcgtagttcttctcccgagctcagtgagatgctcgaatacgatcgatcacacaagtctttcccaacagatatctcccagatgtcaccgtcctccgaacacgaagtctggcagaccgttatcagtcctgacttatcgcaggtgacgttatcccctgagctgtcgcagacaaatttgtctcccgatctctcacataccactctgagtccggagctgattcagcgcaacttgagccctgcactcggtcaaatgcccatcagcccggatttgtcccatacgaccttgtctcccgatctctcccacaccacattgtctctggacctttcccagaccaacctcagtcccgagctgtctcagacgaacctttcccccgctctcggtcagatgcccttgtcacctgacctgtcgcacaccactctttctctcgatttttcccagaccaacctgtccccggagctgtcccatatgaccttgagtcccgagcttagccagacgaacctcagtccggcgctcggccagatgcccatctcccccgacctcagccataccaccttgagcctcgatttcagccagactaatctctctcccgagctgtctcagaccaacctctcccctgctctgggacagatgccactgagcccagatcccagccatacaacgcttagcctcgaccttagccaaaccaacttgtctccagagttgtcacagaccaacctcagccccgacttgtccgagatgccgctcttcgccgacctgtcccagatccctttgactcccgacctcgaccagatgacattgtcccccgaccttggagagaccgacctttccccgaactttggacagatgtcgttgagccccgacctctcccaagtcacactctcaccggacatctccgacacgacactcctccctgatctgagccagatcagtcccccgcccgacctggatcagatattctacccttccgagtcgtctcagtcgttgctgttgcaagagttcaacgagtcttttccgtaccccgatctcggccagatgcctagcccctccagtcctactctcaacgatactttcctttccaaggagttcaatcctctcgtcattgtcggccttagcaaggacggtacggactacattgagattattcctaaggaggaagtccaaagtagcgaggacgactacgctgaaatcgactatgtcccgtacgatgacccctacaagaccgacgtcagaaccaacataaattcctcccgtgaccccgacaacattgccgcgtggtatttgcgctcgaacaatggtaaccgccgtaactattatatcgccgctgaagagatctcctgggactactccgagtttgtgcagcgcgaaacggacatcgaggacagtgatgacatccctgaggatacaacctataagaaggtcgtcttccgcaagtaccttgattccaccttcaccaagcgcgacccgcggggtgagtacgaggagcacctcggcatactcgggcccattattcgcgccgaggtggacgatgttatccaggtccgctttaagaatttagcgtctcgtccttacagtctccacgcgcatggcttgtcctacgagaaatcttctgaggggaagacttatgaggatgactctcccgaatggttcaaagaggataatgctgtccagccaaattcctcctacacctacgtgtggcacgccaccgagcgttcaggcccggagtccccgggctcggcgtgccgtgcttgggcctattactctgctgttaaccccgagaaggatattcattctggactcatcggcccccttctcatctgccagaagggaattctccacaaagattccaacatgcccatggacatgcgtgaattcgtcctgttgttcatgaccttcgacgaaaagaagtcctggtactacgaaaaaaaatcgcgttcctcttggcggctgacatcttcagaaatgaagaagtctcacgaattccatgccatcaacggtatgatctactccctgcctggactcaagatgtacgaacaggaatgggtccggctccacctgctgaacataggtggatctcaagatatacacgtcgttcacttccacggccagacactcctagagaatggtaacaagcagcatcagctgggcgtgtggccgctcttgcctggttccttcaagactctcgagatgaaggcatccaagcctggatggtggctgctaaacactgaggtcggcgagaatcagcgtgccggcatgcaaacaccttttttgattatggaccgtgactgtcgcatgcccatgggcctttccacaggcattatttcagattcccagattaaggcaagcgaattcctgggatactgggaaccccggctggctcgtctcaacaacggcggttcctacaacgcgtggtcggtagaaaagctggccgccgaattcgcttcgaagccctggattcaagtcgatatgcagaaggaggtcatcatcactggaatccagacccagggagctaagcactatctcaagtcgtgctacaccactgagttctatgtcgcctattcctctaaccagattaactggcagatattcaagggcaactccactcgtaacgtcatgtacttcaacggtaactctgacgcctcaactattaaggaaaaccagtttgacccccctatcgtcgctcgttatatccgcatctctcccacccgcgcctacaacaggccaactcttcgcctcgagctacagggctgtgaagtgaacggttgctccacccccctaggcatggagaatggaaaaatcgagaacaaacagattaccgcaagctccttcaagaagagttggtggggcgactattgggagccattccgtgccaggctcaacgcccaagggcgtgtgaacgcttggcaagctaaagccaacaacaacaagcaatggctcgagatcgatttgcttaagatcaagaaaattaccgccatcattacgcaggggtgcaagtctttgtcgtccgagatgtacgtcaagtcctacacgattcactactctgagcagggggtcgagtggaagccgtatcgacttaagtcttccatggttgataagatcttcgagggcaatactaataccaagggtcatgtcaagaacttctttaatcctccgatcattagtagattcatccgggttattcctaagacttggaatcagtccatcgccttgcgtctggagctgtttggatgcgatatttac

SEQ ID NO: 9152 - DNA, 6672 bp, synthetic construct
  misc_feature 1..6672: note = source = /note="Description of Artificial Sequence: Synthetic coding sequence"
  source 1..6672: mol_type = other DNA
atgttccctggttgtccgcgcctttgggtgctcgtcgtgcttgggactagctgggtaggatggggttcacagggtaccgaagccgcccaactgaggcagttttacgtggccgcacagggtatctcttggagctataggcctgagcccacgaattcttccctgaacctgtctgtgacgagctttaagaaaatcgtgtatagagaatacgaaccctatttcaagaaggaaaaaccacagtctaccatcagtgggttgctggggcctaccctctacgccgaagttggagacataatcaaggtccatttcaaaaacaaggctgataaacctcttagtattcacccacagggaatacgatacagtaaactgagtgagggggcttcctatctcgatcacacctttccagctgaaaaaatggacgacgcagttgccccagggagggagtacacctacgagtggagcatctccgaggacagtggtcctacccacgatgaccctccctgcttgacccatatttactatagtcatgagaatctcattgaggattttaatagcggactgataggaccacttttgatctgtaagaagggcactctcactgaaggcggcacccagaagacgtttgacaagcagatcgtcctgctttttgcagtgttcgatgagagcaagtcatggtcccaaagttcctccctgatgtacacggtgaatggttacgtgaatgggaccatgccagatatcacggtatgtgcccatgatcacatctcttggcatctcctcgggatgtcatccgggcctgagctgttttccatccactttaacggtcaggtactcgaacagaatcaccataaagtttctgccatcaccctggtgagcgctacctctaccaccgctaacatgactgtgggacctgaaggtaagtggatcatctcctctctgaccccaaaacatctgcaggccggcatgcaggcatatatagatatcaaaaactgtcctaagaaaacgaggaatctcaagaagattacccgagagcaacggagacacatgaagcgctgggagtatttcatcgcggcggaagaggtgatctgggattatgccccagtgatccccgccaatatggataaaaagtacaggtctcagcatcttgataatttctccaatcaaatcggtaagcactacaaaaaagtgatgtacacccagtacgaggatgaatcctttaccaagcacacggttaacccaaatatgaaggaagacggaatcctgggccctatcatacgggcccaagtgcgcgatacactcaagattgtatttaagaacatggccagtcgaccatactccatctacccccatggcgtgacattttccccttatgaggatgaagtgaattcctcttttacatctggccggaataatacaatgatccgagctgtccagcccggagaaacgtacacttataagtggaacattctggaatttgacgaaccaaccgagaacgatgctcaatgtctgacgagaccatattatagcgacgttgatataatgcgggacatcgcctcaggcctgatcgggctgttgctcatatgcaagagtcgctccttggatcgcaggggaattcagcgggcagccgacatcgagcagcaggcagtctttgccgtgttcgatgaaaataagagctggtacctcgaggacaacatcaacaagttttgtgagaatcccgatgaagtaaagcgggacgacccaaagttctacgagtcaaatattatgtccacaatcaacggatacgtccctgaatctatcaccacgctgggcttctgtttcgacgacaccgtgcagtggcacttctgctctgttggaacccaaaacgagattctcacgatccactttactggccatagtttcatctatggcaagcggcatgaagacacactgaccctgttccctatgcgcggggagtctgtgaccgtgacaatggacaacgtcggcacgtggatgctgaccagtatgaattcttcacccaggagtaaaaagcttcgcttgaagtttcgcgacgtcaagtgcatccctgatgacgacgaagactcctatgagatctttgagccacctgaatccaccgtcatggccactagaaagatgcacgacaggctcgagcccgaagacgaggaatcagatgctgactacgattaccagaacaggttggcagccgctttgggaatcagaagctttaggaatagttcactgaatcaggaggaggaagaattcaatcttactgcactggcactcgaaaacggcacagagttcgtaagctccaacacagatattatagtggggtctaactattctagtcccagtaacatctctaaatttaccgtaaataacctggcggagccccagaaggcaccttcccaccagcaagccaccacagcagggtcaccattgcggcaccttattggcaagaatagcgtgctgaattcttccacggccgagcactcctctccctactccgaggacccaattgaagaccccctgcagccagacgtcactggcatacggctcttgtctctgggtgcaggagagtttaagagccaggagcatgccaaacacaaaggacctaaggtcgagagggaccaggcagccaaacataggttcagctggatgaagcttctggcccataaagtggggcggcacctgtcccaggatactggtagcccatcagggatgcgcccctgggaggaccttcctagtcaggacaccgggagccctagcaggatgagaccatggaaagacccgccaagcgatctgttgcttctcaaacagagcaactcctctaaaatcctggtgggacgctggcatctcgccagtgagaaagggagttacgagatcattcaggacacagatgaggatacagctgtgaacaactggctgatctcaccccagaacgcttcaagggcttggggtgagtcaacacctctggctaacaaaccgggtaagcagagcggacaccccaagttcccccgcgtgcggcataagtccctgcaggtgagacaagacggggggaaaagtcggctgaaaaagagtcaattcctgatcaagacaaggaaaaagaaaaaagagaagcacacccaccatgccccacttagtcctagaacgtttcacccactgcgcagcgaggcatacaacaccttctccgaaagaagactgaaacatagcctggtcctgcacaagagcaacgagacctcattgcccactgaccttaatcaaactttgccaagcatggactttggatggattgcctcccttcctgatcacaatcaaaatagctccaacgacacaggccaggcgtcctgcccgcccggcttgtaccagaccgttcctcccgaagaacactaccagactttcccaatccaggaccctgaccagatgcatagcacctctgatccaagccaccgatcctctagccctgagttgagtgagatgctcgagtacgatagatcccacaagtcatttcccactgatatttcccagatgagcccatcttctgagcatgaggtgtggcagactgtgatttccccagacttgtcacaggtgaccctgagccctgaactgtcccagaccaatctgtcccctgaccttagccatactacgctgagcccggaactcatccaacgcaatctgagtcctgccctggggcagatgcccatctctccagaccttagtcacaccaccctgtctcctgatctttcccacactaccctgagtctcgacctgtcacagaccaatctgagtcctgaactctcccagaccaacctgtcacccgcgctcggacagatgccactgtctccggacctgtcccacaccacattgtcactggacttttcacaaaccaatttgagccccgagttgagccacatgaccctgagcccagaactctctcaaaccaacctctcccccgctctgggtcagatgcccatctcccccgacctgagccatacgacactgtctctggacttcagccagacaaacctgagtccagaattgtcccagaccaacctgtcaccagccctgggacagatgccactgagccctgacccgtcccataccacactgtctcttgatctgtctcagacaaacctgagccccgagctgtcccagactaatctgtcaccagatctgtccgagatgcccctcttcgctgatctgtcacagatccccctcacacccgacttggatcagatgaccctcagtcctgacctcggcgagactgatctttcacccaatttcgggcagatgagtctgtccccggacctgagccaagtgacactgtcacctgatatctccgacaccaccctgctcccagacctctcccagatatcacccccgcccgacctggaccaaatcttttatccctctgagagttcccagagtctgctgctgcaagaatttaatgaaagtttcccctacccagatctggggcagatgccatcacccagttcccccacgcttaacgatacattcctcagcaaagaatttaaccccctggtgatagttggactgagcaaagacggaacagattatatagaaatcattcccaaggaggaggtgcagtcatccgaggacgattacgcggagattgattacgtgccctatgacgacccgtataaaacagacgtccggacgaatatcaactcatctagagatcccgataacatcgctgcttggtaccttaggagcaataacggaaataggcggaactactatattgcagcagaggagatcagctgggactattctgagttcgttcagagagaaacagacatcgaggattctgatgatatcccagaagacactacttataagaaggtggtcttccggaagtacttggatagcacttttaccaagcgagatccccgcggagagtatgaagaacacctcggcatcctggggcctattatcagggctgaggtcgatgacgtcatccaggttaggtttaaaaacctggcttcacgcccatatagtcttcatgctcatggcctctcctacgagaagtcttctgaaggaaagacttacgaagatgacagccccgagtggttcaaagaggataacgccgtgcagcccaatagctcttacacctatgtgtggcacgcgacagaaaggtcaggaccagagtcccccggaagcgcttgcagggcttgggcgtattactcagccgtgaacccagaaaaggacatccatagtggactgatcggacctctgctcatttgccagaaggggatccttcataaggacagtaatatgccaatggatatgcgcgagtttgtgttgctcttcatgacctttgacgaaaagaaatcctggtactacgaaaaaaagagccgcagttcctggcggctgacgtcatctgaaatgaagaagagccatgaattccacgccatcaacggtatgatttacagcctgccggggctcaagatgtatgagcaggagtgggtgagattgcacttgcttaacattggagggagtcaggacatccacgttgtacacttccatggacagacactgctggaaaatggcaataagcagcatcaactgggtgtttggcctctgctgcctggtagcttcaagacgttggaaatgaaggcttccaagccagggtggtggctgctcaacaccgaggtaggcgagaaccagagagctggtatgcagactccttttctgattatggacagggactgccgaatgcccatgggactcagtactggaattatcagtgattcacagatcaaggcttccgagtttctcggctactgggaaccccgcctggcacggctcaataatggaggctcatataacgcctggtcagtggagaagctcgctgctgaatttgccagcaagccatggatccaggttgacatgcagaaggaggtgatcattacgggtattcagactcaaggggcaaagcattatctgaagtcatgctatacgactgagttctatgttgcgtactcaagcaatcagatcaattggcagatcttcaaaggcaactctacaaggaacgttatgtatttcaatggaaatagcgatgccagtaccatcaaagaaaaccagttcgaccctcctattgtagcacgctacatccggatatcacccactcgggcgtacaaccggccaactttgcgccttgagctgcagggctgcgaagtaaacggctgcagcactccactcggcatggagaacgggaagatagagaataagcagattaccgctagttcttttaaaaaaagttggtggggcgattactgggagcccttccgcgctagactgaatgcccaaggcagggtcaacgcgtggcaggcaaaagctaataataacaagcagtggctggaaattgacttgctgaaaatcaagaagattaccgctattataacacaaggatgcaaatcactgtcatccgagatgtacgtgaaatcttacactattcattatagcgaacaaggggtagagtggaagccatacaggctgaaatcatccatggttgataagatcttcgaaggaaacacgaatacaaaggggcacgtcaagaatttcttcaaccctccaatcatcagtagatttatcagggttatcccaaagacctggaatcaaagcatcgcactccgacttgagctcttcggctgcgacatctac

SEQ ID NO: 9153 - DNA, 6672 bp, synthetic construct; identical to SEQ ID NO: 9106
  misc_feature 1..6672: note = source = /note="Description of Artificial Sequence: Synthetic coding sequence"
  source 1..6672: mol_type = other DNA

SEQ ID NO: 9154 - DNA, 6672 bp, synthetic construct
  misc_feature 1..6672: note = source = /note="Description of Artificial Sequence: Synthetic coding sequence"
  source 1..6672: mol_type = other DNA
atgtttcctgggtgtcctaggttgtgggttcttgttgttttgggaacttcatgggtcggttggggctcacaaggtacagaggctgctcagcttcgtcaattctatgtggctgcacagggaatttcttggtcatatagaccggaacccacaaatagttcattgaatttgtccgtcactagttttaaaaagatcgtatatagggaatacgaaccatacttcaaaaaggaaaagccgcagagtaccatcagtggtctcctcgggcctacactgtatgctgaagtgggtgatattattaaagttcatttcaagaataaggcggataaaccgcttagcatccatccgcaagggatcaggtacagtaaactttccgaaggcgcttcctatctggatcatacttttccagctgaaaagatggacgatgcagttgctccaggtagggagtacacttacgaatggtctatatcggaggactctggacctactcacgatgacccaccatgtcttacccatatatattactctcacgaaaaccttatcgaagattttaactctgggcttattgggccactactaatttgcaagaagggtaccttaacagaagggggtactcagaaaacattcgataagcagatagttctgttattcgctgtctttgatgaatccaagtcatggtctcaatcttcctcattgatgtacacagtcaatggatacgtgaacgggacaatgccagacatcacagtgtgtgctcacgatcatatttcttggcacctcttaggtatgagcagtggcccagagcttttctccattcactttaatggacaagtattagagcagaaccatcataaggtttcagcaattactttggtcagtgccacttctactaccgctaatatgaccgtcggtccagaggggaaatggataatctctagtttaacacccaaacatctgcaggctggaatgcaggcatacatcgatatcaaaaactgccctaaaaagactagaaatcttaagaaaataactagggaacagagacgtcacatgaagcgttgggaatatttcatcgcagctgaggaagtcatctgggactatgctcctgttatccctgcgaatatggataaaaaatacagatctcaacacctagataatttttcaaatcagatcggaaaacattacaagaaagtgatgtatacccaatatgaggatgaatcttttacaaagcatactgtgaatccaaatatgaaggaagacggaatcttgggaccaatcatacgagcacaggtccgggatacacttaaaattgttttcaagaatatggccagccgtccttactcgatttacccgcacggtgtcactttctcgccttacgaagacgaggtcaactcttccttcacttcaggacgaaacaacactatgattcgcgctgtccaacccggcgaaacatacacttacaagtggaacatactcgagtttgatgagccaacagagaatgacgcccaatgcttgactaggccttactacagtgatgttgacattatgcgtgatattgcttctggcctcattggactattgttgatctgtaagagccgttccctagacagaagggggatacagagggctgcagatattgaacaacaagcagtttttgctgttttcgatgaaaataaatcttggtacttagaggataacattaacaagttttgcgaaaatcctgacgaagttaagcgggacgatccgaaattctatgaatctaatatcatgtcaactataaatgggtatgtcccagagtcaattaccaccttgggattttgttttgatgacacagttcagtggcatttttgtagtgttggtacacaaaatgagatcttgacaattcattttaccggtcactcctttatttatgggaagaggcatgaggatactttgacactttttccaatgagaggtgagtccgtaacagttactatggacaacgtggggacttggatgctgacaagtatgaatagcagcccccgaagtaagaaactgcggcttaaatttagagacgtaaagtgcatccctgatgatgacgaggactcctacgaaatattcgaaccgcctgaatctactgttatggctactcgtaagatgcacgatcgtttggagcccgaagatgaggaatctgatgcggattatgattatcagaacaggttggcagcggctcttggtatcaggtcatttaggaatagtagtctcaatcaagaggaagaagaattcaatttgactgctcttgccctggagaatggaactgagttcgtgtcttcgaatactgatatcattgtgggcagtaactatagttccccgagcaatatttctaagtttactgtgaataacctcgctgagccacaaaaagctcccagtcaccaacaagctacaacggccgggtcgcctcttaggcatctgatcggtaagaattctgttctgaattcctccacagcagagcatagctcaccttacagtgaagatcctatcgaggatccactacagcctgatgttactggcattagactgctaagcttgggagctggagaatttaaaagtcaggaacatgcaaagcacaagggcccaaaggtggaacgtgatcaggccgccaagcatcgattttcctggatgaaattacttgctcacaaggtagggagacatctctcacaggacacaggaagtccaagtggtatgcgtccatgggaagacttgccctcacaagatactggaagtccatctaggatgaggccttggaaggatcctccctctgatcttctgcttcttaagcaatcaaatagtagcaaaatccttgttggcagatggcatttggcctcggagaaggggtcttatgagattatacaagatacggatgaagatactgccgtcaataactggttaatcagtccccagaatgcctcgcgcgcctggggagaaagtacacctctggctaataagcctggtaagcaatccggtcaccctaaattccctcgggtcaggcataagagtctccaagtcagacaggatggaggtaagtcgcggcttaagaaatcacaattcctgattaagactcgcaagaagaagaaggagaagcacactcaccatgctcctcttagtccgaggacttttcaccctctccgatcagaggcatacaatactttctcagaaaggcgattgaaacattccttggtccttcacaaaagtaatgagactagtctgcccactgatttgaaccaaactttaccatccatggattttggatggatagcttctcttcccgatcataaccagaattctagtaatgacactggccaggcttcatgccctccagggctctatcaaactgtccctcccgaggaacattaccaaacatttcctatccaagaccctgaccagatgcattccacatctgatcctagccatagaagtagttcgcctgaacttagtgaaatgcttgaatatgatcgttctcacaaatcatttcccacagatatctctcagatgagcccttcatccgaacatgaagtgtggcagactgtaatatcccccgatttgagccaggttactttgtctcctgagttatcccaaaccaaccttagtccagatctcagtcacactacactaagtcccgaacttattcagagaaacctgagtcctgcattgggtcaaatgccgatatcaccagatttgtcgcatactaccttgagcccagatctgtcccatactacgctttccctagatctatcacaaaccaacctttccccagaactcagtcaaacgaatctctctccagcactggggcagatgcctctctctccggatttgtcccatactactctgtcattggatttcagccaaacaaatcttagtcctgaactgtcccatatgaccttaagtcccgaattatcccaaacaaaccttagccccgcacttggccagatgccaatttctccggatctttcgcatacaacactatcattggatttctcgcagacgaatttaagcccagagctgtcacagacaaatcttagtccagctctaggtcaaatgccactctctcctgatccttcacataccacattatctctcgacctgtcccagaccaatctgtcgcctgaattatcacaaacaaatctcagccctgatctctctgagatgccactgtttgccgacttgtcacagatacctctcactcctgatttggatcagatgacactttctccagatctgggcgaaaccgacttaagtccaaacttcggtcagatgagcttatctccagatttgagccaagtaacgctcagccctgatatatccgatacgaccctcctacctgatctttcccaaatttctccaccgcccgatctcgaccagatcttctatcctagcgagtcctcccaaagtttgctcttgcaggaatttaatgagtcattcccctatcctgaccttggacagatgccctcaccttctagccctactcttaatgatacatttttgtcaaaggaatttaatcctttagtgatcgtcgggctgtcaaaagacgggactgattatattgaaatcatccctaaagaggaagtgcagagctctgaagacgattacgctgagattgattatgtcccgtatgatgatccatataaaacagacgtcaggactaatatcaactcctcgcgcgatcccgacaatatcgccgcctggtacctgcgatctaacaatggaaaccgacgtaattattatatagcagcggaagaaatttcttgggattactcagagtttgtgcaaagggagactgatatcgaagattcggatgatatcccggaagataccacgtataagaaggtggtgttcaggaaatacctagactctacctttacgaagcgtgatcccagaggagaatatgaggagcatttgggtatcttgggacctattattagagcggaggttgatgatgtgatccaagttagatttaagaatcttgccagcaggccttatagtctgcatgcccatggattgagttatgagaaaagcagcgaaggtaaaacttacgaggatgacagccctgaatggtttaaggaggataatgctgtccagcctaactcatcttacacttatgtttggcatgctacggaaagatctgggcccgagtcacctggtagcgcttgtcgagcttgggcgtattactcagccgtgaatcctgaaaaagacatacattctggtttgatcggaccgcttctaatttgtcagaagggtatcttgcataaagactctaacatgccgatggatatgcgagagttcgttcttctgttcatgacttttgacgagaaaaaaagctggtactacgaaaaaaagtctagatcttcgtggaggcttacgagctcagagatgaaaaagagtcacgagtttcatgctataaatgggatgatttattctttgccagggttgaaaatgtacgaacaggaatgggttagactccatctgttgaatattggaggctcccaagatatacacgtcgttcacttccacggacaaaccttgctggagaacggaaataagcagcaccagcttggtgtttggcctttgttgcctggttcattcaagacccttgagatgaaggcttcaaagccgggttggtggttgctgaataccgaggtgggtgagaatcaaagggctggtatgcagaccccgtttctgatcatggacagggactgtaggatgccaatgggacttagcactgggattattagtgattctcaaataaaagcttccgaatttctcggatattgggagccaaggttagcaaggttaaataacggaggctcatataatgcctggtcagttgaaaaactcgcagctgaattcgcatcaaagccctggattcaagtagacatgcaaaaggaggttattattaccgggatccaaactcagggagctaaacactacttgaagagctgttacaccacagaattctacgttgcttattcgtctaatcaaataaattggcagatattcaaggggaatagtactcgtaacgttatgtatttcaatggaaattcagatgcgagcactataaaggaaaaccagtttgaccctcctatagttgctcgttatattaggatttcccctactcgagcctataataggccaactctaaggcttgagttgcaaggctgcgaagtgaacggctgtagtacaccactaggcatggagaacgggaaaattgaaaataagcagattactgcatctagtttcaaaaagtcatggtggggagattactgggagcccttccgcgccaggctcaatgcacaaggccgcgtgaacgcttggcaagcaaaagccaacaacaacaagcagtggctggaaatagacttgcttaaaattaagaagattactgctataataacccaaggctgtaaaagcctttcctctgaaatgtatgtgaaatcttatacgatacattattctgaacaaggagttgagtggaagccatataggctcaaatcgagtatggtggacaaaatatttgagggtaataccaataccaagggccacgttaaaaatttctttaaccctccaatcatttcaagattcatcagagtcattcccaagacttggaaccagtctattgcgcttaggcttgaactgttcggttgcgacatctac

SEQ ID NO: 9155 - DNA, 6672 bp, synthetic construct
  misc_feature 1..6672: note = source = /note="Description of Artificial Sequence: Synthetic coding sequence"
  source 1..6672: mol_type = other DNA
atgtttcctggttgtcctcggctgtgggtcctcgtggttctggggacttcctgggttggttggggctctcaaggaaccgaggctgcacagctgcgtcaattctacgtagctgcacaggggatctcctggtcttataggcccgaaccaaccaactcatcccttaacctctcagtaacttcctttaaaaaaattgtgtatagggagtacgaaccttacttcaagaaagaaaagccacagtctacaatatctgggctgctgggccctaccctatacgcggaagtgggagatattataaaagtccattttaagaataaagctgataagcccctcagtatacacccgcagggcattcgctactccaagctgtccgagggagcaagctacctggaccacactttccccgcagagaagatggacgatgcagtggccccaggtagagaatacacatacgagtggtccatcagcgaggattccggcccgacacacgacgaccccccttgtctgacccatatctattacagccacgaaaacctcatcgaggactttaacagcggcttgattgggcccctgctgatctgtaagaagggcaccctgaccgaggggggaacccaaaagacatttgataagcagattgtcttgttgtttgctgtctttgatgaatctaagagttggagtcagtccagttcactgatgtatacagtgaacggatacgtcaacggaaccatgcccgatataacagtttgcgcccacgatcatatttcttggcatcttctggggatgtctagtggcccagagttgttcagtatccatttcaacggtcaggtgctcgagcagaaccatcacaaagtgagcgcaatcacccttgtttcagctacctctaccactgcaaatatgactgtcggacccgaggggaagtggatcatctcctccctgacaccaaaacacttacaggcaggcatgcaagcttatattgacattaaaaactgccctaaaaaaacaagaaaccttaaaaagatcacaagagagcagaggcgccatatgaagcgctgggaatacttcatcgctgcggaagaagttatctgggactatgctccggtgatccctgcgaacatggataagaaataccgaagccagcacctcgataattttagcaaccaaatcgggaaacattacaagaaagttatgtatacccaatatgaagatgagtcatttaccaagcatacagtcaatcccaacatgaaggaggatggaatcttgggcccaattattagggcccaggttagggatacgcttaaaattgtgtttaagaatatggccagtaggccatactcaatttacccgcatggagtgacattctccccgtacgaggatgaagtcaacagcagcttcacctccggtcgcaataacacaatgattagggccgtccagcccggagagacgtacacctacaaatggaatatcctggaattcgatgaacccactgaaaatgatgcccaatgtcttaccagaccatattactccgacgtcgacattatgagggacattgcttcagggctgatcggattactgctgatctgcaaatctcgctctttggacagaaggggaattcaaagagcagcagatatcgaacaacaagccgtctttgctgtctttgatgaaaataaaagctggtatcttgaagacaatatcaataaattttgcgaaaacccagacgaggtcaaaagggatgacccgaagttctatgaaagtaatatcatgtccaccatcaacggatacgttcctgaaagcattaccaccctcggattctgctttgacgataccgtccaatggcacttttgctctgtcggcacccaaaacgagattctgactatacacttcaccggtcactcattcatctacggaaaaaggcatgaggacacactgactctgtttcctatgcgaggagagtcagtgaccgtgacaatggataacgtgggaacttggatgctcacaagtatgaatagcagccctcgcagcaaaaaattgagactcaaattccgcgacgtgaaatgcatcccagatgatgacgaggactcatatgagatctttgaacctcctgaaagcaccgtgatggcaaccagaaagatgcacgatcgccttgaacccgaggatgaggaaagtgacgcagattacgactaccaaaataggttggctgctgcccttggcattcgatcgtttaggaacagtagcctgaaccaggaagaagaggaatttaaccttacagcacttgccctggagaacggcactgaatttgttagttctaacactgacatcattgtggggagtaactatagctcacctagcaatattagcaagtttaccgtgaataatctggcagaaccccagaaggcgcctagccatcagcaggccactacagctggctcccccctccggcacctgatcggaaagaacagtgttctgaactcctcgactgccgagcacagcagcccatatagtgaggaccccatagaggatccactgcaacccgacgtcacaggaataagattgttgagccttggcgccggagaatttaagtcacaagaacacgctaagcataaaggaccaaaagttgaaagagatcaggcagccaaacaccgcttcagctggatgaaacttcttgcacacaaggttggaagacatctgtctcaagacaccggtagccccagcggcatgaggccttgggaggatcttcctagccaggataccggttctccttcaaggatgaggccttggaaagaccccccctcggacttgctcttgctgaaacagagtaacagttcgaagatccttgttggccgctggcaccttgcctccgaaaaaggaagttatgaaatcatccaagatacagacgaagacaccgccgtcaacaattggctgattagccctcagaacgccagccgagcttggggggagagcacacctttggccaataaacccggcaaacagtctgggcatcctaaatttccccgcgtgagacacaagtcgctgcaggttagacaggacggaggcaagtcccggctgaagaagtcacaatttctcatcaagacacgtaaaaagaaaaaagagaaacatacacaccatgcccctctttctccaagaaccttccacccgctcaggagcgaagcatacaacaccttctctgaaagacgactgaaacacagccttgtactgcataagtccaacgagacctcactgccaacggatctgaaccagaccctcccttcaatggacttcggatggatcgcctcactgccggaccacaaccaaaacagttctaatgatactggccaagctagctgccctcctggtctgtatcagacagtgccaccggaagagcactaccaaactttcccaatccaggatcccgaccaaatgcactcaacctccgacccctcccaccgctcctcaagcccagagctctctgaaatgctggagtacgataggtctcataaatccttccctactgatatttcccagatgagcccgagcagcgagcacgaagtttggcaaactgtcatatcccctgatttgagtcaagtcactttgagccccgagctcagccagaccaacctgtctccagatttgagccacacgactctctctccggagctgatccaacgtaatctttccccggccctcggccagatgcctatcagccctgatctctctcacacaactttgagccccgatttgtcccacaccaccttgagccttgacctgagtcaaaccaatctttcaccagagctgtcccagacaaacctgtctcctgccttgggtcaaatgcccctgagccccgatctgtcgcacacaaccctgagccttgattttagccagaccaacctctcaccagaactgagccacatgaccctctcacccgaactgagtcaaacaaatctttctcctgccctggggcaaatgcctatctctccagatctctctcatacaacactttctctggactttagtcaaaccaatctgagtcctgagctgagccaaactaacctcagtcctgctctcgggcagatgccactgtctcccgatcccagtcatacaaccctgtcactcgatctgtcccagactaacctgagcccagaacttagtcagaccaacctctcacccgatcttagtgaaatgccactctttgcagacctttcccagatccctttgacccctgatttggaccagatgacactgtctcctgatttaggcgaaacagacctgagtccaaatttcgggcagatgtcactgagtcccgatctgagccaagtgacactgagcccagacatctccgacacaaccttactccctgacctctctcagatttctccgcctcctgacctggatcagatattttaccctagcgaatcatcccaaagcctgctgttgcaagaattcaatgagtccttcccttaccctgacctgggacagatgccgagcccatcttctcccactctgaacgatacttttctatcaaaggaatttaatcctctggtaatagtcggtctgagtaaggatgggaccgactacatcgagatcataccgaaagaggaagttcagagtagcgaagatgactatgccgagattgactacgtcccttacgacgatccttataaaacagatgtgcggaccaacataaactcttctagggatcctgacaatatcgccgcctggtaccttcgcagcaataacggaaacaggcgcaactactacatcgccgccgaagaaatttcctgggactacagtgaattcgtacagcgtgaaaccgatattgaagactccgacgatatccctgaggatacaacctataaaaaagttgttttcagaaagtacttggattccacctttaccaaacgagatccacggggagagtatgaagaacacttgggcatcctgggtcccattatccgggccgaagtggatgacgtgatccaggtgagatttaagaatctcgcatcaaggccgtattctttgcacgcgcatggcctgtcttacgaaaagagcagcgaaggcaaaacttatgaggacgattcgcctgaatggttcaaagaggacaatgcagtgcagcccaactccagctatacctacgtatggcatgcaacagagaggagcggcccagaatcaccaggctcagcttgcagggcctgggcatactattctgccgtgaaccctgagaaggacatccactctggtctgattgggccgcttctcatctgccagaagggtatcctgcacaaagatagtaacatgcctatggacatgagagaattcgtcctcctgtttatgaccttcgacgagaaaaagagctggtactatgaaaagaagtcacgatcctcctggaggcttacatctagtgaaatgaaaaaatcacatgagtttcacgctattaacggcatgatttattccctgcccggacttaaaatgtacgagcaagagtgggtgagactgcatttgctcaacattggtggaagccaagacatccatgtcgtgcacttccacgggcagacccttctcgaaaacggcaacaagcaacaccaattgggcgtgtggcccctcctgccgggatcctttaaaacattagaaatgaaagctagcaaacccggatggtggttgctcaacaccgaagtcggagagaaccagagggcagggatgcagactcccttccttattatggatagggactgtagaatgcctatgggcctgagcacggggattatctctgattcacagatcaaagcttccgaatttctgggttattgggagcccaggttggccagactgaacaatggcgggtcctacaacgcttggagcgtggagaagcttgccgccgagtttgccagcaagccctggattcaggtcgatatgcagaaggaggtgataatcaccggaatacagacacaaggggcaaagcattatttgaaaagctgttacactactgagttctatgtggcttatagcagcaaccagatcaattggcaaatctttaaaggtaactctacaaggaacgtcatgtatttcaatggcaacagcgacgctagcaccatcaaagagaaccagttcgacccccctattgttgctcggtatatccgtatcagccccactagagcttacaacagacccacgctgcggctggagctgcagggatgcgaagtgaacggttgctccactccactgggcatggagaacggcaagatcgaaaataagcagataaccgccagcagcttcaagaagtcatggtggggagattactgggaaccgttccgcgctaggttaaacgctcaggggcgcgtcaacgcatggcaggctaaggccaacaacaacaaacagtggctggagattgatctgctgaaaataaaaaagatcacagccatcattacacagggatgcaagtctctctcaagcgagatgtatgttaaatcatacacaattcattacagcgaacaaggcgtggagtggaaaccatataggctgaagagctctatggtcgataaaatctttgagggaaatacaaacaccaaaggacacgttaagaacttctttaaccccccgatcatcagccgctttatcagagttattcctaaaacctggaatcagtctattgcactgcggttagaactgttcggatgcgatatatac

SEQ ID NO: 9156 - DNA, 1398 bp, synthetic construct
  misc_feature 1..1398: note = source = /note="Description of Artificial Sequence: Synthetic coding sequence"
  source 1..1398: mol_type = other DNA
atggtgagccaggctctgcggctgctgtgccttctgctgggcctgcaagggtgcctcgcagctggaggagtggccaaagccagcggcggggagactcgggacatgccgtggaaaccggggccgcaccgcgttttcgtgacccaggaggaggcacacggcgtcctgcaccgccggcggcgcgcgaacgcgtttctggaagaactgaggccaggatcactcgagcgagaatgtaaggaagaacagtgctcgtttgaagaagcccgcgagatcttcaaggacgccgagcgcaccaagctcttctggatttcctactccgacggcgatcagtgcgcctcgagcccgtgccaaaacggaggatcatgcaaggaccagctccagtcatacatctgcttctgtctgccagcattcgagggccgcaactgcgaaacccacaaggatgaccagctgatctgcgtcaatgagaacggggggtgtgaacaatactgctcagaccataccggcactaaaaggtcatgccgctgccacgaggggtactcgctgctggcggatggcgtgtcctgtacgccgactgtcgaatacccgtgtggaaaaatccccatcctggagaaaagaaatgcctcgaagccgcaaggtcgcatcgtgggcggaaaggtgtgtcctaaaggagaatgcccctggcaggtgctgttgctcgttaacggagcccagttgtgcggcggcaccctgatcaacactatctgggtcgtgtccgcagcccactgctttgataagatcaagaattggcggaacttgatcgctgtgctgggggagcatgatctctcagagcatgacggagatgaacagtcacgcagagtggcacaggtcatcatcccgagcacttacgtgccgggaactactaaccatgatatcgccctgttgcggctgcatcagccggtggtgcttactgaccatgtggttccgctctgcctcccagaacggaccttttcggagcgaactctcgcatttgtccgcttctcactcgtgtccggatggggccagctgcttgaccgcggagccaccgctctcgaactgatggtcctcaatgtgcctagactgatgactcaggactgcctgcaacagtcgagaaaggtgggagactcgccgaatatcactgaatacatgttttgcgcaggatactcggacggctctaaagactcctgcaaaggtgattcaggcggcccccacgctacccactaccgcggaacctggtacctgaccggaatcgtgtcgtgggggcaggggtgcgctactgtcggtcactttggtgtatatactcgggtgtcgcagtacatcgagtggctccagaaattgatgcgcagcgaaccgcggccaggagtgctcctccgcgctccattcccg

SEQ ID NO: 9157 - DNA, 1398 bp, synthetic construct
  misc_feature 1..1398: note = source = /note="Description of Artificial Sequence: Synthetic coding sequence"
  source 1..1398: mol_type = other DNA
atggtcagtcaggctctgagactgctttgtttgttgctgggcctacaggggtgcctcgccgccggcggcgtggctaaagcgagtggcggggaaaccagagacatgccatggaaacccggcccacatagagtgttcgttacgcaggaggaagctcacggcgtgctccatagacgtaggagagccaatgccttcttagaagaacttcgtccaggctctctggagagggagtgcaaggaggaacagtgctccttcgaagaggctcgcgagatctttaaggacgccgaaaggacgaaactgttttggatatcttatagcgacggagaccagtgtgctagctctccctgccagaacggcggttcatgcaaagatcagttacagtcctacatttgtttttgcctgcccgccttcgagggcaggaactgtgagacacacaaggacgatcagttgatttgcgtgaacgagaatggtgggtgcgaacagtattgcagtgaccacaccggcacgaagcggtcttgccggtgccatgaaggctactctctgctggctgatggggtttcctgcacccctaccgtagagtatccatgcggcaagattcccattctcgaaaagagaaacgcatccaaaccccaggggcgtatcgtcggtggaaaagtctgtcctaagggagaatgtccctggcaggtgctgcttctggtgaatggcgcacagctttgcggtggaaccctcatcaacactatctgggtggtgagcgcagcccactgcttcgacaagataaaaaattggcgtaacctcattgccgtgctgggcgaacacgatctcagcgaacatgatggcgatgaacagtcccgccgcgtcgctcaagtgattataccctctacatatgttcccggtactacaaaccatgacatcgccttacttaggctccaccagcccgtggtcctgaccgatcacgtggtcccattgtgcttgcccgagcgcaccttcagcgagagaaccctggcctttgttcgattcagcctggtgtccggttggggtcagctgctcgaccggggcgccaccgcactggagctcatggtcctgaatgtacccagactgatgacacaggactgcctccaacagtcccggaaagtcggtgactcccctaatatcaccgagtatatgttttgcgcggggtacagtgatggttcgaaggactcctgcaaaggcgactccggagggccgcacgccacgcattaccgggggacctggtatctgaccggcatagtatcttgggggcaggggtgcgctaccgtcggccactttggagtgtacacacgcgtgtctcagtatattgagtggctccagaagcttatgcggtctgaacctagacctggggtgctgttgagagcgcctttccca

SEQ ID NO: 9158 - DNA, 1398 bp, synthetic construct
  misc_feature 1..1398: note = source = /note="Description of Artificial Sequence: Synthetic coding sequence"
  source 1..1398: mol_type = other DNA
atggtgtcccaggccctcagactcctgtgcctgctcctgggattgcagggatgtctcgcagccgggggagttgctaaagcgagcgggggcgaaaccagagatatgccctggaaaccaggtccacatcgggtgtttgttactcaggaggaagctcatggggtactccacagaagaaggagagccaatgcttttctcgaagagctgcggcccggttccttggagagggaatgtaaagaagagcaatgctcctttgaggaggcccgagagatttttaaagacgctgaacggacaaagctgttctggattagctactccgacggagatcagtgtgctagctctccctgccaaaacggcggcagttgcaaagatcaactgcagtcttacatatgtttctgtttgccagccttcgaaggccgaaactgtgagacacataaggacgatcaactgatctgcgtgaacgagaacggaggttgcgagcagtactgttcagatcacaccggcaccaaaaggagttgtcgatgccacgaagggtactcactcctcgcggatggagtgtcttgtacgcccaccgtcgagtatccatgcgggaagattcccatactcgagaaacgcaacgcgtccaagcctcagggccggatcgtgggcggcaaggtttgcccgaagggagagtgcccctggcaggtgctgctgttggtgaacggggcgcagctgtgcggaggtaccctgattaacaccatatgggttgtcagtgcagcacactgttttgataagatcaagaactggagaaatctcattgccgttctgggggaacacgatcttagcgagcacgacggagacgagcagtctaggagggtggcccaggtgattataccgtctacctacgtgcctggcacgacaaaccacgacatcgctctgctccgattgcaccagccagttgtgctcacagaccacgttgtgcccctgtgcctccctgaacggacattctccgaaaggacgctggcgttcgtcaggttcagtctggtgtccggttgggggcaactgctcgatcgcggagccacagccctggagctcatggtgttgaacgtgccaagactgatgacccaagactgtctgcagcaaagtagaaaagtcggggactcccccaacattaccgagtacatgttctgcgcaggatattcagacggttccaaagactcctgtaaaggagactctggtggtccgcacgcaacccattacaggggtacttggtatttgaccgggattgtgagttgggggcagggctgcgccaccgttggccactttggagtgtatacgcgagtcagccagtatatcgaatggctgcagaagctgatgaggtcagagccgcggcccggggttctgctgagggctcccttcccg

SEQ ID NO: 9159 - DNA, 1398 bp, synthetic construct
  misc_feature 1..1398: note = source = /note="Description of Artificial Sequence: Synthetic coding sequence"
  source 1..1398: mol_type = other DNA
atggtgtctcaggccctccgtttgctttgccttctgctgggcctgcaaggctgcttggcggccggaggagttgcaaaggcttctggaggcgaaaccagggacatgccatggaaaccaggcccacaccgcgtatttgtcactcaggaagaagctcacggcgtgcttcatcgcaggagaagagctaatgcatttctggaggaactgaggcccggctctctggagagggagtgtaaagaggaacagtgctcgttcgaggaggcccgagaaatctttaaggacgctgagcgaactaagttattttggatctcttatagtgatggggaccagtgcgctagcagcccttgtcagaatggcggttcgtgcaaggatcaactgcagtcatacatctgtttctgcctgcccgctttcgagggcagaaattgtgagacgcataaggacgatcaactgatctgcgtcaatgaaaatggaggttgtgagcaatactgctccgatcacactggtactaagcgcagctgtcggtgccacgagggatactccctattggctgatggagtgagctgtactccaactgtggaatatccatgtggtaaaataccgattctggagaaacgcaatgcatccaaaccccaggggcgcatcgtggggggaaaggtgtgccctaaaggggaatgcccgtggcaggtcctgctgctcgtgaacggtgcccagctatgtggggggacactcatcaatactatttgggtggtgagcgcagcgcattgtttcgataagatcaaaaactggcgcaacttaatcgctgtgctgggagagcacgacttaagtgagcatgacggcgacgagcagtcgcggcgcgtggcccaggtaataattccctccacgtatgtgcccggcacaacaaaccatgatatagcgctgttgagactgcaccaaccagttgtgctgactgatcacgtggtacctctatgccttccagagcgcaccttctccgagcgcacgttagccttcgtgaggttttcgctggtttccggatggggacaactgttagaccgaggtgccactgctctcgaactgatggttttaaacgtccctcggctgatgacacaggactgcctccagcagtcacggaaggtgggggattccccaaacattaccgaatatatgttctgcgccggctattctgatggatccaaagattcttgcaaaggcgacagcggcggtcctcacgctactcattatagagggacttggtatttgacgggaatcgtatcctggggacagggctgcgccacagtaggccatttcggcgtgtataccagagtttcccaatatatcgaatggctgcagaaattgatgcgtagcgagccgcgtccaggtgtgctactccgtgccccattccct

SEQ ID NO: 9160 - DNA, 1398 bp, synthetic construct
  misc_feature 1..1398: note = source = /note="Description of Artificial Sequence: Synthetic coding sequence"
  source 1..1398: mol_type = other DNA
atggtgtcccaggccctccggctcctgtgccttttgctggggttgcagggatgcctggccgcgggaggagtcgccaaagcctcgggcggagaaaccagagacatgccgtggaagcctggcccgcatcgggtgttcgtgacccaagaagaagcccatggagtgctgcaccgccgtagaagagcaaatgcgtttctggaggagctgcgccctggatcattggaacgcgagtgcaaggaagaacagtgttcgtttgaagaagcaagggagattttcaaggacgcagaaaggaccaaattgttctggatctcctactctgatggcgatcaatgcgcatctagcccatgtcagaacggaggatcgtgcaaagaccagctccagtcatatatctgtttctgcctgcctgctttcgaaggccgcaactgcgagactcacaaagacgaccagctcatttgtgtcaacgaaaatggagggtgcgagcaatactgctccgaccataccggcactaagaggtcgtgtcggtgccacgaaggctactcactgctcgccgacggagtgtcctgcacgccgactgtggaatacccatgcggcaagataccgatcctggagaaacggaacgcctcaaagccgcagggccggatcgtcggtggaaaggtgtgtcccaagggagagtgcccgtggcaggtactgctgctggtgaatggcgcccaactgtgtggtggaaccctgatcaacactatttgggtcgtgtccgcagcgcactgtttcgacaagatcaagaactggcggaatttgatcgctgtcctcggggagcacgacctgtcagagcacgacggcgatgagcagagccgtcgggtggcgcaggtgatcatcccatccacttacgttcccggtactactaatcacgacatcgcactcctgcggctgcatcagcctgtggtcttgacggatcacgtggtcccgctctgcctgccggaacggaccttttccgagcgcaccctcgcttttgtccgcttcagcctcgtgagcgggtgggggcaattgctggatcgcggcgccacggcgttggagcttatggttctgaacgtgccgcgactgatgacccaagactgtctccagcaatcaaggaaggtgggagattcccctaacatcacggaatacatgttctgcgccggatactcagacggatcgaaggatagctgcaaaggtgatagcggaggtccacatgcgacccactaccggggcacttggtacctgaccggaatcgtgtcctggggacagggctgcgctaccgtgggacatttcggagtatatactagagtgtcccaatacattgaatggcttcaaaaacttatgagaagcgaaccaaggccaggggtactgttgcgagcgcccttccca

SEQ ID NO: 9161 - DNA, 1398 bp, synthetic construct
  misc_feature 1..1398: note = source = /note="Description of Artificial Sequence: Synthetic coding sequence"
  source 1..1398: mol_type = other DNA
atggtgtcacaagctctccgattactctgtctcctcctgggcctgcaggggtgtctagctgcaggaggcgttgcaaaggcctctggaggtgagacacgtgacatgccttggaaaccggggccccatagagttttcgtcactcaggaagaggcccatggcgtcctccatcggcgccgccgcgcgaatgctttcctggaagagctgcgccccggttccctggagcgggaatgcaaagaagagcaatgtagctttgaagaggcccgggagatttttaaggacgccgagcgaactaaactgttctggattagttacagcgacggcgatcaatgtgcctcgtcaccatgccagaacggtggcagctgcaaagaccagttacagtcctacatatgtttctgcctccccgcttttgaaggccggaactgtgaaacccataaagatgatcaactcatttgtgtgaacgaaaatgggggatgtgagcaatactgcagtgatcatacaggtaccaagcgttcatgccgctgccatgagggttatagtctactagcagatggtgtaagctgcacccccacggtagagtacccttgcggcaaaattcccatcttagaaaaacgaaatgcaagcaaaccacagggtcgcattgtcggcggcaaggtctgtccgaagggagaatgtccctggcaggtcttattgctcgtaaatggcgcacagctgtgtgggggaaccctcatcaacactatttgggtagtctctgcagcacactgttttgacaagattaaaaactggcgcaatttgatcgctgtgttgggtgagcatgatctgtcagagcacgatggcgatgagcagtcacggagagtcgctcaggtgatcatcccgagtacctacgttccaggaacaacaaaccatgacatcgcgttgctaaggctacaccagcctgtcgttctgactgatcatgtggtcccgttgtgcctcccggagcgcacattcagcgagaggaccctggcgttcgttcgtttcagcctcgtctctgggtggggacagctactagatagaggggccaccgctttggagttaatggtacttaatgtcccgaggctgatgactcaagattgtttacagcagtccagaaaagttggggattcacccaatatcaccgagtatatgttctgtgcggggtactcagatggtagcaaggacagttgtaagggtgattcaggtggcccccacgctacccattacagaggtacctggtatcttactgggatcgtgtcgtggggacaggggtgtgccactgtcggacactttggagtatacacccgcgtgagccaatacattgaatggcttcaaaagctaatgcgttccgagccgagacctggagtattgctccgtgctccctttcct

SEQ ID NO: 9162 - DNA, 1398 bp, synthetic construct
  misc_feature 1..1398: note = source = /note="Description of Artificial Sequence: Synthetic coding sequence"
  source 1..1398: mol_type = other DNA
atggtgtctcaggcactcagactgctgtgtctgttgctaggactccagggctgtctggctgctggaggagtcgctaaagcttccggaggagaaacccgggacatgccctggaagccgggaccacacagagttttcgtaacacaagaggaagcacacggcgtgctgcaccggcgcagaagagcaaacgctttcctcgaagaactcaggcccggatcactggagagggagtgtaaagaggagcagtgctcctttgaggaagcaagggaaatcttcaaggacgcagagagaaccaagctcttttggataagctactcagacggcgatcagtgcgcttcttcgccctgtcagaacggcggctcatgcaaggaccaactacagagttatatttgtttttgtctgccagcctttgaaggtagaaattgcgagacccataaagatgatcagttgatttgcgtgaatgagaacggggggtgcgagcagtattgctctgaccatactggaaccaaacggtcttgccggtgccacgagggctacagccttttagcagacggcgtgagttgcacgcctactgtggagtacccgtgcggcaagatccccattctggaaaaaaggaacgcttcaaagccccaagggcgcatcgtgggtggcaaggtgtgccccaagggcgagtgcccttggcaagtgctgctcttagtgaatggggctcaactctgtggcgggacactaatcaacacaatctgggtggttagtgcggcccattgtttcgacaaaatcaaaaattggagaaatctcatcgcagtgcttggagaacacgacttatctgagcacgatggggacgagcagagtaggagagtagctcaggtgatcatcccatccacttacgttcccggcacaaccaaccatgacatcgccctgctgagattgcatcagccagtggtgctgactgaccatgtagtccccctctgcttgccagaacggacattttccgaaagaacactagcattcgtgcggttttcacttgtgtccggatggggccagctacttgatcgcggagccaccgccctcgaactgatggtcctcaatgtgcctcggctgatgacccaggattgcctccagcagtctcgcaaagtgggggattcacctaacatcaccgagtacatgttctgcgctggctatagcgacggaagcaaagactcctgtaaaggcgactctggaggacctcacgccacacactatcgggggacttggtacttaacaggcatagtgagttggggccagggctgcgctacagtgggtcatttcggagtttacacaagagtctcacagtacatagaatggttacagaagctcatgcggtctgagcctcgtccaggagttctgctgagggcccctttcccc

SEQ ID NO: 9163 - DNA, 1398 bp, synthetic construct
  misc_feature 1..1398: note = source = /note="Description of Artificial Sequence: Synthetic coding sequence"
  source 1..1398: mol_type = other DNA
atggtctcacaagctctgcgtttgctctgcctgctcctggggctgcagggttgtcttgccgctggcggagtggccaaggcgagcggaggggagactagagacatgccctggaagcctggacctcatcgggtgttcgtgacacaggaagaggcccacggagtgctgcatcgcaggcgtcgggcgaacgctttcctggaagagctgaggcccgggtcccttgaaagggagtgcaaggaggagcagtgtagttttgaagaagctcgggaaatttttaaggacgcggagcgcacgaagctcttttggataagctactctgatggcgaccagtgtgctagctcaccctgtcaaaatggaggctcctgcaaggaccagctacagtcatacatatgcttttgtttgcccgcgttcgagggcaggaattgtgaaacccacaaggacgatcagctgatatgcgtcaacgagaatggtgggtgcgagcagtactgctcagatcacaccgggacaaaacgttcttgccggtgccacgaaggctattccctgttggcggacggagtaagctgtaccccgacagtggagtatccgtgcggaaaaatacccatactggaaaagagaaacgcaagcaagcctcaggggcgcatcgtagggggtaaggtgtgtcctaagggtgaatgtccgtggcaggtcttgttgctggtaaacggagcacagttgtgcggaggtacgctcataaacaccatttgggtcgtgagtgccgctcattgcttcgataagattaaaaactggaggaacttgattgccgttctcggggagcatgatttatcagaacacgatggggacgagcagagtcggcgggtggctcaggtcattatacccagcacatacgtgccaggtactacaaatcacgatatcgctctgcttaggttgcaccagcccgtagtcctaactgatcatgtggtacctctgtgtctacctgaacggacgtttagcgagcggacactggccttcgtccggttcagtctggtgtccgggtggggccaattactggacagaggtgctactgcacttgagttgatggtgctgaatgtgcctcgcctcatgactcaggactgcctgcaacagtcccgcaaagtcggggactctcccaatatcacagagtacatgttttgcgccggctatagcgacggctccaaggattcttgcaagggcgattcaggcggaccccatgccacccactacagggggacatggtatttgactggcatagtctcatggggccagggatgtgcaacagtcgggcattttggcgtctatacaagagtgagtcagtacatcgagtggttacaaaagttaatgcgcagcgaacctcggccgggggttctgctgagggcgccgttccct

SEQ ID NO: 9164 - DNA, 1398 bp, synthetic construct
  misc_feature 1..1398: note = source = /note="Description of Artificial Sequence: Synthetic coding sequence"
  source 1..1398: mol_type = other DNA
atggtgtctcaggccttgcggctcttgtgtttgctgctgggactgcaagggtgcctcgcggcaggaggcgtggcaaaggccagcggaggagaaacgcgcgacatgccatggaagcctggaccgcaccgcgtctttgtcacccaagaagaggcacacggagttctgcatcgcaggagacgggcgaacgcattcttggaagagctgcggccggggagcctcgaacgcgaatgcaaggaagaacaatgctcgttcgaggaggcaagagagatcttcaaggacgctgaacggactaagctgttctggatctcctacagcgacggggaccagtgcgcatcctccccatgccaaaatggtggctcctgcaaagaccagttgcagtcctacatatgtttttgcctcccagctttcgaaggaaggaactgcgaaacccacaaggatgatcaactgatctgtgtgaacgagaatggcggatgtgagcaatactgttccgaccatactggcaccaaaaggtcttgcagatgccatgagggatattcgctcctggccgacggagtgagctgcacgcctactgtggaatacccctgtggaaagattccaatcctggaaaagcggaacgccagtaagccccaaggccgcatcgtgggtggcaaggtgtgcccgaaaggagagtgcccgtggcaggtactgctgctggtcaatggagcgcagctttgtggaggaactcttatcaacaccatttgggtcgtttccgcggcgcactgcttcgataagatcaaaaactggagaaatctcattgcggtcctgggtgaacacgatctcagcgaacatgacggagacgagcagtcacggcgcgtggcacaggtgatcatcccgtcgacttacgtgccaggaaccaccaaccacgacatcgcgctgctgcggcttcatcaacccgtcgtgctgactgatcatgtggtgccgctttgcctgccggagagaaccttctcggaacggaccctggccttcgttcgcttttcactcgtgagcggctggggacaactgctggatcggggtgcgacggcgctcgagctgatggtgctcaatgtgcctcggctgatgactcaagactgcctgcaacagagcagaaaggtgggagactcgccgaacattactgaatacatgttttgtgcggggtatagtgacggatcaaaagattcgtgtaaaggagactcgggtggacctcatgcaacgcactacaggggaacctggtacctgacgggtatcgtgtcctggggtcagggctgcgcaaccgtgggacacttcggtgtctacacgcgggtgtcacagtacatagaatggctgcagaagctgatgcgctcagagccacggcccggagtgctgttgagggccccattcccg

SEQ ID NO: 9165 - DNA, 1398 bp, synthetic construct; identical to SEQ ID NO: 9159
  misc_feature 1..1398: note = source = /note="Description of Artificial Sequence: Synthetic coding sequence"
  source 1..1398: mol_type = other DNA

SEQ ID NO: 9166 - DNA, 1398 bp, synthetic construct
  misc_feature 1..1398: note = source = /note="Description of Artificial Sequence: Synthetic coding sequence"
  source 1..1398: mol_type = other DNA
atggtatcacaggccctgaggctgttatgtctgctcttggggctgcaggggtgccttgctgcaggcggtgtagccaaagccagcggaggggaaactcgggatatgccttggaaaccaggaccacatagagtgttcgtcacccaggaggaggctcacggggtcctgcatcggcgcagacgggctaacgcctttctggaggaattgcgacccggtagcctcgagcgcgaatgcaaagaggagcagtgcagctttgaagaggctagagaaatctttaaagatgctgagagaaccaagctcttctggatttcctactccgatggcgaccagtgcgccagcagcccgtgtcagaacggtggatcctgcaaggaccagctgcagtcttacatttgcttctgtctcccggcattcgagggaagaaactgtgaaacccacaaagatgaccagttgatctgcgtaaatgaaaacggagggtgtgagcagtactgctcggatcataccggaaccaagcgctcctgtagatgccacgagggttactcactattggcagatggcgttagttgcacaccgacagtggaatatccctgcggcaagatccctatcctggagaagcgaaacgcctcgaagccacagggccgtattgtgggcggcaaggtgtgtcctaagggagaatgcccttggcaggtcctcctgctcgtaaacggcgcacagctgtgcgggggaacactgatcaacacaatctgggtggtgagtgcggcccactgcttcgataagatcaaaaattggaggaacctgatcgcagtgcttggggagcacgacctgtctgaacacgacggtgatgagcagagcaggcgtgtggctcaggtaataatccctagcacttacgttccaggaacaactaatcatgatatagcactgcttaggctgcatcagccggtagtgttaaccgaccacgtagttccgttgtgtctgcccgaaagaaccttcagtgagagaacacttgcatttgttcgtttcagcctggtcagcggctggggtcagctcctcgacaggggcgccacagctctggaactgatggtactcaatgtccctaggcttatgactcaggactgtctgcaacagagtagaaaggttggagatagtcctaatatcacagagtacatgttctgtgccggctactcagatggtagcaaagattcttgcaaaggcgacagtgggggcccacatgccacacactacaggggtacctggtacttaaccgggatcgtttcatgggggcagggatgcgcgactgtgggccacttcggggtctacacacgcgtttcgcagtacattgagtggcttcagaaactgatgcgcagcgagccaagacccggtgtgctgttgagggctcccttccca

SEQ ID NO: 9167 - DNA, 1398 bp, synthetic construct
  misc_feature 1..1398: note = source = /note="Description of Artificial Sequence: Synthetic coding sequence"
  source 1..1398: mol_type = other DNA
atggttagccaggctttgcgcctcctgtgtttactcttggggttgcaggggtgcttggcggccgggggcgtggctaaagctagtggcggagagacaagagatatgccctggaagcccgggccacaccgcgtattcgttactcaggaggaggcccacggagttctacaccgccggaggcgagccaatgccttcctggaagagctccggccggggtctttggagagagagtgcaaggaggagcagtgtagcttcgaagaagcaagagagatcttcaaggacgcagaacggacaaaactcttttggattagttactctgatggagaccagtgcgcctcgtccccctgtcaaaatggcggctcatgcaaggatcagctacagtcctacatttgcttctgtttgccagctttcgagggacggaattgtgaaacccacaaagacgaccagctgatttgtgttaatgagaacggaggctgcgaacagtactgcagcgaccacaccggcaccaaaaggtcttgtcggtgccacgagggatactccctgctcgccgacggagtctcctgtacccctactgtggagtatccttgcggtaagatccccattttggagaaacgtaacgcatcaaaaccacagggccgcattgtgggagggaaggtctgcccaaagggagagtgcccatggcaggtcttgttgctcgtgaatggagcacagctgtgtggagggacgctcatcaacacaatctgggtggtatctgccgcccactgttttgacaaaattaagaattggaggaatttgattgcggtgttaggtgagcacgacctttctgagcatgatggtgatgagcagtcacggcgcgtagcccaggtaattatcccctccacctacgtgccgggaaccaccaaccacgacatagcgctgttgaggctacaccagccggtggtcctcacggatcacgttgtgcctctgtgcttgccagagaggactttttcggagcggaccttggcctttgtgcggttctcacttgtttcgggctgggggcagcttctggataggggggctacggctctggagctgatggtgctgaacgttccaaggctcatgactcaggactgcctccagcagtccaggaaagtgggtgacagcccaaacattacagagtacatgttttgcgcagggtatagcgacggctcaaaagactcctgcaagggggactctggggggcctcatgcaacacattaccggggaacctggtacctaacaggtattgtctcttggggccaaggttgtgcaaccgtgggtcacttcggagtgtacacccgggtctcccagtatattgagtggttgcaaaaacttatgagatctgagccacgcccaggagtgctgctgcgcgctccatttccc

SEQ ID NO: 9168 - DNA, 1398 bp, synthetic construct
  misc_feature 1..1398: note = source = /note="Description of Artificial Sequence: Synthetic coding sequence"
  source 1..1398: mol_type = other DNA
atggtgtcccaagcgctgagactgctgtgcctcctccttggactgcaagggtgtctggccgcgggtggggttgcgaaggcctccgggggcgaaaccagagatatgccatggaagcccggcccccatcgcgtgttcgtgacccaggaagaagcacatggagtcctgcatagacgacgccgagcaaacgcgtttctggaggagcttcgaccaggctcccttgagagggagtgtaaggaggagcaatgttcctttgaggaagcgcgggaaatcttcaaagatgcagagcgcactaagctgttttggattagctactcagacggagatcagtgcgcttcgagcccatgtcaaaacggaggatcttgtaaagaccagcttcagtcgtacatttgtttttgtttgcctgcgttcgaagggagaaactgtgaaactcacaaggatgatcagctgatttgcgtcaatgaaaacggaggttgtgaacaatactgtagcgatcacaccggaaccaagaggtcatgtcgctgtcatgaaggctactcgttgcttgcagatggggtgagctgtacccctacggtggaatacccttgtgggaagattccaatcctggaaaagcgtaatgctagcaagccacaaggaagaattgttggaggaaaggtgtgtcccaagggggaatgtccctggcaagttttgctgctcgtcaacggcgcccaactgtgtggtggcactctgataaacaccatctgggtggtttcggcagcacattgctttgataagatcaaaaactggcgcaaccttattgctgtgctgggggagcatgatcttagcgaacatgacggtgatgagcaatcacgacgcgtggcacaggtcattatcccttcgacttacgtgcccggtacgaccaaccacgacattgcacttctccgcctgcatcaacctgtcgtgctgaccgatcatgtggtgccactttgccttccggaaagaacttttagcgaacgtaccctggcgtttgtgcggttttcgctcgtgtccgggtggggacagttgcttgatcggggtgcaaccgcactggaactgatggtgctcaacgtgcctcgtctgatgacccaggactgcctgcaacagtcaagaaaggtgggagactcacccaacattaccgagtatatgttctgtgcaggatactccgatggttcgaaagattcctgcaagggagactccggaggtccacacgcgacccactaccgaggtacctggtaccttactgggatcgttagctggggtcaagggtgcgcaacggtgggacattttggagtgtacaccagagtgtcacagtacatagaatggcttcaaaagctgatgagatctgaaccacggcctggtgtgctgcttcgggcaccatttccc

SEQ ID NO: 9169 - DNA, 1398 bp, synthetic construct
  misc_feature 1..1398: note = source = /note="Description of Artificial Sequence: Synthetic coding sequence"
  source 1..1398: mol_type = other DNA
atggtgtcacaggccttacgtctcctgtgcttgctcctggggcttcaggggtgcttggctgccggcggagttgccaaggcttccggtggagagactagggatatgccttggaagccggggcctcatcgagtttttgttacccaggaggaagcccatggagtcttgcaccgacggcgcagagccaatgccttcctggaggagctgaggccaggatcactggaacgggaatgtaaggaagaacaatgcagctttgaagaagccagagagattttcaaggatgctgagaggacgaaactcttttggatcagttattctgatggcgaccaatgcgcgtcttccccgtgccagaatggagggtcctgtaaggatcagcttcagagttacatttgcttctgtcttccggcatttgagggcagaaactgtgagacccacaaggatgatcagctgatctgcgttaatgaaaacgggggttgtgagcagtactgttctgaccatactggaacgaagcggtcgtgtcgctgtcacgaggggtactcccttctggctgatggagtgagttgtacccctacggttgagtacccctgtggaaagatccccattctggagaagcgcaatgcttctaaaccccaggggcgaatcgttggtggaaaagtttgccccaaaggcgagtgcccctggcaggttttgcttcttgtaaatggcgcccaactgtgcgggggcaccctgataaacacgatttgggtagtttcagccgcccactgtttcgataaaatcaaaaactggcgcaatttgatagccgtgctcggggaacatgacttatctgagcacgatggagatgaacagagcagacgcgtggcacaggttatcattccttccacctacgtgccaggaacaaccaaccatgatatagcgctgctgcgacttcatcagcccgttgtgctcactgatcacgttgtacccctgtgcctgccagaacgtacgttctctgaacgaacacttgctttcgtgcggtttagcctggtgagtggctgggggcagctgctcgaccgcggcgcaactgcattggagctgatggttctcaacgtacccaggctgatgacgcaggattgccttcagcagtctcgaaaggttggcgactccccaaatatcacggagtacatgttctgcgccggatactcagatgggagcaaggatagctgtaagggggactctgggggaccccacgctactcactatagaggtacatggtatttgactggtattgtttcttggggacagggttgcgcaacagtggggcatttcggcgtgtatactcgggtgtcgcagtatattgagtggctgcagaagctgatgcgcagcgagcctcgacctggtgtgctactccgcgcaccttttccg

SEQ ID NO: 9170 - DNA, 1398 bp, synthetic construct
  misc_feature 1..1398: note = source = /note="Description of Artificial Sequence: Synthetic coding sequence"
  source 1..1398: mol_type = other DNA
atggtgtctcaagccctccggctcctctgccttctgctcggactgcagggctgtctcgccgcaggaggcgtggccaaagcctcgggaggagaaactagggacatgccgtggaagccgggaccgcacagagtgttcgtgacgcaggaggaagcacacggtgtcctgcataggagacgtcgcgccaatgcttttctggaagagctgcgcccaggttcgcttgagcgcgaatgtaaggaggaacagtgctcgttcgaggaagcgcgcgaaatcttcaaagacgcggagcggactaagttgttctggatcagctactcggacggagatcagtgcgcgtcatcaccctgccagaacggaggttcgtgtaaggaccagctgcaatcgtacatctgtttttgcctcccagctttcgagggtcgcaactgcgagacgcataaggacgaccaacttatttgcgtgaacgaaaatggaggatgtgaacagtactgctccgaccacaccgggactaaacggagctgtcggtgccacgaaggctactcgctgctggcagatggagtttcctgcactcctactgtggaatacccgtgtggaaaaatccccatcctggagaagcgaaacgcgagtaagcctcagggcagaattgtcggaggcaaggtctgcccgaaaggcgaatgcccttggcaagtgctgctcctcgtgaatggagctcaattgtgcggggggaccttgatcaataccatctgggtggtgagcgccgctcactgcttcgacaagatcaagaactggcgcaatctcattgccgtcctcggagaacatgaccttagcgagcacgatggagatgaacaatcccgcagagtcgcccaagtgatcatcccatcaacctatgtgcccgggaccaccaaccacgacatcgccctgctgcgcctgcatcagccggtcgtactcactgaccatgtggtcccgctgtgcctgccagagaggactttcagcgagaggactctggcttttgtccggttctcactcgtgagcgggtggggtcagctgcttgatagaggcgcaaccgcgctggagctgatggtgctgaacgtcccgagactcatgactcaggactgcttgcaacagtcgcggaaagtgggagatagcccgaacatcaccgaatacatgttctgcgccggctactcagatggatccaaggattcctgcaagggagactcaggaggtccacacgccacccactaccgggggacgtggtacttgaccggaattgtgtcctggggccagggctgcgcaaccgtgggccattttggggtgtacactcgggtgtcccaatacatcgaatggctgcagaagctgatgcgctccgagccacgccctggagttctgctgcgggcgcctttcccg

SEQ ID NO: 9171 - DNA, 1398 bp, synthetic construct
  misc_feature 1..1398: note = source = /note="Description of Artificial Sequence: Synthetic coding sequence"
  source 1..1398: mol_type = other DNA
atggtcagtcaagcccttcgtctgctttgtttacttctcggacttcaaggatgccttgccgcaggaggagtcgcaaaggcctcgggaggagagactagagatatgccatggaaacctgggcctcatcgagttttcgtaactcaggaggaggcacatggagttctgcaccgtcgccgtcgggctaatgcctttttggaagagcttcgccctggatctctcgagcgtgaatgtaaagaagaacaatgctctttcgaagaggcccgagaaattttcaaagacgctgagcgtactaaacttttttggatatcatactcggatggtgatcaatgcgcatcctccccatgtcagaatggaggatcatgtaaagaccaacttcagtcctatatatgtttttgtttgcctgcttttgaaggaagaaattgtgaaacgcataaggatgatcaacttatttgtgtaaatgaaaatggaggatgcgaacagtattgctcggatcatacaggaacaaaacgaagttgccgatgccatgagggatactctctactggcagatggagtctcgtgtactcctactgtggagtacccatgcggaaaaattccaattcttgaaaaaaggaatgctagtaagccacagggacgtatagtgggaggtaaggtttgtccaaaaggagagtgtccatggcaggtgctccttctggtgaatggagctcaattgtgcggagggacgttgattaatactatatgggttgtttcagctgcacattgtttcgataagatcaaaaattggcgaaatctcattgcggtcttgggagaacatgacctgtctgaacatgatggggatgaacaaagccgacgagtggctcaagtgattattcccagcacatacgttccaggcacaactaaccacgacattgctcttcttcgtttgcaccagcctgtggttttaacagatcacgtagttccactgtgtctcccagagcgaacattcagtgagcgtaccctcgcatttgtgagattctctttagtctctggatggggacaacttcttgacagaggagcaaccgcgctagaacttatggttctgaatgtacctcgtttaatgacacaagattgcctacagcaatctaggaaggtaggtgattcaccgaatatcacagagtacatgttctgtgccggctattccgatggatctaaagatagctgtaagggcgactccggaggacctcatgcaactcattatcgcggaacatggtacctcacgggaattgtctcttggggtcagggatgtgccacagttggacattttggagtttacacacgtgtctcacaatacattgaatggttgcaaaagctaatgcggtcggaaccacgccctggggtccttttgcgggctccattccca

SEQ ID NO: 9172 - DNA, 1398 bp, synthetic construct
  misc_feature 1..1398: note = source = /note="Description of Artificial Sequence: Synthetic coding sequence"
  source 1..1398: mol_type = other DNA
atggtcagtcaggcgctcagacttctctgcctcctgctggggttgcaaggatgtctggccgccggaggcgttgctaaggcctctggaggggaaacccgcgacatgccgtggaagccgggccctcaccgagtgttcgtgactcaagaggaagcccacggagtgctgcaccggcgcaggcgggcaaatgccttcctcgaggagcttcgccccggttcactcgagcgcgaatgcaaggaagaacagtgcagcttcgaggaagcccgcgagatcttcaaggacgcggaacggacgaaattgttttggattagctactcagatggagatcaatgcgcatcctcaccttgccagaatggaggctcgtgtaaggaccagctgcaatcgtacatctgcttttgtctgcctgcatttgaggggaggaactgcgagactcacaaggacgaccagctgatctgcgtcaacgaaaatggaggatgcgaacagtattgctccgatcacaccggcactaaacgatcgtgccgctgccatgagggttactcactcctggcggatggagtcagctgcaccccgactgtggagtacccatgcggaaagatccccatcttggagaaacgcaatgcgtcgaaacctcaaggacgaatcgtgggaggaaaggtgtgcccgaagggagaatgtccatggcaagtactgttgcttgtcaacggcgcccagctctgtggtggtaccctcattaacactatctgggtggtatcggcagcacactgcttcgacaaaatcaaaaactggcggaacctgatcgctgtgctcggagagcacgacctgagcgaacatgacggagatgagcagtccagacgcgtcgcgcaagtcatcattccatcaacctacgtcccgggaacgaccaaccacgacatcgccctgcttcggcttcatcagccagttgttctcactgaccatgtggtgcctttgtgtttgccggaacgcaccttctcagaacggactctggctttcgtgcgcttttcactcgtgtcaggatggggtcagctgctggaccgcggagcgaccgccctcgaactgatggtgcttaacgtgccgcgcctcatgacccaggattgcctgcagcagtcgcgcaaagtgggcgattccccgaacattaccgaatacatgttctgcgccgggtattcagacgggtccaaggactcgtgcaagggtgactccggaggtccgcacgcgacccattaccgcggaacttggtacctcactggaatcgtgtcgtgggggcagggctgtgccactgtgggacacttcggcgtctacaccagagtcagccagtacatcgagtggctgcagaaacttatgcgctcggaaccgcgccctggtgtcctgcttagagccccgtttcct

SEQ ID NO: 9173 - DNA, 1398 bp, synthetic construct
  misc_feature 1..1398: note = source = /note="Description of Artificial Sequence: Synthetic coding sequence"
  source 1..1398: mol_type = other DNA
atggtgagccaggcactgaggctgctgtgtctccttctcggactgcagggatgtcttgcagccggtggagtcgcaaaagcgagcggcggcgaaacccgcgacatgccgtggaagccaggccctcatagagtgtttgttactcaggaagaggcgcacggcgttctgcataggaggaggcgtgcaaatgccttccttgaagaacttcgccctggttcgctggagagggaatgtaaggaggagcagtgcagctttgaggaagcgcgggagatattcaaggatgccgaaaggaccaaacttttttggatttcctactctgatggtgaccaatgtgccagctcaccatgtcaaaacggaggatcatgcaaggatcaattgcagtcctacatttgcttctgtctgccggcatttgagggcaggaactgcgaaacccataaggatgatcaactgatatgcgtcaacgaaaacggaggttgtgaacagtattgttcggatcataccggtactaaacgctcgtgccggtgccacgagggttactctctgctggcggatggagtgtcctgtactccaactgtggaatacccatgcgggaaaatccctattctcgaaaagcgtaacgcctccaagccacagggtcgcattgtcggcggtaaggtgtgtcctaagggtgaatgtccttggcaggtccttttgcttgtgaacggcgcacaactttgtggaggtacgctgatcaacactatctgggtggtcagcgcagctcattgcttcgataagatcaaaaactggaggaacctgattgcggtgcttggagaacacgacctttcggaacatgatggagacgaacaatcgagacgggtggcacaagtcattatcccgtccacctacgtgccagggacgactaatcacgatatcgcactccttcgacttcaccaaccggtggttctgactgatcatgttgtgcctctttgtctgcccgaaagaaccttttccgaaagaactctcgcgtttgtgcggttttcactcgtgtcagggtggggtcagctgctggacagaggggcaaccgcactggagttgatggtccttaatgtgcctagacttatgacgcaagactgcctgcaacaatcgcggaaggtgggagactcccctaatatcaccgagtatatgttctgtgctgggtactcggatggttctaaggattcatgtaaaggggactccggtgggccacacgcgacccattaccggggaacctggtacttgactggtattgtgtcgtggggccaagggtgtgcaactgtcggacatttcggagtgtacacgcgggtgtcgcaatacatcgagtggctccagaaacttatgcggagcgaacctcgacccggggtccttctgagagcgcctttccct

SEQ ID NO: 9174 - DNA, 1398 bp, synthetic construct
  misc_feature 1..1398: note = source = /note="Description of Artificial Sequence: Synthetic coding sequence"
  source 1..1398: mol_type = other DNA
atggtcagccaggcgctacgattgctgtgcctcctgttgggactgcagggctgccttgccgcgggaggcgttgccaaggctagtgggggggagaccagagatatgccgtggaagcctggcccacaccgggtctttgtgacacaagaagaagcccacggggtgctgcatcggcgtcggagggcgaacgcctttttggaggagctacggcctgggtcgctagaacgcgagtgtaaagaagagcaatgttctttcgaagaggcgcgcgagatcttcaaagacgctgagcgcaccaagttgttttggatcagttatagcgacggcgaccagtgcgctagcagtccctgccaaaatgggggaagctgtaaagatcagctgcagtcttacatctgcttttgcctccctgcctttgaaggtagaaactgtgagacgcataaggatgaccaactgatctgtgtgaatgagaatggcgggtgcgagcagtactgttctgatcacactggcacgaagagatcctgtcgctgccatgagggatacagtctgctggccgacggagtgagttgcactcccactgttgagtacccttgcgggaagattccgatcctggagaaaaggaacgcttcaaaaccacagggtcggattgtaggaggtaaggtctgccctaaaggcgagtgcccttggcaggtcttattattggtgaatggtgcccaactctgcggcggcacgctgattaacactatctgggtggtgtcggcagctcactgttttgacaaaatcaagaactggaggaatttaatcgccgtcctcggcgaacacgacctgtctgagcacgatggtgacgagcagtctcgcagggtcgcacaggtgattatcccctcaacgtatgtgcctggcaccacaaaccacgatatagcgttgctcagattacaccagccagtcgtgctgacagatcacgtggtcccactctgtctgcccgaacgaaccttttctgaaaggacactcgcatttgtgcggttctccctggtgtccgggtggggacaactgctggataggggagcaactgccctggaactgatggtcctgaatgtcccccggctgatgacacaggactgcttgcagcagtctcgaaaggtcggcgacagtccaaacatcacagaatatatgttttgcgctggatattctgacggaagcaaagacagttgcaaaggcgacagtggagggcctcatgcaacacattaccgagggacttggtatttgacggggatagttagctggggacagggttgtgccaccgtaggccatttcggagtatacacccgcgtgagccagtacatcgaatggttgcagaaacttatgcgatctgaaccacggcccggggtgctgctcagagctccattcccg

SEQ ID NO: 9175 - DNA, 1398 bp, synthetic construct
  misc_feature 1..1398: note = source = /note="Description of Artificial Sequence: Synthetic coding sequence"
  source 1..1398: mol_type = other DNA
atggtcagccaagcccttcgcttgctgtgtctgcttttgggtctgcagggttgcctcgcggctggaggggttgcgaaagccagcggaggcgaaacgagggacatgccttggaaaccaggcccacacagagtgttcgtgactcaagaagaagctcatggcgtgcttcaccgccgccgtcgggccaacgcattcctggaggagctccgcccgggtagcctcgaacgggaatgcaaggaggaacagtgctccttcgaggaagcccgggaaatcttcaaggacgcagaaaggaccaagctcttctggatttcgtactccgacggtgatcagtgcgcgtcctcaccgtgtcagaatggcggatcctgcaaagaccaactgcagtcctacatctgcttttgtctcccggcattcgagggacggaattgcgagactcataaggacgaccaactgatctgtgtgaacgaaaacggcggatgtgaacagtattgctcggaccacaccggaaccaaaagatcatgcaggtgccatgagggatacagcctgctcgcggacggagtgtcatgcacccctacggtcgaatacccttgcggcaagatcccgatcctggagaagcgcaacgcgtcaaagccgcagggacgcatcgtgggagggaaggtgtgtccgaagggggaatgcccatggcaggtgctccttctcgtcaatggagcccaattgtgtggaggcaccctgatcaacaccatctgggtggtgtccgccgctcattgcttcgataagatcaaaaactggcgcaacctcatcgcggtcctgggggaacacgacctgtccgagcacgacggagatgaacaaagccgcagagtggcccaggtgatcatcccctccacctacgtccctggaacgaccaatcatgatatcgcgctgctgaggctgcaccagccggtcgtattgactgaccacgtggtgccgctgtgcctcccggagagaactttttccgagcggactctggcattcgtgcgcttcagcctggtgtcgggctggggacagctgctcgaccgcggcgccactgcacttgaactgatggtgctgaacgtgcctcgcctcatgacccaggactgccttcaacagtcccggaaagttggcgactcaccaaacatcactgagtatatgttctgcgcgggatattcggatggatccaaggactcgtgcaaaggggactcgggaggaccccatgcgacccattacaggggaacctggtatcttaccggaatcgtgtcttggggacaaggatgcgcaactgtgggtcatttcggagtgtacacccgggtttcgcagtacattgagtggctccaaaagctcatgagatccgagccgcggccgggcgtgctgctccgggcccctttccct

SEQ ID NO: 9176 - DNA, 1398 bp, synthetic construct
  misc_feature 1..1398: note = source = /note="Description of Artificial Sequence: Synthetic coding sequence"
  source 1..1398: mol_type = other DNA
atggtgtcacaggcgttgagactcctgtgcttgttgctcggacttcagggctgcttggcggcaggaggagtggcaaaggccagcggtggcgagactcgtgatatgccttggaagcctggtcctcatcgtgtctttgtgacccaagaagaggcgcatggagtgcttcatagacgacgccgcgcgaatgcctttcttgaggaacttaggccgggaagtctggaacgcgaatgcaaggaagagcaatgctcgtttgaggaagccagagaaatctttaaggacgcagagcggaccaagttgttttggatctcttactcagatggtgaccaatgtgcatcgtccccatgccagaacggaggttcgtgtaaggatcaactgcaaagttatatctgtttttgtctgcccgcctttgaaggccgaaattgtgaaactcacaaggatgaccagctcatatgtgtcaatgagaacgggggttgcgaacaatactgctcggatcatactgggactaagagatcatgtcgctgtcatgaaggctactcgctgctggcagatggagtctcgtgtactcccactgtggaatacccttgtggtaagattcctatacttgagaaacggaatgcttccaaaccacaaggtcggattgtggggggcaaagtctgcccaaagggagaatgtccgtggcaggtgcttttgctggtaaacggagcacagttgtgtggtggaactctgataaacaccatttgggtggtgtcggctgcgcattgtttcgataagatcaaaaactggagaaacctgattgcagtgcttggcgaacacgacctgtcggaacacgacggcgacgaacaatcacggcgcgtggcgcaggtcatcattcccagcacctacgtgccgggaactaccaaccacgacatagcactgctcaggctgcaccaacctgtggtcctcactgaccatgtggttcctctgtgcctgcccgaaagaactttctcagaaaggacccttgcctttgtacgcttctccctggtttccgggtggggccagcttcttgacagaggagcaacggcactggagcttatggtgctgaacgtgccccgtcttatgacccaggattgcctgcaacagtccaggaaggtgggcgattcgccgaatatcactgagtacatgttctgcgccgggtactcggatggttcgaaggattcgtgtaaaggagatagcggaggtccacatgcaacccattatcggggtacgtggtaccttaccggcatcgtcagctggggacaaggctgtgccacggtgggtcattttggtgtctacactcgtgtgagccagtacatcgagtggctgcagaagctcatgcgttccgagcctcggcccggggtcctgctgagagcacccttccct

SEQ ID NO: 9177 - DNA, 1398 bp, synthetic construct
  misc_feature 1..1398: note = source = /note="Description of Artificial Sequence: Synthetic coding sequence"
  source 1..1398: mol_type = other DNA
atggtgagtcaagcattgcgattactgtgcctgctgctaggactgcagggatgcctcgcagccgggggcgtggcaaaagcctcgggaggcgagacgcgggatatgccttggaaacccgggcctcaccgagtgttcgttacacaggaggaagctcacggggtccttcatcgacgtcggcgcgcaaatgccttcctggaggaactgcggcccggatcgctagagagggaatgtaaggaggagcagtgctcattcgaggaagcgcgcgagatatttaaggatgccgagcgcacaaaattattctggataagttactctgatggggatcaatgtgcatcaagtccctgccagaacgggggctcctgtaaggaccagctgcaaagctacatatgcttctgtttgcctgccttcgagggacgcaattgtgagacacataaggacgaccagctgatttgtgtgaatgagaatggtgggtgcgaacagtactgctcggatcacactgggacaaaacgatcatgccggtgtcacgagggttactcactgttggccgacggagtcagttgtactccaacggtcgaatatccgtgtgggaagatacccatcctggaaaaacgcaatgcatccaagcctcagggacgtattgtgggtggtaaggtgtgccctaaaggcgagtgtccctggcaggtcttactcctggtcaatggcgctcagttatgtggaggtactctcattaacactatatgggtagtgtctgctgctcattgcttcgacaagattaagaattggcgcaatcttatcgccgttctgggagaacatgacctcagcgagcacgacggcgacgaacagagtcgccgggtcgcccaagtgattattccctccacctacgtgccagggactacgaaccatgatattgcccttctccgtctgcaccaacctgtggttctcaccgatcacgtggtgcccctctgtcttcccgagcgaaccttcagtgagaggacattggcctttgttcgatttagcctggtgtcaggatggggacagctgcttgaccggggtgcaacagccttggaactcatggtattgaacgtcccccgtctcatgactcaggattgtctgcagcagagtcgcaaagtgggagactctcctaacatcaccgagtacatgttttgcgctgggtactcagatggttccaaggactcatgcaaaggggacagcggaggccctcatgctacccactacagagggacttggtacctgactgggattgtttcctggggacaggggtgcgccaccgtaggacacttcggagtgtacaccagggtgtcgcagtacattgagtggttacaaaaactgatgcggagcgaaccaagacctggagtcttgctgcgggcccccttccca

SEQ ID NO: 9178 - DNA, 1398 bp, synthetic construct
  misc_feature 1..1398: note = source = /note="Description of Artificial Sequence: Synthetic coding sequence"
  source 1..1398: mol_type = other DNA
atggtttcacaggccctacgcctgctctgtttgcttctgggacttcagggatgcttagctgccggtggggttgccaaagcctcgggcggcgaaacaagggatatgccatggaaacccggccctcatcgggtgtttgttacacaggaggaggctcatggtgtactgcacaggaggagacgtgccaatgcgttcctggaggagttgcgacctggcagtttggaacgagagtgtaaggaagaacagtgttcttttgaggaagcacgggagatcttcaaagacgctgagagaacaaagctgttttggatcagctactcggatggagatcagtgcgcttctagcccttgtcagaatgggggatcgtgtaaggatcagctgcaatcctatatttgtttttgcctacctgcattcgagggacgtaattgtgaaacccataaggatgatcaactgatctgtgtgaatgaaaacggcgggtgtgaacagtactgctccgatcatactggtacgaagcgctcttgccgctgccatgagggatatagcctgttggccgatggagtatcctgtactccgacagttgagtatccatgcggcaaaatcccaatcttagaaaagcgcaacgcaagcaaacctcaaggccgcatcgttggcggcaaagtctgtcccaaaggggaatgtccgtggcaggtactgctactagtgaatggtgcccagctgtgtggaggcacactgatcaataccatctgggtcgtttctgcggcacactgttttgacaagatcaagaattggcggaacttaattgccgttcttggcgagcacgacctgtctgagcatgacggagatgagcagtctaggagggttgctcaagtcatcattccctcgacatacgtacccggcacaactaaccatgatattgccttactgaggttgcaccagccagtggtgttgactgaccatgtcgtccctctgtgcctgcctgagaggacgttttctgagcgcaccttggctttcgtacgattctcactggtatctggatggggtcagctcttggaccggggtgcaacagcattggaactgatggtgctgaatgttcctcggctgatgactcaggattgcctgcagcagagtagaaaagtcggggattctccaaacatcacagagtacatgttttgcgcgggctactcagacgggtctaaggattcgtgtaaaggagacagtggcggtccccatgccacccactatcggggcacttggtatcttacggggatcgtttcgtggggtcaaggatgcgctactgtcggacactttggggtgtacacccgtgtgtctcagtacattgaatggctgcagaaactgatgcgttctgagcctcgaccaggtgtgctgttgcgcgcccccttccca

SEQ ID NO: 9179 - DNA, 1398 bp, synthetic construct
  misc_feature 1..1398: note = source = /note="Description of Artificial Sequence: Synthetic coding sequence"
  source 1..1398: mol_type = other DNA
atggtcagccaggcactgcgcctgctgtgtttacttctgggtttgcagggatgcctggctgcggggggggtggcgaaagcctcaggaggcgagactagggacatgccttggaagcccggtcctcaccgcgtgttcgtcacccaggaggaggctcacggcgtcctccacaggcggaggcgagcaaatgcgttcctggaggagctgcgcccaggttctctggagagagagtgtaaggaggaacagtgttcattcgaggaggcaagagaaatttttaaggatgccgagcggaccaagttattttggatttcatatagtgacggggaccagtgtgcttcatcaccatgccagaacggcggaagctgtaaagaccaactacagtcatacatttgcttttgtcttccggcgttcgagggaaggaactgcgagacccacaaagacgaccagctgatctgcgtcaatgaaaatggcggatgcgaacagtattgctccgaccacaccggcacgaaacggtcctgccggtgccacgagggctatagcttgctggcggacggtgtcagctgtacccccaccgtggagtatccgtgcgggaagatccccatcctggagaaacgaaacgcgtccaaaccccagggacgtatagtgggcgggaaggtgtgtccaaagggcgagtgcccatggcaggtgctcctgctagtgaatggcgctcaactttgcggggggacccttatcaataccatctgggtagtcagcgccgctcactgtttcgacaaaatcaagaattggcgaaaccttattgcagtgttaggcgagcatgacttatccgaacacgatggcgacgaacaatccaggcgggtggctcaggtgataatccccagcacatacgtcccggggacaaccaaccacgacatagccctcctgcgccttcaccagcccgtagtgctgacggaccacgtcgtgccactctgcctcccggagcggacattttccgaacggactttggcctttgtgaggtttagcctggtttccggttggggacagctactggatcgtggagcaaccgccttagagctgatggtattgaatgtgccccggctgatgacacaggattgcctacagcagtccagaaaagtaggggactcacctaacataacagagtatatgttttgcgcggggtacagcgatgggtccaaagactcctgtaaaggcgactcgggcggcccccacgctacacattatcgggggacctggtacttgaccggcattgtgtcatggggacagggatgtgctacagttgggcattttggcgtgtacacaagagttagccagtacatcgaatggttgcagaagctcatgaggtcagagcccaggcctggcgtgctgttaagggcccctttccca

SEQ ID NO: 9180 - DNA, 1398 bp, synthetic construct
  misc_feature 1..1398: note = source = /note="Description of Artificial Sequence: Synthetic coding sequence"
  source 1..1398: mol_type = other DNA
atggtgtcgcaggctctgcgcttgctgtgcctgctgctggggctccaggggtgtctcgctgcgggaggagtcgctaaggcctccgggggagaaactcgcgacatgccgtggaaaccgggaccccatcgggtgttcgtcacccaagaagaagcccatggagtgctccaccggcgccgccgggcaaatgcattcctggaagaactgcggccggggtccctcgaacgcgaatgtaaggaggagcagtgcagcttcgaggaggcacgagaaatcttcaaggacgcggaacgcactaagttgttctggattagttatagcgacggcgaccagtgcgcttcgtcgccttgccagaatggcggaagctgcaaagatcagctgcagtcctacatctgcttctgcctgccggcattcgagggccgaaattgtgagactcacaaagatgaccaactgatttgcgtgaacgagaatggaggatgcgagcaatactgttccgaccatactggaactaaacgctcgtgcagatgccacgaaggttactcgctccttgcggacggagtgtcgtgtactccgactgttgagtacccgtgtgggaaaattccgatccttgaaaagcgcaacgcctcgaagcctcaaggccgcatcgttggaggaaaagtgtgccccaaaggcgagtgcccctggcaggtgctcctgctggtgaacggcgcccaactctgcgggggcaccctgatcaataccatctgggtggtgtctgccgcacactgcttcgataagatcaaaaactggcggaacttgatcgcggtgctgggagagcacgatctctcagagcacgacggagatgagcaatcacggcgggtggcgcaggtgatcatcccttcgacctacgtccccggaacgaccaatcacgacatcgctctgctgagactgcatcaaccagtcgtgttgactgatcatgtggtgccgctctgtctccctgaacggaccttttcagaaagaaccctggccttcgttcggttctctctggtgtccggttggggccagctgctggaccggggcgccactgctcttgaactgatggtgctgaacgtgccacgcctgatgacgcaggattgcctccagcagagccgcaaagtcggagattccccaaatatcactgagtacatgttttgcgcaggctactccgatggatcgaaggattcgtgcaagggagactccgggggcccccacgccacgcattaccgcggaacctggtacctgaccggaattgtgagctggggacagggatgtgccactgtgggacacttcggcgtgtacactcgggtgagccaatacatcgaatggctgcagaagctgatgcggtcggaacctaggccgggagtgctgctgagggccccgttccca

SEQ ID NO: 9181 - DNA, 1398 bp, synthetic construct
  misc_feature 1..1398: note = source = /note="Description of Artificial Sequence: Synthetic coding sequence"
  source 1..1398: mol_type = other DNA
atggtgagccaggcgctgcgcctgctgtgcctgctgttgggactgcagggctgcctggccgctgggggtgtggcgaaggcatctggtggtgaaacccgcgacatgccatggaagcctggtcctcacagagtctttgttactcaggaggaagcccacggtgtgctgcatcgacgacgcagggcgaacgccttcctggaagagctgcgcccggggtcactggagcgcgagtgcaaggaagagcagtgttccttcgaagaggcgcgcgaaatttttaaagacgcggagagaactaagttattctggatcagctattccgatggcgaccagtgcgcatcatctccgtgtcaaaacggtggtagctgcaaggaccagttgcagagctatatctgcttctgcctgcctgcgtttgaaggtcgcaactgcgagacgcataaagacgaccaacttatttgtgtcaacgagaatgggggctgcgagcagtattgcagcgatcatactggtaccaagcgaagctgtcgttgtcacgaaggctacagcctcctggcggacggcgtcagctgcactccaacagttgaatacccctgcggcaaaatcccgattctggaaaaacgcaacgcgtccaaaccgcaagggcgaattgtcggtggtaaggtatgccctaagggcgagtgcccttggcaggtcctgctgctggtgaatggtgcgcagctgtgtggcggaacgctaataaatactatctgggtagtcagtgcggcgcactgctttgataagatcaaaaactggagaaacttaattgcagtgctgggtgaacacgacctcagcgagcacgacggtgatgagcagtcccgcagggttgctcaggttattatcccaagcacctacgttcccggcacgaccaatcacgatatcgcactgctgcgcctgcatcagcccgttgttctgaccgaccacgtggtcccactgtgcctgccggagcgcacctttagcgaacgcaccctcgcgtttgtgcgcttttctcttgttagcggttggggtcaactactggacaggggcgccacggctctagaactgatggtgctgaacgtgccaagactgatgactcaagattgtttgcagcagtctcgcaaggtcggcgactccccaaatattaccgagtacatgttttgtgccggttacagcgacggctccaaagactcttgcaaaggtgatagcggcggcccgcacgcgacccactatcgtggtacttggtacctgactggtatcgtgagctggggccagggttgcgccaccgtgggccatttcggcgtttacacgcgagtgtcccagtacatagaatggttacaaaaactgatgcggtccgaacctcgtcctggtgtactacttcgcgctccattccca

SEQ ID NO: 9182 - DNA, 1398 bp, synthetic construct
  misc_feature 1..1398: note = source = /note="Description of Artificial Sequence: Synthetic coding sequence"
  source 1..1398: mol_type = other DNA
atggtttcacaggcacttcgacttttgtgtctgctgttggggcttcagggctgccttgctgctgggggagtggcaaaggcatcgggaggagagactcgtgatatgccttggaagcccggacctcaccgcgtgttcgtcactcaagaagaagcacatggagtccttcaccgtagaaggcgcgcgaacgcatttctggaagagctgcgaccaggtagtctcgagagagaatgcaaagaggaacagtgctcgttcgaagaggcccgggagattttcaaagacgccgaaagaaccaagctgttttggataagctattcggacggggatcaatgtgcctcctcgccatgccagaacggtggatcgtgtaaagatcagcttcaaagctacatctgcttttgtttgcctgcatttgaaggaagaaactgtgaaactcataaagatgatcaactcatatgtgtgaatgaaaacggagggtgtgaacaatactgttcggaccacaccggtaccaagcgctcctgccgctgtcacgaaggttactccctgctcgcggatggcgtgtcttgcactcctactgtcgagtacccttgcggtaagattccaattctggagaaaaggaacgcatccaagcctcaaggtcgcattgtggggggtaaggtgtgtcctaagggagaatgtccgtggcaggtgcttctgcttgttaacggagcccagctctgtggtggaactcttatcaatactatctgggttgtgtctgcagcacattgctttgacaaaatcaagaattggagaaatcttatcgcagtgcttggtgagcatgatctttccgaacacgatggagatgagcaatcgaggcgcgtggctcaagtcataatcccatccacctacgtgcctggtaccactaaccacgacattgcccttctgagactgcatcagcctgtcgtgcttaccgatcatgtggttccactttgtctgcctgagcggaccttctcggagcgaactctcgcttttgtgcgattttcacttgtttctgggtggggtcaactgctggatcggggtgcaaccgcactcgagctgatggtccttaacgtcccccggcttatgacccaagattgtctccagcagagcagaaaggtcggtgactccccaaatatcacggaatacatgttttgtgcaggatactctgacggttcaaaggactcgtgcaagggagattcaggtgggccgcatgctacccattataggggcacctggtacttgactgggattgtgagctggggtcaaggttgtgcaactgtgggccacttcggagtctacacgagggtgtcccaatacattgagtggctgcaaaagttgatgcgttcagaaccacggcccggtgttctccttcgcgctccatttcca

SEQ ID NO: 9183 - DNA, 1398 bp, synthetic construct
  misc_feature 1..1398: note = source = /note="Description of Artificial Sequence: Synthetic coding sequence"
  source 1..1398: mol_type = other DNA
atggtcagccaagctttacggctactttgtctgctccttggtcttcagggatgtctcgccgcaggtggagttgccaaggcaagcggcggtgagactcgagatatgccgtggaaacctggaccacatagagtctttgtgactcaagaagaggctcacggcgtgctacatagacggcgtcgagcaaatgccttccttgaggagctcagacctggttctcttgagagagagtgtaaggaagaacaatgttcgtttgaagaggccagagaaatcttcaaggatgcagaaagaactaagcttttctggattagttattctgatggtgatcaatgtgcgagctcaccttgccaaaatggtggaagctgtaaggatcagctgcaaagttacatttgtttttgtcttccagcgtttgagggaagaaattgcgaaactcataaggatgaccagttaatatgcgttaacgaaaacggaggttgcgagcagtactgctccgatcataccggtactaagcgttcttgcagatgccacgaagggtactctcttcttgctgatggtgtgtcatgtactcctacagtcgaatatccatgtggtaagattccgatcctcgagaagcgtaatgcatccaagccacaaggcaggattgttggaggaaaagtctgtccgaagggtgaatgtccttggcaggttcttctccttgttaatggagcacagctatgcggcgggacacttatcaatacaatctgggttgtgtcagcagcacattgtttcgataaaatcaagaattggcgtaaccttattgccgtgcttggcgaacacgatctcagtgaacatgatggtgatgaacagagccgccgggttgctcaggtcatcataccatcaacttatgttccaggcactaccaaccacgatatcgcacttcttagacttcatcagcccgtggtgctcaccgatcatgtggttccattgtgcttgcctgaacgcacgttttcagagcggaccttagccttcgtgaggttttctctcgtctcaggatggggccaactgttggaccgtggcgcaactgctctagagcttatggtgctcaacgtaccacgtcttatgacccaagattgtttgcaacagagcaggaaagttggagattcaccgaatataactgagtacatgttttgcgcaggctattccgatggttcaaaggactcatgtaagggcgactctggggggcctcatgctacacattatagaggaacatggtatcttacagggatcgtgtcttggggacaaggatgcgctactgttgggcatttcggagtttatacaagggtctcacaatacatagagtggttgcagaagctcatgcgtagcgaacccaggcctggtgttcttttgcgcgctccatttcca

SEQ ID NO: 9184 - DNA, 1398 bp, synthetic construct
  misc_feature 1..1398: note = source = /note="Description of Artificial Sequence: Synthetic coding sequence"
  source 1..1398: mol_type = other DNA
atggtatcgcaagcgctgcggctcctgtgcctgctgcttggcctgcagggatgcctggccgccggaggagtcgccaaggcctccggaggagagactcgggatatgccgtggaaaccgggacctcaccgggtgtttgtgacccaggaggaggcacacggagtgctgcatcgccggagacgggccaacgcattcttggaggaactcaggccgggcagccttgagcgcgagtgtaaagaggagcaatgttcattcgaggaagcaagggaaatcttcaaggatgccgaaaggactaagctgttctggatctcctactccgatggagatcaatgtgcttcgtcgccctgccagaacggaggctcctgcaaagaccagctccaaagctacatctgcttctgtttgccggctttcgaagggagaaactgcgagactcacaaggacgaccaattgatttgcgtgaacgaaaacggaggttgcgagcagtactgtagcgatcacacgggaaccaagcggtcgtgcaggtgccacgaggggtattcgctgctggcggacggagtctcgtgtactccaactgttgagtacccatgtggaaagatacccatcctcgagaagcgcaatgcttccaaaccgcagggacggatcgtcggcggaaaggtgtgccccaaaggcgaatgcccgtggcaggtcctgctccttgtgaacggcgcccagttgtgtggcggaaccctgatcaatacgatctgggtcgtgtctgcggcccattgtttcgacaagatcaagaattggaggaatctgattgccgtcctgggcgaacacgacctgtcagagcacgacggagacgaacagtcacggagggtggcccaggtcatcatacctagcacctacgtgccgggaacgaccaaccacgacattgcacttcttagactgcatcagcctgtcgtgttgactgatcacgtggtgccgctgtgtctgcctgagcgtaccttctcggaacgcactctggctttcgtgaggttcagcttggtgtcgggttggggacagctcctggacagaggagcgaccgcgcttgaactcatggtgctcaatgtgccacgcctgatgacccaggactgcctccagcagtcacgtaaggtgggagactcgccgaacatcaccgagtacatgttctgcgccggctattccgacggatccaaggattcgtgtaagggagattccggcggaccgcacgccactcactaccgcggcacctggtatctgaccggaatcgtttcatgggggcaaggctgcgcgactgtgggccattttggcgtctacacccgcgtcagccagtacatcgaatggctccagaagctgatgcggtcagagcctcgcccaggggtcctgctgcgggcgccatttccg

SEQ ID NO: 9185 - DNA, 1398 bp, synthetic construct
  misc_feature 1..1398: note = source = /note="Description of Artificial Sequence: Synthetic coding sequence"
  source 1..1398: mol_type = other DNA
atggtgagccaggcacttcgacttctgtgcctcttgttgggactgcaggggtgtctggctgctggaggagtcgctaaggcaagcgggggcgaaaccagagacatgccctggaagcctgggccccatcgggtgtttgtgacacaggaggaggcccacggagtgttgcatcggcgacgacgcgccaatgcgttccttgaggagctgcggcctgggtctcttgagagggagtgtaaagaggagcagtgttcattcgaggaagctcgcgaaattttcaaggacgcggagcggactaagttgttttggatctcttattcagatggagatcagtgcgccagctcaccctgtcaaaacggtggaagttgcaaagaccagcttcagagttacatctgtttttgtcttccagcctttgaaggtcggaactgtgagacccacaaggacgatcagttgatttgcgtgaacgagaacggcgggtgtgaacagtattgctcagaccacactgggactaagagatcttgccggtgtcacgaggggtattcactgcttgcagatggagtgagttgcactcccaccgtggaatatccttgtggcaagatacctattcttgagaagaggaacgcctccaagccacagggaaggatcgtgggggggaaagtctgccctaagggtgaatgtccgtggcaggtcctcctgctggtgaacggcgcgcagctttgcggcggaaccctcatcaataccatctgggtggtcagtgctgcacattgctttgataagatcaagaactggcggaacctgatcgctgtgctgggtgaacacgatctctctgaacatgacggggatgagcagtcacggagagtcgctcaagtgattataccgagtacctatgtacccggtaccacaaaccacgatattgccctgttgaggcttcaccagcccgtcgtcttgaccgaccatgttgtgccattgtgtctgcccgaacgaacctttagtgaaaggactctggcatttgtgaggtttagcctggtctcaggctggggacagctcctggaccgaggagccactgctctggagcttatggtgcttaatgtccctcggctgatgactcaggactgtctccagcagtcacgaaaggtgggggacagtccaaacattaccgaatacatgttctgtgccgggtactccgatggctccaaagattcatgtaagggagattccggcgggccacacgcgacccattacaggggcacctggtacctgactggaatcgtatcctggggccagggctgcgctacggtgggccactttggcgtgtacacccgagtgtctcagtacattgagtggctgcagaaactgatgcggtccgaacctcgccctggcgtcctgcttcgcgctcctttccca

SEQ ID NO: 9186 - DNA, 1398 bp, synthetic construct
  misc_feature 1..1398: note = source = /note="Description of Artificial Sequence: Synthetic coding sequence"
  source 1..1398: mol_type = other DNA
atggtcagccaagcgcttagactcctttgtctgctgcttggactccagggatgccttgccgcaggaggcgtggccaaggcatccggcggtgagactcgcgatatgccttggaagcccggaccccatagggtattcgtcacccaagaggaagcccatggggtccttcataggcgtagacgggctaacgccttcctggaagaactgcgacctgggagccttgaacgcgaatgcaaagaagaacagtgctcctttgaagaggcacgtgagattttcaaggatgcggaaaggaccaagctgttctggatctcgtactccgatggagatcaatgtgcctcaagcccttgtcagaatggaggttcgtgtaaggatcaactgcagagctacatctgtttttgccttcccgcatttgagggacgcaattgtgaaacgcacaaagatgatcaactgatttgtgtgaatgaaaatggaggttgcgaacaatactgttcagatcatacgggaaccaagcggtcgtgtaggtgccacgagggttactcccttcttgcagatggcgtgtcatgcactcccaccgtggaatacccttgtggcaaaatacccattcttgaaaagcgaaacgcaagcaaacctcaaggacgcattgtgggaggaaaggtgtgtccgaaaggggaatgtccgtggcaggtgttgctcctggtgaacggggcacaactgtgtggtggaactctcatcaatactatctgggtggtgtctgccgcacactgctttgataagattaagaactggaggaatctgatcgccgtgctgggtgaacacgacctcagcgagcatgatggtgacgaacaaagccggcgggtcgcacaggtgattattccatcgacctacgtgcctggaaccacgaatcatgatatcgcactccttagactgcatcagcctgtggtgctgacggatcacgtggtgcctctttgcctgcctgaaagaaccttttccgaacggaccctggcgtttgtcagattttcccttgtgtcaggctggggacaacttctcgaccgaggcgcgaccgcactcgagctgatggttcttaacgtacctcgtctcatgacccaggattgtctgcagcagtcgcgcaaagtgggtgattcccctaacatcactgagtacatgttctgtgcaggatactcggacgggtcgaaagactcatgcaagggagatagcggaggaccacatgcaactcactatcggggaacttggtacctgactggaattgtgtcctggggtcagggatgtgcaaccgtgggacacttcggagtctacaccagagtgtcgcaatacattgaatggcttcaaaaactgatgcgatctgaacccagacccggggtgctcctgagggccccttttcct

SEQ ID NO: 9187 - DNA, 1398 bp, synthetic construct
  misc_feature 1..1398: note = source = /note="Description of Artificial Sequence: Synthetic coding sequence"
  source 1..1398: mol_type = other DNA
atggtgtcgcaggcattgaggctgctctgcctgctgctgggacttcaaggatgtctggcagcaggaggtgtcgctaaggcttcagggggtgaaacgagagatatgccttggaagcctggaccacatagggtgttcgtgacccaggaggaagcacacggggtactgcatagacggcggagggccaacgcctttcttgaggaacttcggcctggctcactggagagggaatgcaaggaagaacaatgttcattcgaagaggcccgggaaatcttcaaagacgccgagcgaactaagctgttttggatctcgtactccgacggagatcagtgcgcatcctcaccatgtcagaatggaggatcgtgtaaggatcaacttcagtcctacatttgcttttgtttgcctgcgttcgaaggaaggaactgtgaaacgcacaaggacgatcaacttatttgtgtgaatgaaaacggtgggtgtgaacagtactgctcggatcataccggaaccaaacggtcgtgccgatgtcatgaggggtactccctcttggcagatggagtctcctgcacgcctactgtggagtacccatgtggaaagattcctattttggagaagagaaatgcaagtaaaccacaaggaagaattgtgggcggaaaggtctgcccgaagggagaatgtccttggcaagtgctgctgctggttaatggagcacaactctgcggtggtaccctgattaacaccatctgggtcgtgtctgcggcacattgttttgacaaaatcaaaaactggagaaaccttattgctgtgctcggagagcacgatctgtcggagcacgatggtgacgaacagagcagacgcgtcgcacaagttatcatccctagcacttacgtacccggaaccacgaaccatgatattgcacttctcagacttcatcaaccggtggtgttgactgatcacgtggttcccctttgtctcccagagagaaccttttcagaacggaccctggcatttgtgcgctttagtctggtgagcggctggggtcagcttctggatcgtggagcaactgccctggaacttatggttctgaatgtgcctcgactgatgactcaggattgcctccaacagagccgaaaggtcggcgatagcccgaatatcactgaatacatgttttgtgcagggtactctgatggaagcaaagacagctgcaaaggtgactcaggaggaccccacgcaacccattacagaggcacttggtatctgaccggcattgtctcctggggtcaaggctgtgcgactgtgggacatttcggggtatatactcgcgtgagccaatacattgaatggcttcagaagttgatgcggtccgaacctcgccctggcgtcctgcttcgcgccccttttcca

SEQ ID NO: 9188 - DNA, 1398 bp, synthetic construct
  misc_feature 1..1398: note = source = /note="Description of Artificial Sequence: Synthetic coding sequence"
  source 1..1398: mol_type = other DNA
atggtgtcccaggcgctgaggctcctgtgtctccttttgggactgcaaggatgcctggcagcaggcggagtcgctaaggcctcgggaggtgaaactcgcgacatgccttggaaaccgggaccccacagagtgttcgttactcaagaggaagcgcatggagtcctccaccggcggcggcgcgctaacgcttttcttgaggaactgcgcccggggtcgctcgagagagaatgtaaagaagaacaatgcagcttcgaggaagctcgggaaatctttaaggatgctgaaaggaccaagctgttctggattagctacagcgatggggaccagtgcgcgtcatccccttgtcagaacgggggaagctgcaaagaccaactccaatcctacatctgcttttgcctgccggcctttgagggcagaaattgcgaaactcacaaagatgatcagcttatctgcgtcaacgaaaatggaggatgtgaacaatactgttccgaccatactggaactaagcgcagctgcagatgtcacgaaggatactcgctcctggccgacggggtgtcctgcactccaactgtcgagtatccgtgtggcaagatcccgatccttgagaagcgcaacgcctcaaagccgcaagggcggatagtcgggggaaaggtctgcccaaagggagagtgcccgtggcaggtgctcctgctggtgaacggcgcccaattgtgcggaggcacgctgatcaacactatctgggtggtgtcagcggcacactgcttcgacaagatcaaaaactggcggaatcttattgccgtgctcggtgagcatgacctgtccgaacacgatggggacgagcagtcgcggcgcgtggcccaagtcatcatcccttctacctacgtgcctggcaccacgaatcatgacatcgcactgttgcggctgcaccagccggtcgtgctgactgatcacgtggtgccgctttgcctcccagaacgcactttctcggagcgcaccctcgctttcgtgcgcttctccctggtttcaggatggggccagttgctcgatcggggtgccaccgccctggagctcatggtgctcaatgtgccgaggcttatgacccaggactgcctgcagcagtcacggaaagtgggcgattcgccaaacattaccgagtacatgttttgcgcaggatactcggatggatcgaaggacagctgcaagggggactctgggggacctcacgcgacccattatcggggaacgtggtacctgaccggtatagtctcttggggtcagggctgtgccaccgtggggcatttcggtgtgtatactcgcgtctcgcagtacatcgaatggctgcagaagctgatgcggtcagagccgcggccaggggtcctgttgagagcgcccttcccg

SEQ ID NO: 9189 - DNA, 1398 bp, synthetic construct
  misc_feature 1..1398: note = source = /note="Description of Artificial Sequence: Synthetic coding sequence"
  source 1..1398: mol_type = other DNA
atggtctctcaggccttgcgccttctgtgtcttctgctgggtcttcaggggtgcttggccgcaggcggggtcgcaaaagcgtcgggtggtgaaaccagggacatgccttggaagcccggtcctcatcgcgtgttcgtcactcaggaggaggcgcacggcgtcctgcaccgtaggcggcgcgccaatgccttcttggaggagttacgcccgggctccttggagagagaatgtaaggaggaacagtgtagtttcgaagaggcccgtgagatctttaaggatgctgagcggactaagctgttctggatttcctacagcgatggggaccagtgcgcttcgagtccctgccagaacggtggtagctgcaaggaccagctccagagttacatctgcttctgcctcccagccttcgagggccgtaactgcgaaacacataaggacgaccagttaatctgcgtgaacgagaatggtggctgtgagcagtactgttccgatcacaccggcaccaagcggtcctgccgctgccacgagggatactcattgctggcagatggcgttagctgtactcctaccgtcgagtacccctgtggcaagatccctatacttgaaaagcgcaacgccagtaagccccagggacgcatcgtgggagggaaggtgtgtccgaagggggaatgtccctggcaggtgctgctgctcgtgaatggggcccaactgtgcggtggtacactgatcaacacgatctgggtcgtctctgcagcgcactgtttcgacaagatcaagaactggcggaacctgattgcggttctgggcgagcatgatctgtctgaacatgacggcgatgagcagtcgagaagggtcgcgcaagttatcatcccgtcaacgtacgtccccggcacgactaatcacgacattgcgttgttgcgccttcaccagccggtcgttcttacggatcacgttgtaccactctgtttgccggagcgaaccttctctgagcgcaccttggccttcgtgcgtttttctctggtctcgggttggggacagcttctggaccgtggcgctaccgccttagagctcatggtgctcaacgtcccaagactgatgacgcaggattgcctgcagcagagccggaaggtcggcgactcccccaacataaccgagtacatgttctgcgccggttactccgacggcagcaaggatagctgcaagggtgactctggcgggccacacgcaacccactaccgcgggacctggtatttgactggcatcgtgtcgtggggacaaggttgcgccaccgtgggtcactttggggtttacacccgtgtctcccagtacatcgagtggctacagaagctgatgaggagcgagccacgcccgggtgtgcttctgcgcgccccgttcccg

SEQ ID NO: 9190 - DNA, 1398 bp, synthetic construct
  misc_feature 1..1398: note = source = /note="Description of Artificial Sequence: Synthetic coding sequence"
  source 1..1398: mol_type = other DNA
atggtgtcacaggcactgaggcttctttgtctgcttcttggtttgcaaggttgtctggcagcaggaggggtggctaaggcgtcgggcggtgaaactagagatatgccttggaagcccggaccccatagagtttttgtcacccaggaagaggcgcatggagtcctgcaccgccgtcgtagagctaatgcatttctcgaggaactcagacccgggagtcttgagagagagtgcaaggaagagcagtgttcctttgaggaagcaagagagatattcaaggatgctgaacgcaccaagctgttttggattagctatagcgacggagatcagtgcgcttcatcgccttgtcagaacggtggatcatgcaaggaccaacttcagagctacatctgtttctgtttgcctgcatttgagggacgtaattgtgaaacccataaggatgaccaacttatttgtgtcaacgaaaacggaggatgtgaacaatactgtagcgatcataccggcaccaaaaggagctgtaggtgccacgagggatacagcctgcttgcagatggcgtgtcctgtactcctacggtcgaatacccgtgcggtaagattccaattctggagaaacgcaacgcttcaaaacctcaaggacgcattgttggaggcaaggtttgcccgaagggcgagtgtccatggcaggtgctcctgttggtgaatggagcccaactgtgtggtggtaccctgattaacaccatttgggtcgtctccgctgcacactgctttgataagattaagaactggcgaaatcttatagcagtgcttggagaacacgacctttctgagcacgatggtgatgaacaatcgcgacgtgtcgcacaggtgatcattccgtcgacctacgtgcctgggactaccaaccatgacatagcgctgttgcgattgcatcaacccgtggtgctgaccgatcatgtcgtgccactgtgtctccccgaacgcactttttcagaaagaacgcttgcattcgtccgctttagcctggtgtcgggctgggggcaacttctggaccgcggagcgaccgctcttgaacttatggtgctcaacgtaccaagacttatgactcaggattgcctgcaacagtcacgcaaagtgggcgactcccccaatatcactgagtacatgttttgcgcgggatactcagacggatccaaggattcgtgcaaaggtgactcgggtggacctcatgcaacccactatcgtggcacgtggtaccttaccggcatcgtttcgtggggacaagggtgtgccactgtgggtcatttcggagtctacacccgcgtctcgcaatacatcgagtggcttcaaaaacttatgcgtagcgaaccacgcccaggagtgcttctccgggccccattccct

SEQ ID NO: 9191 - DNA, 1398 bp, synthetic construct
  misc_feature 1..1398: note = source = /note="Description of Artificial Sequence: Synthetic coding sequence"
  source 1..1398: mol_type = other DNA
atggtgagccaggcactgcggcttctgtgcttgctgctcggactgcaggggtgtctcgctgcaggaggggtggcgaaggcatcaggaggagaaacccgcgatatgccttggaagccaggcccccacagagtgttcgtgacccaagaagaagcacacggggtgctgcatagacggcggcgcgccaacgccttcctggaagaactcagaccaggatcgctggagcgcgaatgtaaggaagagcagtgctcgttcgaagaagctagagagattttcaaggacgcggaacgcaccaaactgttctggatttcctactccgacggggaccaatgcgcctcctcaccttgtcaaaatggaggtagctgcaaggatcaactccaaagctacatctgcttctgtttgcctgcgttcgagggacggaactgcgagactcacaaggatgaccagctgatctgcgttaacgagaacggcggatgtgaacaatactgctccgatcatactggcactaagcgttcgtgcagatgtcacgaaggttactccttgctcgctgatggggtcagctgcaccccgaccgtggaatacccctgtgggaagatcccgatcctcgagaagcgcaacgcctccaagccgcagggccggatcgtcggcggtaaggtctgcccgaaaggagaatgtccatggcaggtgctcctgttggtcaatggagctcaactgtgtggaggtactcttatcaataccatctgggtggtgtccgctgcccactgcttcgataagatcaaaaactggcggaacctgatcgcagtgttgggagagcatgacctgtcggaacatgatggagacgaacagtcacggcgcgtggcgcaagtcatcatcccgtcaacgtacgtgcccggtaccactaaccacgatattgcgctgctgcggctgcatcaacccgtcgtgcttaccgaccacgtcgtgccgctgtgtctgccggagcggactttctcagaaagaactctggccttcgtgcgcttttcgctcgtgagcggatggggacagctgctggaccggggcgcgaccgccctggaactcatggtgctcaacgtccctcggctcatgactcaggattgcctgcaacaatcaaggaaggtgggagattcccctaacatcactgagtacatgttctgcgcgggatatagcgacgggtcaaaggacagctgcaagggagactccggaggaccgcatgctacgcactacagaggaacttggtacctgactggaatcgtgtcctggggacagggatgcgcgaccgtgggtcatttcggagtatatacgcgggtcagccaatacattgagtggctccagaagttgatgcggtcggagcctagaccgggggtgctgctgagagctccgttccca

SEQ ID NO: 9192 - DNA, 1398 bp, synthetic construct
  misc_feature 1..1398: note = source = /note="Description of Artificial Sequence: Synthetic coding sequence"
  source 1..1398: mol_type = other DNA
atggtgagccaggcattgaggcttctctgtctgctgctgggtctgcaaggctgtcttgcagcaggaggagtggctaaggcctcaggcggtgaaacccgagacatgccttggaagcccggtccgcatagagtgtttgtcacgcaagaagaagcccacggagtgctccaccgtagacgacgagcaaacgccttcctggaagagctcaggcccggttcgctcgaacgcgagtgtaaggaagaacagtgtagctttgaagaagctcgagaaatctttaaggacgcggaaagaactaagctgttctggatttcctacagcgacggagatcagtgcgcatcatcaccctgccaaaatggtggatcatgcaaggatcagctccagtcgtacatatgtttttgtctgccagcattcgaaggtcgcaattgtgaaacccacaaggatgatcagcttatttgtgtcaacgagaatggaggttgtgagcagtattgtagcgatcatactggaacgaagcggagctgtcggtgtcacgaaggatactccctgcttgcagatggcgtgagctgcactccgaccgtggagtacccctgtgggaaaatccctatcctggaaaagcggaacgcctctaaaccgcagggtcgaatcgtcggcggaaaagtgtgccctaagggtgaatgcccttggcaagtgcttctgctggtgaatggtgctcaattgtgcggcggaactttgattaacactatatgggtggtgtcggcggcacattgctttgacaagatcaaaaactggaggaaccttatagcggtcctgggggagcacgatctttcagaacacgatggcgatgaacagagccgccgggtggcccaggtcataatcccatccacctacgtgccagggactactaaccacgatattgccctcctcagattgcatcaacctgttgtgctgaccgaccatgtcgtcccactctgcctgcccgagagaaccttttcggaacggacccttgcatttgtgaggtttagccttgtgtcaggctggggacaactgttggaccggggagcgactgccctggaacttatggtcctcaacgtgccacgactcatgactcaggattgccttcagcagagccgcaaggtcggtgattcgccaaatatcaccgaatacatgttttgcgcaggctactcggatggaagcaaggatagctgcaagggtgattccggaggacctcacgcaactcattacagaggcacttggtacctcaccggaattgtgtcgtggggtcagggctgtgcgaccgttggccattttggtgtgtacacccgcgtcagccagtacattgaatggcttcaaaaactcatgcgctcagagccacgccccggagtcctgcttcgggcaccttttccc

SEQ ID NO: 9193 - DNA, 1398 bp, synthetic construct
  misc_feature 1..1398: note = source = /note="Description of Artificial Sequence: Synthetic coding sequence"
  source 1..1398: mol_type = other DNA
atggtgtcgcaggcgctgaggctcctctgcctgcttctgggactgcaagggtgtctggccgcaggaggcgtggcgaaggctagcggaggcgaaacgagagatatgccttggaagccaggtccgcaccgggtgttcgtgactcaggaggaagcccatggcgtgctgcaccggcgcagaagggccaatgcttttctggaagaactgaggccgggatccttggagcgcgagtgtaaagaggagcagtgttccttcgaagaagcccgcgagatctttaaggacgccgagcggactaagctcttctggatctcctactcggatggagatcaatgcgcttcgagcccctgccaaaatggagggtcctgcaaggatcagctgcagtcctacatttgcttctgcctgccggcatttgagggacgtaactgcgaaacgcacaaggacgaccaactcatctgcgtgaacgagaacggaggatgcgaacaatactgctcggatcataccggcactaagcggtcatgtcggtgccacgaaggatactcactgttggctgacggggtgtcgtgcactcccaccgttgaatatccgtgcggaaagattccaattctggagaagagaaacgcatctaagccgcagggacggatcgtcggaggaaaagtctgccctaagggagaatgtccatggcaagtgctcctgctcgttaacggagcccaactctgtggaggtaccttgatcaacaccatttgggtggtcagcgccgcgcactgcttcgataagattaagaattggagaaacttgattgccgtgctgggagagcatgacctgtcagagcatgacggagacgaacagtcccggcgcgtggctcaggtgatcatcccgagtacttacgtgccgggcaccaccaaccatgacattgcactgctgagattgcaccaacccgtcgtcctgactgaccacgtcgtgcctctctgtctcccggaacgcacctttagcgaacgcactttggcgttcgtcagattctccttggtgtcgggatggggccagcttctggacagaggcgcaaccgccctggagctgatggtgctcaacgtaccacggctgatgacccaggactgtctgcaacagagcaggaaagttggagattcaccgaacattacggaatacatgttctgtgcgggatattccgacggaagcaaagattcgtgcaaaggagactcaggcggacctcacgcaacgcactatcgggggacttggtaccttacggggatagtctcctggggccaggggtgcgccactgtggggcatttcggcgtctacaccagggtgtcacagtacattgagtggctccagaaattgatgcgctcagaacctagacctggggtcctcttgcgcgcaccattccct

SEQ ID NO: 9194 - DNA, 1398 bp, synthetic construct
  misc_feature 1..1398: note = source = /note="Description of Artificial Sequence: Synthetic coding sequence"
  source 1..1398: mol_type = other DNA
atggtaagccaagcacttcgtttgctgtgcttgcttcttggcttgcaagggtgtctggccgcaggaggagtggctaaggcgagcggaggcgaaacccgggatatgccttggaagcctggaccccatagggtgtttgtcactcaggaagaggctcacggagtcctgcataggcggcgccgggcgaatgcatttctggaggagttgaggccaggttcactcgaacgcgaatgcaaggaagaacaatgctcatttgaagaagcacgagagatcttcaaggatgcagagagaaccaaactgttttggattagctactccgacggtgaccagtgcgcttcgtcaccttgtcagaacggtggctcttgtaaggatcagcttcagtcatacatatgcttctgccttcccgcatttgaagggcgaaactgcgagactcataaagacgaccagttgatttgtgtgaacgaaaacggtggttgcgaacaatactgtagcgaccatactgggacgaagaggagctgtcgctgccacgagggctactctctgctggcagatggtgtgtcctgtactcccaccgtcgaatacccgtgtggtaagattccaatactggagaaaagaaacgcgtcgaagccgcaaggcagaatcgtcggaggcaaggtgtgcccaaaaggagaatgtccttggcaagtgcttctgcttgtgaatggggcacaactttgtggcggcaccttgattaacactatctgggtagtttccgccgcacactgttttgacaagatcaaaaactggaggaacctcattgctgtgctgggagaacatgatctgagcgaacatgatggggatgagcaatcaaggcgtgtggcgcaggtgattatcccgagcacttacgtccctggcacgaccaatcacgatattgcacttcttcggctgcatcagcccgtggtgctgaccgatcacgtggtcccactgtgtctccccgagcggacgttctccgaaagaacgctggcatttgtgcggttttcccttgtgtcaggctgggggcaacttcttgatcgcggcgcaaccgccctcgaattgatggtgctcaatgtcccacgactgatgacccaggattgtctgcaacagtcccggaaagtgggcgactcgcctaatatcaccgagtatatgttttgtgcaggatactcagacggatccaaggattcctgtaaaggtgatagcgggggccctcatgcaactcattatagaggtacttggtacctgaccggtattgtgagttggggacaaggatgtgccaccgttggccacttcggggtctacaccagagtgtcgcagtacatagaatggctccaaaagctgatgagatccgagcctagacctggggtgctgcttcgcgcacccttcccc

SEQ ID NO: 9195 - DNA, 1398 bp, synthetic construct
  misc_feature 1..1398: note = source = /note="Description of Artificial Sequence: Synthetic coding sequence"
  source 1..1398: mol_type = other DNA
atggtcagccaggccctgcggcttctttgtctccttctggggctccaggggtgcctcgcagcaggaggagtggcaaaggcttctggcggagaaacccgggatatgccatggaaaccaggtcctcacagggtctttgttacccaagaagaagcccacggggtgctgcatcgacggagacgggccaatgcctttctggaagagctcagaccagggtcactggagcgcgaatgtaaggaagaacagtgttccttcgaagaggcaagagaaatcttcaaggacgccgaaagaacgaagttgttttggatcagctactccgacggggaccaatgtgcaagctcgccatgccaaaacggcgggtcgtgtaaggatcagcttcaaagctacatctgcttttgtctgcccgcctttgaaggccgtaactgcgaaacccataaagatgaccagcttatttgcgtcaacgagaatggaggatgtgagcagtactgttctgatcatacgggtaccaagaggtcgtgccggtgtcatgaaggttactccctcctggcagatggggtgagctgtaccccaactgtggaatatccttgcggaaagattcccatccttgaaaagcgtaacgcaagcaagcctcaaggtcgcatcgtggggggaaaggtgtgtcctaagggagaatgtccatggcaggtgcttcttcttgtgaacggagcacaactgtgtggaggcaccctcatcaacactatctgggtggtgtccgcagcacattgcttcgacaaaatcaagaattggcgcaacctcatcgcagtgcttggagaacatgacctgtcggaacacgatggagacgagcagtcacgccgtgtggcccaggtcataattccctccacctacgtgcctggcactaccaaccatgatatcgcactgctccgcctccaccagcccgtggtgcttactgatcatgtagtgccactgtgtctccccgagaggacgtttagcgagaggacgcttgcgttcgttcggttctcacttgtgtcggggtggggtcagcttctggatcgaggagcaaccgcactcgagcttatggtgctcaatgtgcctagactgatgacccaggattgtctgcagcaatctaggaaggtgggtgattcgcctaacattactgaatacatgttttgtgccggctacagcgatgggtccaaagatagctgcaagggagattcgggaggaccacacgccacccattaccggggtacctggtacctgactggtattgtgtcctggggtcaaggctgtgcaaccgtcggacactttggggtgtatacccgggtcagccagtacattgagtggctccaaaagctcatgcgctccgagccccgcccgggcgtccttctccgggcgcctttccca

SEQ ID NO: 9196 - DNA, 1398 bp, synthetic construct
  misc_feature 1..1398: note = source = /note="Description of Artificial Sequence: Synthetic coding sequence"
  source 1..1398: mol_type = other DNA
atggtaagccaggcccttagactgctgtgcctcctcttggggctccagggctgtttggccgccggaggcgttgcgaaggcgtctgggggcgagacaagggacatgccttggaaacccggtccccaccgcgtgtttgtgacgcaggaagaggcacacggtgttctgcaccggcgcaggcgagcaaatgcttttcttgaagaactcagaccagggtctcttgaacgggaatgtaaagaagaacagtgctctttcgaagaggctcgtgaaattttcaaggatgctgagagaaccaaactgttttggatttcctacagtgacggcgaccaatgcgcatcttctccatgccagaacgggggatcctgcaaagaccagctgcaatcttatatttgtttctgccttcccgcattcgagggccggaactgtgagacacacaaggacgaccagctgatctgcgtcaacgagaacggaggctgtgagcagtactgctccgaccacactggaacaaagcgcagttgcagatgtcacgaaggatactctttgctagcagatggagtgtcctgtacacccaccgtggagtacccatgcgggaagattcccatccttgagaagaggaacgcgtctaaaccacagggccggatagtgggagggaaggtttgccctaaaggagagtgtccctggcaggtcctgctgctggtcaacggcgcgcagctgtgcggtggaacgctgatcaatacaatttgggttgtgtcagcggctcattgcttcgacaaaataaagaattggagaaacttgatcgcagtcctcggggagcatgacttatcagaacatgacggcgatgaacaaagtaggcgtgtcgcccaggtcattatccctagcacatatgtgcctggtaccacaaaccacgatatcgcgctattgagactgcatcagccagtggttttaaccgaccacgtcgtccctttgtgtctgccggagaggaccttctcagagcgcaccctagcattcgttcggttcagcctggtttccggatggggacaattgttggacagaggcgcgaccgccctggaacttatggtgctaaacgtccccagattgatgactcaggactgtcttcagcagtccagaaaagttggggatagtcccaacattacagagtacatgttctgcgctggttacagcgatggctcaaaggatagctgcaaaggggacagtggcggcccacacgccacacattatagagggacttggtatctgacggggatcgtctcctggggacagggttgcgccaccgtgggccatttcggggtttacacacgggtgagtcagtacattgaatggctacagaagctgatgcggtcagagccgcgccctggcgtccttcttagagcgccgttccca

SEQ ID NO: 9197 - DNA, 1398 bp, synthetic construct
  misc_feature 1..1398: note = source = /note="Description of Artificial Sequence: Synthetic coding sequence"
  source 1..1398: mol_type = other DNA
atggttagtcaagcattgcgtctgctttgtctcctgctaggccttcaggggtgtctcgcggccggaggcgtcgctaaggcatccggcggggaaactcgggatatgccgtggaaacccgggccccatagagtgtttgtcacccaagaggaagcccacggcgtgctgcaccgaaggcgaagggccaatgccttcctggaagaattacgccctggatctcttgaacgcgagtgtaaagaggaacagtgttccttcgaggaggccagagagatatttaaagacgccgagaggactaagctgttctggatcagctatagtgatggcgatcagtgtgcaagctcaccctgtcaaaatggaggctcatgcaaggaccagctgcagtcctacatttgcttctgtcttcctgcattcgagggccgtaattgtgagacccataaggacgaccagcttatatgcgtcaatgagaacgggggctgcgagcagtactgttcagatcacaccggcaccaagcgatcttgtcgctgccatgaagggtactctctgctggccgacggagtaagttgtacaccaactgtggagtacccatgtggcaaaatcccaattttagaaaagaggaacgcatcgaagcctcagggacgcattgtgggtgggaaggtttgtcctaagggcgagtgcccctggcaggtattattattagtgaacggggcccaactgtgtggggggacccttataaacacgatatgggttgtttcagctgcgcattgcttcgacaagataaaaaactggaggaatttgatcgcggtgcttggtgagcacgacctctcagaacacgatggggatgagcagagtcgccgggtagcgcaggttatcatcccttcaacctatgtgcccggaactaccaaccacgacatcgccttgctgaggcttcatcagccggtcgtgctgactgatcacgtggtccccttgtgtctgccagagaggacattctccgaacgcactctcgcgtttgtgagattcagcctcgtttctgggtgggggcagctgcttgaccggggcgccacagcattagaattaatggtgctgaatgtccctagactcatgactcaggactgcctacagcagtcccggaaagtgggcgactcaccaaacattaccgagtacatgttttgtgccggttatagcgatgggtctaaagattcatgcaagggggattccggggggcctcacgctactcattataggggcacatggtacttgaccgggatcgtatcttggggacaagggtgcgctacagtcggccacttcggcgtgtatacacgggttagccagtatattgagtggctccagaagctgatgagaagcgagccaaggcccggggtgctgctcagggccccatttcct

SEQ ID NO: 9198 - DNA, 1398 bp, synthetic construct
  misc_feature 1..1398: note = source = /note="Description of Artificial Sequence: Synthetic coding sequence"
  source 1..1398: mol_type = other DNA
atggtgtcccaagccttgaggcttctgtgtctgctccttggactgcagggatgccttgcggccggaggagtggcgaaagccagcgggggagaaacccgagatatgccgtggaagccaggaccgcatagagtgttcgtgactcaagaagaggcccatggagtcctgcaccgacgtaggcgcgcaaacgctttcctcgaggagcttcgcccaggatcactggaacgggaatgtaaggaggagcagtgttcgtttgaagaggcccgggaaatctttaaggacgcagagcggactaagctgttctggatctcatactccgacggggaccaatgcgcgtcatccccatgccagaatggaggatcgtgcaaagaccagctccagtcgtacatctgtttctgcctgccggcttttgagggaagaaattgtgaaactcacaaggatgaccagctcatctgcgtgaatgagaacggaggctgcgagcaatactgctcggaccataccggaaccaagcggagctgcaggtgccatgaggggtacagcctgctggcagatggagtgtcatgcacccctacggtcgagtacccttgcggcaagatccccatcctggaaaagcgcaacgccagcaagcctcagggccgcatcgtcggcggcaaagtctgccctaaaggagagtgcccgtggcaagtgctccttcttgtgaatggggcccaactctgtggaggcactctgatcaatactatctgggtcgtgtcggccgcccactgcttcgataagataaagaattggaggaacctcatcgcagtgcttggggaacatgatctttcggagcacgatggagacgagcaatctcgccgggtggcccaggtcattatcccctccacttacgtcccgggaaccactaatcacgacatcgcattgctgcggctccatcagccagtggtgctgactgaccacgttgtgccgctgtgcctgccagagagaaccttttccgaacggaccctcgccttcgtgcggttcagcctcgtctcaggatggggacagctgctggaccgcggcgccaccgcgctcgaactgatggtgctgaacgtgccgagactcatgactcaagattgcctccagcaatcgagaaaggtgggagactccccgaacatcactgagtacatgttctgtgccggatactccgatggatccaaagacagctgcaagggagactccggaggcccgcacgccacccactacagagggacctggtacctgaccggaatcgtcagctggggacaaggatgtgcaaccgtcggccacttcggggtctacacgcgggtttcgcagtacattgaatggctccagaaactcatgcggagtgaaccaagacccggagtgttgctgcgggccccttttcca

SEQ ID NO: 9199 - DNA, 1398 bp, synthetic construct
  misc_feature 1..1398: note = source = /note="Description of Artificial Sequence: Synthetic coding sequence"
  source 1..1398: mol_type = other DNA
atggtgtctcaagccctgcgccttctgtgtctgctcctcggtctgcagggctgcctggctgcagggggtgtcgccaaggcaagtgggggggagacacgggacatgccctggaaaccaggaccgcaccgagtgtttgtgacccaggaggaggcgcatggggtgctgcatcgaagacgacgggctaacgcgttcctcgaagagctgcggccaggtagtcttgagcgtgaatgcaaggaagaacagtgttcatttgaagaagcgcgggagatttttaaagatgccgagagaacaaaacttttttggatcagttattctgatggcgatcagtgcgcctcctcaccctgccagaacgggggctcttgcaaagatcagctacagagctatatatgtttctgtctcccggccttcgaagggagaaactgcgagacgcacaaagacgaccagctgatatgtgtcaacgagaatgggggctgtgagcagtactgttccgatcacaccggcaccaagcgctcctgccgctgccacgagggctattcgctgcttgcggacggtgtatcgtgcacgccgacagtggagtacccttgtggcaagattcctattttggaaaagcgcaatgcatccaagccccaaggacgcattgttgggggaaaagtttgccctaaaggagagtgcccatggcaagtgctcttgctcgtcaatggggcccagctctgcggaggaacgcttatcaatacaatctgggtagtttccgccgcacactgtttcgataaaattaagaattggagaaacctaatcgctgttttgggggaacacgacctgtcggaacacgatggggatgagcaaagtagaagagtggctcaagtgatcatcccttcgacatacgtcccaggtacaacgaatcacgatatcgctttgctgagactgcaccaaccagtggtgctcacagatcatgtcgttccgctttgcctcccagaaagaacatttagtgaaaggacactagcttttgtgcgcttcagcctcgtctctggctgggggcagttgctggaccgaggagcaactgcattggagctcatggttcttaacgtgcctcgtctaatgacacaggactgtctgcagcaatcccgaaaagtgggggacagtccgaatattaccgaatatatgttctgcgccggatatagcgatgggagcaaagactcgtgtaagggcgactccggcggaccccacgccacccattacaggggaacgtggtatctcaccgggattgtgagctggggccagggatgcgctaccgtaggtcactttggcgtctacacaagggtctcccagtacatcgaatggctccagaaactaatgagaagcgaacctagaccaggagtcttactccgggctccgttcccg

SEQ ID NO: 9200 - DNA, 1398 bp, synthetic construct
  misc_feature 1..1398: note = source = /note="Description of Artificial Sequence: Synthetic coding sequence"
  source 1..1398: mol_type = other DNA
atggtgagtcaggctctgaggctcctgtgcttgctcctgggccttcagggttgtctcgcagcaggtggagttgccaaagcatcaggcggggagacacgggatatgccttggaaaccgggcccccacagggtattcgtcactcaggaagaggcccacggggtgctccatcgccgtcgtcgcgccaacgcttttctggaagagctgaggcctggctctcttgaaagagagtgtaaggaggagcagtgcagcttcgaggaggccagggaaatctttaaggacgccgagcgtaccaaattgttttggatttcctattcggacggcgatcagtgtgccagttctccatgtcaaaatggagggagttgcaaagatcaactccagtcctatatttgtttctgcctgccagcatttgaagggcgtaattgcgagacgcacaaggacgaccagctgatctgcgttaacgaaaatgggggctgtgagcagtactgttccgatcatacagggacgaagcgctcttgccggtgccacgaagggtacagtctcctggccgatggcgtgtcttgtacacctaccgttgaatacccttgtgggaagattccaatcctcgagaaaaggaacgcaagcaaaccacaaggacgaatcgttggtggaaaagtgtgtccaaaaggcgagtgcccttggcaggttttattgctggtcaatggtgcacaactgtgtggaggcactttgatcaacaccatttgggtggtgtcagcagcacattgtttcgataagattaagaactggagaaacctaatagctgttttgggggagcatgacctgagtgagcatgacggcgatgagcagagtcgtcgcgtggcccaggtgatcatcccctcgacctacgttcccggtaccacaaaccacgacattgccctgcttaggctccaccagcctgtggtgctgacagatcatgtagtgcctctttgcctccccgagcgcacattctcggaaagaaccctggcctttgtgagattctccttggtttcgggctgggggcagctactagatcgcggagcaacagcactggagctcatggtgctcaatgtacccaggctcatgactcaagactgcctccaacagtcccggaaggtgggagacagccccaatataacggagtacatgttttgtgccggttacagcgatggatctaaggattcttgtaaaggtgatagcggcgggcctcatgctactcactaccggggaacctggtaccttaccggcatcgtcagttggggacagggatgcgctacggtggggcacttcggagtttatacgagagtgtcacagtatatagaatggctccaaaagctcatgcggagtgaaccgcgaccaggtgtgctgttgagagccccctttcca

SEQ ID NO: 9201 - DNA, 1398 bp, synthetic construct
  misc_feature 1..1398: note = source = /note="Description of Artificial Sequence: Synthetic coding sequence"
  source 1..1398: mol_type = other DNA
atggtgtctcaggccctcagattgttgtgtctcctactcggcctccaggggtgtctggcagccgggggggttgcaaaggcttctggtggagaaacaagggacatgccatggaagcctggcccgcatcgagtgttcgtcacgcaagaggaggctcacggggtgttacacagacggcgccgtgctaacgcctttctcgaagagcttaggcctggaagtctcgaacgggaatgcaaggaggaacaatgctcctttgaggaagctcgtgaaatcttcaaagacgctgagagaacaaagctgttctggatcagctacagcgacggcgaccagtgcgcgtcatctccatgccagaatggcggtagttgtaaagaccaactacagtcatacatctgtttctgcctgcccgccttcgaggggaggaactgcgagactcacaaagatgatcagctcatctgtgtcaacgagaatggagggtgcgaacaatactgttctgatcacacaggaaccaaacggagttgccgatgtcacgagggatactcacttttagctgatggagtttcctgcactcccacagtggagtacccctgtggcaagatccctatactggaaaagaggaatgcaagtaagcctcagggaagaattgtgggaggcaaagtgtgtcccaaaggcgagtgtccttggcaggtcctgctgctggtgaacggggcacagttatgtggaggcacactcattaacactatttgggtagtgagcgcagcacattgcttcgataagatcaagaattggcgcaacctaattgccgtactgggggaacacgatttgagcgaacacgacggtgacgagcagtctcgtcgcgtggctcaggttatcattccttccacgtatgtccccggaacaacgaatcacgacattgctctcctccgactgcatcagcccgtggtgctgacggaccacgtcgtccctctctgcctgcctgagcgaaccttttcagagcgcaccctcgcattcgtgagattttccctggtctctggctggggccagctcttggatcgaggggctacggcacttgaactaatggtgttgaacgtgcctagattaatgacccaggattgtctgcaacagtcacgtaaggttggcgattctcctaatatcactgagtatatgttctgtgctggatatagtgatgggtctaaagactcttgcaagggggattcaggcggtcctcacgccacccattaccggggcacttggtacctaacgggcattgtgagctggggccaagggtgcgccacggtgggacacttcggcgtgtacaccagagtgtctcagtatatcgagtggttgcagaagctgatgagatccgagccaagacctggcgtccttctgagggcacccttcccc

SEQ ID NO: 9202 - DNA, 1398 bp, synthetic construct
  misc_feature 1..1398: note = source = /note="Description of Artificial Sequence: Synthetic coding sequence"
  source 1..1398: mol_type = other DNA
atggtctctcaggctcttcgcctgctgtgcctcctgctgggccttcagggatgtcttgcagccggcggagtggctaaagccagcggcggtgagactagagacatgccatggaaacccggcccccatcgcgtttttgttacacaggaagaagctcatggcgtccttcatcggcgcagaagggcaaacgcattcttggaggaactgcggcctggaagtttagaacgcgagtgtaaggaggaacagtgcagctttgaagaagctcgggaaatattcaaggatgctgaacgtaccaagctgttttggatttcctactcagacggtgaccaatgtgccagctccccatgtcagaacggtggcagttgcaaagaccagttgcaaagttacatctgcttctgtcttccagccttcgaggggaggaactgcgaaacgcacaaagacgatcagctgatctgcgtcaacgaaaatggagggtgcgagcagtattgtagcgatcacacaggcactaagcgatcatgcaggtgtcacgaaggttacagtcttcttgctgatggggtgtcctgtaccccaactgtggagtatccgtgcggaaaaataccaatattggagaaaagaaatgcttcgaagccacagggcaggatcgtaggcggcaaggtttgtccgaagggagaatgcccatggcaagtgctgttgttggtcaatggtgcccagctgtgcggaggaactctcatcaacaccatttgggtggtatccgcagcacactgctttgacaagattaagaattggcggaacttgatcgcggttctaggggagcacgacctatccgaacacgacggcgatgaacagtctagacgcgtcgctcaggtgattatcccctccacctacgtgccaggcaccaccaatcacgatattgccttgttacgcctacatcagcccgtagtgctgactgaccatgttgtgccgctttgcctgcccgaaagaacttttagcgagagaacgctggcgttcgtccggttttcactggtgagcggttggggccaactgctggatcgtggagctacagctctggagctcatggtgctgaacgtccccagactaatgactcaggactgcctacagcaatctcgaaaagtcggagattcgcccaacatcaccgaatacatgttctgtgccggatattcagacggtagcaaagatagctgcaagggggactccgggggaccacatgctacacattaccggggcacatggtacctgactggcatcgttagttggggccaagggtgcgccacagttggacactttggtgtatatacccgtgtttctcagtatattgagtggttgcagaagctgatgcgcagtgaacccaggcccggggtgctcctgcgggccccattccca

SEQ ID NO: 9203 - DNA, 1398 bp, synthetic construct
  misc_feature 1..1398: note = source = /note="Description of Artificial Sequence: Synthetic coding sequence"
  source 1..1398: mol_type = other DNA
atggtttcacaggccctgagactgctctgtctgctgctgggcctgcagggctgtctggctgcgggcggagttgcgaaggcttctggcggtgagacccgcgatatgccttggaagcccggcccccaccgcgtttttgtgacacaggaagaagctcacggtgtccttcatcgcaggagaagagccaatgcttttctggaggagcttaggcctggaagtctggaacgcgaatgtaaggaagagcagtgttccttcgaggaggcaagagagatcttcaaagatgccgaaaggacaaaattgttctggatctcttacagtgacggcgatcagtgtgcaagcagtccgtgccagaatggaggcagctgcaaagatcagctgcagtcatacatctgcttctgcctgccagccttcgaaggcaggaattgcgaaacccataaagacgaccaattgatctgcgtcaatgagaatggtggctgtgagcagtattgctcagatcacaccggaactaaaagatcatgtcgctgtcatgagggctattccctgctcgctgatggcgtttcctgtaccccaaccgttgagtacccgtgcggtaaaataccaatcttggagaagagaaacgcctcaaagccacaaggcaggatcgtaggcggcaaagtttgtcccaaaggtgagtgcccctggcaagttctgctgctggtcaatggtgctcagttgtgtggcggcactctgattaacacaatttgggttgtaagtgccgcccactgctttgataaaatcaaaaattggaggaacttgatcgctgtgctgggcgagcacgacctgagcgagcacgacggtgatgaacaatccagaagggtcgcacaggtcattatcccttctacatatgtgccaggcacaacgaaccacgatatcgctcttctgagattgcaccagcctgtcgtccttaccgaccacgtcgtgccgctctgtttgcccgagcgcaccttttcagaaaggacactcgccttcgtgagattcagtttggtgtccggttggggtcagctgcttgatcgcggtgccacagccctggagctcatggtgctcaacgtccccaggttgatgactcaggactgcctgcagcaaagcaggaaggtgggcgacagccccaacatcacggagtatatgttctgtgcgggttacagcgacggttccaaggactcctgcaagggagatagtggtggtccccacgccacccattacagaggcacatggtacctgactggcatcgtctcctggggccagggctgcgccactgtgggtcattttggtgtatacactagggtgtcccaatacattgaatggctgcagaagttgatgaggagcgagcctagacctggagttttgctgcgcgctcctttccct

SEQ ID NO: 9204 - DNA, 1398 bp, synthetic construct
  misc_feature 1..1398: note = source = /note="Description of Artificial Sequence: Synthetic coding sequence"
  source 1..1398: mol_type = other DNA
atggtgtcccaggccctgcgtcttctctgtctgttgttaggtttgcaaggctgtcttgctgcaggaggagtggctaaggctagtggaggcgagactagggacatgccatggaaaccgggaccacatagggtgtttgtgactcaggaagaggcacatggggtactgcatagacgccggcgggccaatgctttcctggaggaattgcgacctgggtctctagagagagagtgcaaagaggagcagtgcagttttgaagaagcacgcgagattttcaaggatgctgaacgcaccaaactgttctggatctcctacagtgatggtgatcaatgtgcatcctccccctgccagaatggcggctcgtgtaaggatcagttgcagagctacatttgtttctgtttgcccgccttcgaggggcggaattgcgaaacccataaggacgatcaattgatctgcgtcaacgaaaacggtggttgcgagcaatattgctccgaccacactgggaccaaacgttcttgccgctgccatgagggatattcgctgctggcagacggagtttcctgtactcctaccgtggaatacccttgcggaaaaattcccattctcgagaagcggaacgcctcaaaaccccagggtcgcattgtcgggggcaaagtgtgcccgaagggcgaatgcccatggcaggttctcctgttagtgaacggcgcacaactgtgcgggggtaccctcataaacactatctgggtggtttccgcagcccactgtttcgataaaatcaaaaactggcgcaatttgatcgctgtgcttggcgaacacgatctctccgaacacgacggcgatgagcaaagccgacgggtggcccaggtgattattccgagtacttacgtgccagggactactaatcatgatatcgccctactcagattgcaccagccagtggtcctcacagaccatgtcgtaccactgtgcctgccagaacgaaccttctccgagcggacactagccttcgtccgcttctctttggtatctggatggggtcagctgttggaccgcggagctacagccctagaactgatggtgctaaatgttccacgactcatgactcaggattgccttcaacagagcagaaaagtaggggattcaccaaacataacagagtacatgttttgcgccggttactccgacgggtcaaaggattcatgcaaaggagatagcggcggaccccacgcgacccattaccgaggtacatggtatctgacaggaatcgtgagctggggacagggttgcgctaccgttggacatttcggggtgtacactcgagtctcccagtatatcgaatggctgcaaaaattgatgaggagtgagccacgaccaggcgtgctgctcagagccccatttccg

SEQ ID NO: 9205 - DNA, 1398 bp, synthetic construct
  misc_feature 1..1398: note = source = /note="Description of Artificial Sequence: Synthetic coding sequence"
  source 1..1398: mol_type = other DNA
atggtgtctcaagcactccgtctgctgtgcttgcttctggggttgcagggatgtctggcggctggaggagtagccaaagccagcgggggcgaaacacgagacatgccgtggaaaccgggtccgcatagagtgtttgtgactcaggaagaggcccacggggtgttgcatcgccgccgtcgcgccaatgctttcctcgaggagttaaggccagggagtctggagagggaatgcaaggaagagcagtgcagctttgaggaggcacgagaaatctttaaggatgccgagcgaacgaaactgttttggatctcgtacagtgacggtgatcagtgtgccagcagtccctgtcaaaacggaggatcttgtaaagatcagctccagtcatacatttgtttctgtctgcccgcttttgagggcagaaactgtgaaacccataaagacgatcagctgatttgcgtcaacgaaaatgggggctgtgagcagtactgttccgatcacactggaaccaagcggagctgtcggtgccacgagggatactctcttcttgccgatggtgtgtcttgcacccctactgtcgagtatccttgcggcaagatacccatcctggagaaacggaacgccagtaagccccaggggcgaatcgttggcgggaaagtatgcccaaaaggagaatgcccctggcaggtgctactactggtcaacggggcccaactgtgcggcggtaccctaattaataccatttgggtggtcagcgcagcccattgctttgataagatcaagaattggcgcaacctgatcgctgtgctaggcgaacacgatctgtcagaacacgacggagacgagcagtcacggagggttgcccaggtgattatcccttccacttacgtacctggtactaccaatcatgatattgcactgctgagacttcatcaacctgttgtgctgaccgatcacgttgtcccactctgtttacccgagcggacattcagtgaaagaacactcgcatttgtgcgatttagtctggtgtcagggtggggccagctgttggaccgcggagccaccgcccttgagttaatggtcctgaacgtgccccgactaatgactcaggactgtttacagcagtcccgcaaggtgggtgattccccaaacattactgaatatatgttctgcgctggatactctgacggctctaaggactcgtgcaagggcgattccggtgggccgcatgccacgcactatagggggacgtggtatctcacagggatagtgtcatgggggcagggctgcgcaactgtgggtcacttcggggtgtatacacgtgtctctcaatacattgagtggctccagaaactaatgcgctcagagccgcggccgggggtattgctgagggctccgttccca

SEQ ID NO: 9206 - DNA, 1398 bp, synthetic construct
  misc_feature 1..1398: note = source = /note="Description of Artificial Sequence: Synthetic coding sequence"
  source 1..1398: mol_type = other DNA
atggtgtcacaggccttgcgcctcctctgtctgctcttgggcctgcaggggtgcctggcagccggaggtgtggcaaaggccagcggtggagaaacccgcgacatgccgtggaagccgggaccgcatcgtgtgttcgtgacccaggaggaagcacacggagtcctgcacagacggaggagagccaacgctttcctggaagagctgcgcccgggtagcttggaacgggagtgcaaagaagaacagtgttcatttgaggaggccagagagatcttcaaggatgcagagaggactaaactgttctggatctcctactccgacggtgatcaatgtgcgtcatccccatgtcagaatggaggatcctgcaaggaccagctccagtcgtacatctgcttctgcttgccggcgtttgaaggaagaaactgcgaaactcataaggatgaccagttgatctgtgtgaacgaaaatggaggctgcgagcaatactgctcagaccacactgggacgaaacggtcctgccgatgccacgagggctattccctccttgctgacggagtgtcatgtaccccaactgtggagtacccgtgcggtaagatcccgatccttgagaaaagaaatgcgtccaagccacagggacgcattgtgggcggaaaagtgtgcccaaagggggaatgtccgtggcaggtgctgctcttggtcaatggcgcgcagctctgtggaggaaccctgataaacaccatctgggtggtcagtgcagcgcattgtttcgataagatcaaaaactggcgcaacctgatcgcggtcctcggagaacatgacctgtcggagcacgacggtgatgaacagtcgcgccgggttgctcaagtgattatcccgtccacttacgtcccgggaactaccaatcacgatattgccctgttgcgcctgcaccaacccgtggtcctgaccgatcacgtggtgccgctctgccttccagaaaggactttctcggagcgcaccttggcctttgtccgcttctccctggtttcggggtggggacaactgttggacaggggggcgaccgcgcttgagctgatggtccttaacgtgcctcgcctcatgactcaggactgcctgcagcagagccggaaggtgggagattcgcctaatatcactgaatacatgttctgcgcaggatacagcgacggtagcaaggactcttgcaaaggtgactcgggagggccgcacgcgactcactaccgcggaacttggtaccttaccggcatcgttagctggggacaaggctgcgctaccgtcggccacttcggcgtttacacccgggtttcccagtacatcgaatggctccaaaagctgatgcgtagcgagccgcgcccgggtgtgctcctcagagcccctttcccc

SEQ ID NO: 9207 - DNA, 1398 bp, synthetic construct
  misc_feature 1..1398: note = source = /note="Description of Artificial Sequence: Synthetic coding sequence"
  source 1..1398: mol_type = other DNA
atggtgtcgcaggccctgagactgttatgtctgctcttgggtctgcagggatgcttggccgctgggggcgtggccaaagcctccggcggcgagactagagatatgccctggaaacctggaccccatcgggtgttcgtcactcaagaagaggcccacggggtactgcaccggcgccgtcgggctaatgcttttctggaggagctacggccaggttcgttggagcgcgaatgtaaagaagaacagtgctccttcgaagaggcaagagaaattttcaaggacgccgaacgcacaaaattgttctggatatcatacagtgatggtgaccagtgtgcaagttccccttgtcaaaacggtggcagttgcaaagatcagctgcagtcctatatttgtttctgtctgccagcctttgagggcaggaattgcgagacccacaaagatgaccagcttatctgcgtgaatgaaaatggcggctgcgaacaatattgtagcgaccacaccggaaccaagcgcagttgtcgctgtcatgaaggatattcactcctggcagacggcgtgagctgcaccccaactgttgaatacccatgcgggaaaattcccattctggagaaacgaaatgctagcaagcctcaaggtaggatcgtcgggggcaaagtgtgccccaagggcgagtgcccgtggcaggtgcttctgcttgtcaatggagcccagttatgcggggggacattgataaatacaatctgggtcgtttcggcagcccactgttttgacaagatcaagaattggcgcaacttgatcgccgtactgggagagcatgatctaagcgagcatgatggagacgaacagagcaggcgtgtcgcccaggtaataatccctagtacatatgtgccaggcaccaccaaccatgatattgccctgttgcgtttgcatcagcctgttgttcttacggaccatgtggttccactgtgcctccccgaaagaaccttttctgaaagaaccctcgcattcgtgcggttctccctggtgtccggttggggtcagctgctagaccgtggagccacggctctggaattgatggtcctgaacgtgccacgcctcatgactcaggactgcctgcagcagagcaggaaagtgggcgacagccctaacatcaccgagtacatgttttgcgccgggtacagcgatggcagcaaggactcctgtaagggcgactccgggggacctcacgcaactcattacaggggtacatggtacctgactggtattgtctcgtggggacagggatgcgctaccgtcggacactttggtgtgtataccagagtctcacaatacattgaatggctacaaaaactaatgcgtagcgagccaagaccaggcgtgctgctcagagccccgtttccc

SEQ ID NO: 9208 - DNA, 1398 bp, synthetic construct
  misc_feature 1..1398: note = source = /note="Description of Artificial Sequence: Synthetic coding sequence"
  source 1..1398: mol_type = other DNA
atggtgagccaggcactgcgcctactgtgtctcctgctgggattgcaggggtgcctggcagctggtggcgtggccaaggcaagcggaggcgagacacgagatatgccttggaagcccgggccacatcgggtgttcgtcacccaggaggaagcacacggtgtgcttcaccggcgaagaagagccaatgcatttctggaggagctccgccccggatccctggaacgggagtgcaaagaagaacagtgtagctttgaggaggcccgcgagatctttaaagacgctgaaagaaccaaactgttctggatttcatattcagatggggaccagtgcgcctcatccccatgccagaacggagggtcctgcaaggatcagctgcagagttacatttgtttctgcctgccagcattcgagggcagaaactgcgagacccacaaagacgaccaactcatttgcgtgaatgaaaatggtggttgtgaacagtactgctctgaccacaccggtacaaaacgaagctgcaggtgtcacgaaggttatagtctgctggccgatggcgtgtcttgtactccaactgtggaatacccttgtgggaagatcccaatactggaaaaacggaatgcctccaagccacagggccgaatagtgggaggaaaggtttgtcctaagggcgagtgcccttggcaagtgctgctgctcgtgaacggagctcagttgtgcggcgggaccttaataaataccatatgggtggtaagcgcagcccactgcttcgacaaaatcaaaaattggagaaatttaatcgccgtgctaggagagcacgatctatctgagcacgacggtgatgagcagtcccggcgcgtggctcaagttatcattccaagtacatacgtgcccggaacaaccaaccacgatatagccctgcttcgattacaccagccagtggtactaactgatcatgtggtacctttatgcctgcccgaacggactttttctgagcgaacattggcattcgtgcggtttagcctcgtgagcggatgggggcagctgctggacagaggtgctactgccctggagctgatggtcctcaatgtgcctcgtctcatgacacaggactgcctgcaacagagccggaaagtgggcgattcaccaaatataactgagtacatgttttgcgccggatatagcgatggttccaaggatagttgtaagggagattccggaggacctcacgctacacattatcgcggcacttggtacttaacaggcattgtcagttggggccaggggtgcgccaccgtgggacatttcggcgtgtatactagggtaagtcagtatatagagtggttgcagaagctgatgcggagtgagcctagaccgggcgttttgctgcgagctcccttcccc

SEQ ID NO: 9209 - DNA, 1398 bp, synthetic construct
  misc_feature 1..1398: note = source = /note="Description of Artificial Sequence: Synthetic coding sequence"
  source 1..1398: mol_type = other DNA
atggtgtcacaagccctgagactcttgtgcctgctgctgggactccaaggatgcctcgcagcaggaggcgtggccaaggctagcggcggagaaacccgggacatgccatggaaacctggcccgcaccgggttttcgtgacccaggaagaggcccatggagtgctgcaccggcgcaggagagccaacgcattcctggaagaactccggccaggctcattggaaagagagtgcaaggaggaacagtgttcatttgaggaagcccgggaaatctttaaagacgcagaacgcaccaagctgttctggatttcatattccgatggtgaccagtgcgcctcgtccccgtgccagaacggaggatcgtgcaaagatcagctgcaatcgtacatctgtttctgcctgccggcgtttgaaggacggaactgtgagactcacaaagacgatcaactgatctgcgtgaacgagaacggagggtgcgagcagtactgttcggatcacaccggcaccaagcgcagctgtaggtgtcacgagggttactcccttttggccgacggagtctcatgtacgccgactgtcgagtacccgtgtggaaagatcccgatcttggaaaagcggaatgcttccaaaccgcagggtcgcatcgtcggcggaaaggtgtgcccgaagggcgaatgcccatggcaagttcttctcttggtgaacggcgcccagctctgcggcggtacgctgataaacaccatttgggtggtatcggccgctcactgtttcgataagattaagaactggagaaacctgatcgccgtgctgggagagcatgatctgtccgaacacgatggagatgaacagagcaggcgcgtggcacaggtcatcatcccttccacctacgtccccggaaccaccaatcacgatattgcactgctcagactccatcagccagtggtgctgaccgatcatgttgtgccgctctgcttgcctgaacggacgttctctgaaagaaccctggccttcgtgcgattctcgctggtgtcgggctggggacagctccttgaccgtggagcgacggcactcgaactgatggtcctcaacgtgccacggctcatgactcaggactgcctccaacagtcgcggaaggtgggagactcgccgaacattactgaatacatgttctgcgccggatactccgatggatcgaaggactcatgcaagggagactccggtggcccccatgcgacccactatcgtgggacctggtaccttacgggaatcgtctcgtggggccagggttgcgccacggtcggacatttcggagtgtacactagagtgagccaatacattgagtggctgcaaaagctgatgagatcggaaccgcggccaggagtcctgctgagagctccgtttccc

SEQ ID NO: 9210 - DNA, 1398 bp, synthetic construct
  misc_feature 1..1398: note = source = /note="Description of Artificial Sequence: Synthetic coding sequence"
  source 1..1398: mol_type = other DNA
atggtcagccaagcgctgcggcttctctgccttctgcttggactgcaaggttgtctggctgccggaggagtcgcaaaggcatcagggggcgagactcgagacatgccttggaagcctggaccacacagagtctttgtcacccaagaagaagcacacggggtcctgcatcgcaggagacgggcgaacgcctttctcgaggagctgaggcccggcagcctggaacgtgaatgtaaagaagaacaatgttccttcgaagaagcacgcgagatctttaaggatgcggagagaacgaaattgttctggataagctattccgacggtgatcaatgtgcaagctcgccgtgccaaaacgggggatcgtgcaaagatcaactgcagagctacatttgcttttgcctgccagcctttgaaggccgaaactgcgagactcacaaagacgaccagcttatttgtgtgaatgagaatggtggctgtgaacaatactgttcggaccatactgggaccaagcggtcgtgcaggtgtcatgagggatactccttgctcgccgatggtgtgtcctgtactcctaccgtggagtacccttgcgggaagatcccaattctcgaaaagagaaacgcatcaaagccgcaaggcagaattgtgggcggaaaggtgtgtcctaaaggagaatgtccctggcaggtgctgcttctggtgaatggtgctcagctgtgtggtggtaccctgattaacactatttgggtcgtttcggcagcgcattgcttcgacaaaatcaagaattggcgtaaccttatagcagtgctgggagagcatgatctttcggagcacgatggcgatgagcagagcaggagagtggcacaggtcattatccctagcacctatgttcctgggaccacgaaccatgacatcgcgcttctgaggctgcatcaaccagtcgtccttactgaccatgtggtgccactttgtctcccggaaagaactttttccgaaagaacccttgcattcgttcgcttttcccttgtgtcaggttgggggcagctcctggacaggggcgccaccgcacttgagctcatggttctgaacgtgccccggcttatgacgcaagactgcttgcagcaatcgagaaaagtgggtgactcgccaaacatcactgaatacatgttctgtgcaggatactcagatggatcaaaggattcatgcaagggtgatagcggggggcctcacgcaacgcattacaggggaacgtggtacctcacgggcatcgtctcgtggggacagggatgtgcgaccgtgggtcactttggagtttacaccagagtgagccagtacatcgaatggctccaaaagctgatgcgttccgaaccccgtccaggtgtgctgctgagagcaccgtttcca

SEQ ID NO: 9211 - DNA, 1398 bp, synthetic construct
  misc_feature 1..1398: note = source = /note="Description of Artificial Sequence: Synthetic coding sequence"
  source 1..1398: mol_type = other DNA
atggtcagccaggctctccgcttactctgcctgctcctgggactgcaaggatgtctggcggcgggcggtgtggccaaggcctctgggggcgaaacacgagacatgccttggaagccaggtccccacagggttttcgttacccaggaagaggcacatggtgtcctccatagacgccggcgcgcgaacgcgttcctggaggagctgagacctggatcgctagagcgtgagtgcaaagaggagcagtgctccttcgaggaagcgcgtgaaatcttcaaggacgccgaacgaacgaaacttttctggattagctattcggatggagaccagtgtgcttcttccccgtgccagaatggcggttcctgtaaggaccaactgcagtcgtacatctgcttctgcctcccggcctttgagggcaggaactgcgagactcacaaggacgaccagttgatctgtgtgaacgagaacggcggctgcgagcagtattgttccgaccatacgggcactaagcggtcttgccgctgtcatgagggatattccctcctggccgacggtgtgtcatgcactcccacggttgagtacccctgtggtaagattcccatattggagaagcgaaatgcttccaagccacagggccggatcgtgggtggcaaggtgtgtccaaagggtgaatgcccatggcaagtcctgttactggtcaacggcgcgcagctgtgcggtggaaccctgattaataccatctgggttgtttccgccgctcactgctttgataaaattaaaaattggcgtaatttgatcgctgtacttggcgaacacgacttgagcgaacacgatggagatgaacagtctcgcagggtggcgcaggtgatcatcccatctacttacgtgcccggaaccaccaaccatgatatagctttgttgcggttacaccagccagtcgttctcaccgatcacgtggtgccgctgtgccttccggaacgaacgttttccgaacgtacgctcgctttcgtgcgcttctcgttggtgagcgggtggggccagctgttagaccgcggtgccacggctcttgagctaatggtcctgaacgtgccaaggttgatgacccaagactgtctgcagcaaagtcggaaggtcggcgactccccgaacattaccgagtatatgttctgcgccggctactctgatggctccaaggattcctgcaagggagattccggaggaccacacgcaacacattacaggggtacctggtacctaacgggcatcgtatcgtggggccagggctgcgccaccgtcggtcacttcggagtttacactcgggtgagccagtacatagagtggctgcagaagctaatgaggtctgaaccgcgcccgggtgtcttgttgcgtgctccatttccc

SEQ ID NO: 9212 - DNA, 1398 bp, synthetic construct
  misc_feature 1..1398: note = source = /note="Description of Artificial Sequence: Synthetic coding sequence"
  source 1..1398: mol_type = other DNA
atggtcagtcaagcacttaggctgctctgtcttctgcttggtttgcagggatgccttgctgcaggtggtgttgctaaagcttctggcggagagactcgtgacatgccctggaaaccaggtccccatcgcgtgttcgtcacacaggaagaagcccatggtgttctgcatcgcagacgccgtgctaacgcctttttggaagagctgagacccggttcactggaaagagaatgcaaagaggaacagtgctccttcgaagaggcaagagaaattttcaaagatgctgagagaacaaagttgttttggatcagttactctgacggcgatcaatgcgccagctctccttgccaaaatggaggttcttgtaaggatcagctccaatcttatatctgcttctgcctcccagcctttgagggcaggaactgtgagacacacaaggacgatcaactcatctgtgttaacgagaacggcggctgcgagcagtactgtagcgatcatactggcaccaagaggagttgccgctgtcacgagggttattcacttctggccgatggtgtctcctgtacccctactgtggagtatccttgcggtaagatccccattctggagaagcgcaatgccagtaagccccagggtagaatcgtcggcggcaaagtctgtccaaagggagagtgcccctggcaggtactcttgctggtgaacggtgcccagttgtgcggcggcactctgattaacaccatctgggtggtaagtgcagctcactgctttgacaaaatcaaaaactggcgcaatctgattgctgtcctgggagagcacgacctgtctgaacatgacggcgacgaacagtcacgccgtgtcgctcaagtgattattccttccacctacgtgccaggaacaactaaccatgacatagccctgctgcgcttgcatcagcccgtggtcctcactgatcacgtcgtcccactgtgtcttcctgagaggactttctcagagaggacactggcttttgtcagatttagcttggtctccggctggggccaattgctggacaggggagctaccgcccttgaacttatggtgttgaatgtaccacgtttgatgactcaggattgtctgcaacagtcccgcaaggttggagattcccctaatatcaccgaatacatgttctgtgccggctacagtgatggttctaaggactcttgcaagggcgactcaggaggccctcacgcaactcattacaggggcacatggtaccttaccggaattgtgtcttggggtcagggctgcgccactgtgggtcacttcggcgtttacaccagggttagtcagtacatcgagtggctgcagaaactgatgaggtctgaacctaggcctggtgtgctgctcagagcaccattccca

SEQ ID NO: 9213 - DNA, 1398 bp, synthetic construct
  misc_feature 1..1398: note = source = /note="Description of Artificial Sequence: Synthetic coding sequence"
  source 1..1398: mol_type = other DNA
atggtgtcacaagcgctgcggctgctgtgtttgcttctcgggttgcaggggtgtctcgcagcaggtggagtcgcgaaagccagcggcggagaaactcgggatatgccttggaagccaggtcctcacagagtgtttgttactcaggaagaagcgcacggagtgcttcataggaggcgtcgcgcaaacgcgtttcttgaagaacttagacctggatcgctggaaagagagtgcaaggaggaacaatgttcttttgaggaagcgcgtgagatcttcaaggatgcagaaagaaccaagctcttctggatttcgtactcagatggagatcaatgcgcatccagcccatgtcaaaatggaggatcgtgtaaagaccaacttcaatcgtacatatgcttttgccttcccgcatttgaaggtcggaattgtgaaactcataaggatgaccaacttatttgcgtcaacgaaaacggtggttgtgagcaatactgtagcgatcacaccggtaccaagcgctcctgtaggtgtcatgagggttactcactgctggccgatggggtgtcatgcacccctacggtggagtacccttgcgggaaaatccctatcctcgagaagagaaacgcatccaagccccaaggacgcatagtggggggaaaggtctgtccaaagggagaatgtccctggcaagtccttctgttggtcaatggggcacagttgtgcgggggcactctgataaacaccatctgggttgtctcggcagcacattgctttgacaaaatcaaaaactggcggaatctgattgcagttcttggagaacacgatctgtctgagcatgacggggatgagcagtcgcgacgggtggcccaggtcattattccttctacttacgtgcctggaactactaaccatgatattgcccttttgcgcttgcaccagcccgtggtgcttaccgaccatgttgtgccgctttgtctgccagaacgcaccttctcggaaagaacgctggcatttgtaagattctcgcttgtatcgggatggggccaacttcttgaccgcggtgcaactgcgctggaactgatggtgctcaacgtgccccgtctgatgactcaggattgtctgcaacagtcccgaaaggtcggtgattcgcctaacattaccgagtacatgttctgtgccggttattccgacgggagtaaggacagctgtaagggcgattcgggcgggccacacgctacgcattacagggggacctggtaccttacgggaatcgtgtcctgggggcaaggatgcgccaccgtgggacattttggagtgtacaccagagtctcccagtacattgagtggcttcagaaattgatgcgatccgaaccgcgccccggggtgctgttgcgggcaccttttcca

SEQ ID NO: 9214 - DNA, 1398 bp, synthetic construct
  misc_feature 1..1398: note = source = /note="Description of Artificial Sequence: Synthetic coding sequence"
  source 1..1398: mol_type = other DNA
atggtctcacaagctcttaggttactctgccttttgctgggacttcaaggctgcctcgcggcagggggtgtcgctaaagcttcgggtggcgagaccagagatatgccttggaaaccaggaccgcatagagtattcgtcacacaggaagaagcccatggcgttctgcatcggcggcgccgagcgaacgcatttctggaagaactgagaccggggtcattggaacgcgagtgcaaagaagaacaatgctcttttgaggaagcgagggaaattttcaaagatgctgaacgtactaaactcttctggataagttactcagacggcgatcaatgcgcatcatctccttgtcaaaatggcgggagctgcaaagaccaattacagagttatatctgcttttgcctaccggcgttcgagggaagaaattgcgagactcataaagatgaccagctgatttgtgttaatgaaaacggtgggtgcgagcaatattgttctgatcacacgggtacgaaacggtcttgccgctgtcatgaaggctactctttactggctgacggcgtaagctgtacgccaacagttgagtatccgtgtgggaagatcccaattttggaaaaacgcaacgcttcgaaaccccaggggagaatcgtcggcggaaaagtgtgccctaaaggcgaatgcccgtggcaagtcttgcttctggtcaatggggctcagctgtgcggtgggaccctaattaatacaatatgggtcgtttccgcggcgcattgttttgataaaatcaaaaattggagaaatctgattgctgtactgggagaacatgacttatcagaacatgacggcgatgagcagtcgagacgagttgctcaggtgatcatcccgtctacgtatgtaccgggtacgactaatcatgatattgctctcctgcgcctccatcaaccggtagtgctcacggaccacgtagtaccgttgtgtcttcccgaacgcacgttttcagaacgtacccttgccttcgttagattttctcttgtgtcaggttggggacagctgctggatcgaggggccacagcccttgagcttatggtccttaatgtcccgcgtttgatgacacaagactgcctgcaacagtctaggaaagttggggactcgcctaacattacggagtatatgttttgtgcgggctattcagatgggtccaaagattcatgcaaaggcgacagcggcggaccgcacgccactcattaccgcggtacgtggtacctgacaggaatcgtttcttggggccaagggtgtgccactgttggacattttggtgtttatacaagagtctcacagtacatcgagtggctccagaagcttatgcgttctgagccacgcccaggcgtgcttttgcgcgcgccttttcca

SEQ ID NO: 9215 - DNA, 1398 bp, synthetic construct
  misc_feature 1..1398: note = source = /note="Description of Artificial Sequence: Synthetic coding sequence"
  source 1..1398: mol_type = other DNA
atggtgtctcaagcgctccggctgctatgcttgctgttgggattgcaaggatgtttggcagcgggcggagtggctaaggcatctggaggagaaacacgcgacatgccctggaaacccggtccacaccgcgtgttcgttacccaggaggaagcacacggcgttctgcacagacgaaggcgtgcaaatgcttttttagaggagctgcggcctgggagtctggaacgggaatgcaaagaagaacagtgtagcttcgaagaggcacgcgagatctttaaggacgctgaacgtactaaactgttttggatctcatacagcgacggggatcagtgtgccagctcaccatgccagaacggaggatcatgtaaagatcagctgcagtcctacatttgcttctgtctcccagcgttcgaagggcgaaactgcgagacacacaaagatgaccagttgatttgtgttaacgaaaacgggggctgcgaacagtactgttccgaccacacaggcacaaaaaggtcttgccgatgccacgaagggtactccctcctcgccgacggtgtcagttgcacgccaactgtagaatacccctgtggtaaaatcccaatcctggagaagcggaatgctagcaagcctcagggacgtatcgtggggggaaaggtgtgtccgaaaggtgaatgtccatggcaggtcctcttattagtgaacggagcgcagctgtgcgggggcaccctcatcaacacaatttgggtcgtttctgctgcacactgctttgacaaaatcaagaattggagaaaccttattgccgtgctgggcgaacacgatctctctgagcacgatggtgatgagcaatcacgccgcgtagctcaggtgatcatcccctctacctacgttcccggcaccaccaatcacgatattgccttgttgcgtttgcaccagcctgtagtgctgacagatcacgtggtgcccctgtgcctgccagagaggacgttctcagaacgaaccttggccttcgtgcgcttctctctcgtatcagggtgggggcagctgctcgatagaggagctacagcactggagctgatggtcttaaacgtgccaagattgatgacacaagattgcctccagcagtcacggaaggttggtgattctcccaatataactgaatatatgttttgtgctggatacagcgatgggagtaaggactcctgcaagggggattccggcggaccccacgctacacattacagggggacgtggtatctgacaggaatagtgtcctggggccagggctgcgccaccgtcggccattttggcgtgtacacacgagtttcacagtatattgagtggctccaaaagctcatgaggtccgagccgcggccaggggtcttgttgagagcaccgtttcct

SEQ ID NO: 9216 - DNA, 1398 bp, synthetic construct
  misc_feature 1..1398: note = source = /note="Description of Artificial Sequence: Synthetic coding sequence"
  source 1..1398: mol_type = other DNA
atggtgtcccaggccctccgattactgtgccttttgctcggactgcaggggtgtttggccgcgggaggcgttgccaaggcatctggaggggagacaagagacatgccatggaagccgggaccgcatcgcgtattcgtgacacaggaggaggcccacggtgtcctgcatcgccggcgccgggcgaatgctttccttgaagaattgcgcccagggtcactggaacgagaatgcaaagaagagcagtgttctttcgaagaagctagagagatctttaaggacgctgagcgtacaaagctcttctggatctcttactctgacggggaccagtgtgcaagttctccttgccagaatgggggcagctgcaaggatcagctgcaatcttatatatgtttctgcttgccagccttcgagggcagaaattgtgaaacccataaagacgaccagctgatttgtgtgaatgaaaacggcggatgcgagcaatactgtagcgatcatacaggtactaagaggagctgtcgttgccacgaaggctattcccttctggccgacggcgtcagttgtacccccacggtcgaatacccctgtggaaaaatacccattttagaaaagaggaatgcgtccaagccccaaggccgcattgtcggagggaaggtatgtcctaaaggtgagtgcccatggcaggtgttgctgctagtcaatggtgcacagttgtgtggtggcaccctaattaataccatttgggtcgtatccgcagcccactgtttcgataaaattaaaaactggagaaacttgatcgctgtgctgggcgaacacgacttgtcagagcatgacggagacgagcagagtcggcgcgtggcgcaggtgattataccttccacatatgtgcccggcaccaccaaccatgacatcgctctgctgcgcctgcatcaaccggtggtgctgaccgaccacgttgttccactgtgcctaccggagaggaccttttccgaacggacgttggcttttgtgagattctccctggtcagtggctggggccagctgttagaccgtggggccaccgcccttgaactgatggttctaaacgtgcctaggcttatgactcaggattgtctgcagcagagcaggaaggtgggcgacagtccaaacatcactgagtatatgttctgcgcaggatattccgacgggtcaaaggactcctgtaaaggcgatagcggtgggccccacgcaactcactacaggggaacctggtatctgacaggaattgtgtcatggggccagggatgtgcaaccgttgggcatttcggagtttacaccagggtctcccagtatatagagtggctgcagaagctgatgcgctcggagcctaggccaggcgtgttactgcgtgcccctttcccg

SEQ ID NO: 9217 - DNA, 1398 bp, synthetic construct
  misc_feature 1..1398: note = source = /note="Description of Artificial Sequence: Synthetic coding sequence"
  source 1..1398: mol_type = other DNA
atggtgtctcaggccctgagattgctgtgtctgctcctggggctgcagggatgtctggcagccggcggagtggccaaggctagtggcggcgaaacacgcgatatgccttggaagccagggccccaccgtgtctttgtcacacaagaagaggcccacggggtgctgcacaggaggcgccgagcaaacgcattccttgaggagctcagaccgggtagcctggagcgagagtgcaaggaagaacagtgtagcttcgaagaggcccgtgaaatttttaaagatgccgaaaggaccaagctattttggatttcttattccgatggagaccagtgtgcctcttcgccctgtcagaacgggggcagctgcaaggatcagctgcagagctatatctgcttttgtctgcctgccttcgaagggcgtaactgtgagacacacaaggatgatcagttgatctgcgtgaatgagaatggcggctgcgaacagtactgctccgaccatacagggacaaagcgctcctgccgctgtcacgaggggtactcactgctggcggatggagtctcctgtacgcccacggtcgaatatccatgtggcaagataccaattctagaaaagcgaaacgcctccaaaccccagggacgcattgtgggcggcaaggtttgccccaaaggggaatgtccctggcaggtactcttgctggtgaacggtgctcagctgtgtggcggcacccttataaatacaatttgggtggtctctgctgcgcactgctttgacaaaatcaagaactggcggaaccttatcgcagtgttgggcgagcacgacctctccgaacatgacggggacgagcaaagcagacgcgtggcccaggtgattatccccagtacctatgtgcccggtactacaaaccacgacatcgcactcctgagactgcatcagcccgtggtactgacagatcatgtagtgcccctgtgcttacctgagaggacattcagtgagcggaccctggcgttcgtgcgcttttccctggtctcgggatggggccagctcctcgaccgaggcgccacagctctggaacttatggtgctcaacgtcccgagattaatgactcaggactgtctgcagcagtcccgcaaagtcggagatagtccaaatatcaccgaatatatgttctgtgccgggtacagtgatggatctaaagactcttgcaagggcgactctggcgggccgcatgctacacactatcgagggacttggtatctgaccggaatcgttagctggggacagggatgtgcaacagtggggcactttggggtctatacccgcgtgtcgcaatacattgaatggctgcagaagctcatgagaagcgagccacggccaggtgtactacttagagccccatttccc

SEQ ID NO: 9218 - DNA, 1398 bp, synthetic construct
  misc_feature 1..1398: note = source = /note="Description of Artificial Sequence: Synthetic coding sequence"
  source 1..1398: mol_type = other DNA
atggtaagccaggcgctccggctgctgtgtctgctgcttgggcttcagggctgtctggctgcaggaggagtggccaaagcatcaggtggcgaaacgcgcgacatgccgtggaagcctggcccccacagagtctttgtgactcaagaggaagcgcacggagtgttgcatcgtcgcaggcgagctaacgccttccttgaggagctgcggccaggttcgttggaaagggagtgtaaggaagagcagtgctcctttgaagaagcccgggaaatcttcaaggacgccgagcgcaccaagctgttttggatctcctactccgatggggatcaatgtgcaagctccccatgccaaaacggcggaagttgtaaggatcagctccagtcctatatctgcttttgccttcccgcattcgaagggagaaattgcgaaacccacaaggatgaccaactgatatgtgtgaacgaaaacggtgggtgcgaacaatactgtagcgaccatactggcacgaagagatcatgtcggtgccatgaaggatactccctgttggcggatggagtcagctgcacccctaccgtggagtacccgtgtggaaagattcctattctggaaaagcgaaacgcatccaagccacaggggcgtatcgtgggaggcaaagtgtgtccaaagggggaatgtccttggcaggtccttttgctcgtgaatggtgcacaactgtgtggaggtaccctgataaacactatttgggtggtgtctgccgctcactgctttgataagattaagaactggcggaaccttattgctgtccttggtgagcatgacctgtccgagcatgatggagatgagcagtctcgaagggtggcacaagtcattatcccctcaacttacgtgcctggtaccactaatcatgacatagcccttctcaggctgcatcagccagttgtcctcaccgatcatgtggtgcctctgtgtctccctgagaggactttctcggaacgtactttggcttttgtgagattttcgctggtgtcaggctggggccaacttctggaccgaggcgcaactgcattggaactgatggttcttaatgtgcctcgtctcatgacccaggattgcctccaacaatcaaggaaagtgggagacagccctaacatcacggagtacatgttttgcgcaggatattcggacgggtctaaggattcctgtaagggcgattcagggggccctcatgcaacccactacaggggcacctggtacttgaccggtatcgtgtcatggggacagggatgtgcaaccgtggggcactttggagtgtacactagggtttcacaatacatcgaatggctgcagaagctcatgagatcggagcctaggccaggggtgctccttagagccccttttccg

SEQ ID NO: 9219 - DNA, 1398 bp, synthetic construct
  misc_feature 1..1398: note = source = /note="Description of Artificial Sequence: Synthetic coding sequence"
  source 1..1398: mol_type = other DNA
atggtcagccaggctctgcgcctgctgtgcctgctgctgggactccaaggatgtttggcagccggaggagtggctaaggcgtcgggtggagaaacccgcgacatgccttggaaaccgggaccgcaccgcgtctttgtcacccaagaagaggcgcacggcgtcttgcatcggcggcggcgggccaacgcttttctggaagagctccgccctggttcgcttgaacgggaatgcaaggaagaacaatgtagctttgaggaagccagagaaatcttcaaggacgccgaacgcactaagctgttctggatcagttactccgacggcgaccagtgcgcatccagcccatgccagaatggagggagctgtaaggaccaattgcaatcctacatctgtttctgtctgcccgcgtttgagggacggaactgcgaaactcacaaggacgaccagctgatttgtgtgaatgagaacggtgggtgcgaacagtactgctcggatcacactggaaccaaacgcagctgcagatgtcacgagggatactcactgcttgcagacggtgtctcgtgcaccccgaccgtcgagtacccttgcggcaaaatcccgatccttgaaaaaagaaatgcctcaaagcctcagggaagaattgtgggcggcaaggtctgccctaagggcgaatgcccatggcaggtgcttctgttggtgaacggcgcccagctgtgtggcggcactctcatcaacaccatctgggttgtctctgcggcccattgcttcgacaagatcaagaattggagaaaccttatcgcagtcctgggcgagcatgatctgagcgagcacgatggggacgaacagtcgcggcgggtggcgcaggtgattatcccatcgacctacgtgccgggaactaccaatcacgacattgccctgttgcgcttgcatcagccggtggtccttaccgatcatgtggtgccactgtgcctcccagagcggaccttctccgaacggactctggccttcgtgcggttttccctggttagtggatgggggcagttgctggatcgcggagcgactgccctggagctgatggtgcttaatgtgcctcgcctgatgactcaggactgtctgcaacagtcacggaaggtgggcgacagcccgaacatcactgaatacatgttttgtgctggctactcagatggaagcaaggactcgtgcaagggagattccggaggcccacacgccacccattacagaggaacttggtacctgacgggtatcgtgtcctgggggcaggggtgcgctactgtgggccactttggagtgtatactagggtgtcccagtacattgaatggctgcagaagctgatgaggtcggagccgcgacctggagtgctgctgagagctccattcccg

SEQ ID NO: 9220 - DNA, 1398 bp, synthetic construct
  misc_feature 1..1398: note = source = /note="Description of Artificial Sequence: Synthetic coding sequence"
  source 1..1398: mol_type = other DNA
atggtctctcaggctctcaggctcctctgtcttcttctagggctccaggggtgcttggccgcaggcggagtggccaaggccagcggcggggaaacgcgggatatgccctggaaacccggtccccaccgggtatttgtcacacaggaggaagcgcatggagtcttgcatcggagaagacgagcaaatgccttcctcgaagagctaaggccaggaagtctcgaacgtgagtgcaaagaggagcagtgttcattcgaggaggcaagagaaatcttcaaagacgcggagcgtactaaactgttctggatctcctactctgatggtgaccagtgtgcaagttcaccgtgtcagaatggcggctcctgtaaggaccaattacagagttacatctgcttctgtctgcccgccttcgagggaaggaattgcgagacacataaggacgaccaactaatttgcgtgaacgaaaacggaggttgcgagcagtattgttccgaccataccggtacgaagcgaagctgcagatgccacgaaggttacagtcttttggccgatggagtcagctgtaccccaacggtcgagtacccctgtgggaagattcctatacttgagaaaaggaacgcgtccaagccccaggggcgcatagttggagggaaggtgtgtcctaaaggcgaatgcccgtggcaggtcttgctcctcgtcaacggggcacaactatgcggaggcaccctgatcaatacaatatgggtggtcagcgcagcccactgcttcgacaaaatcaaaaattggaggaatcttattgccgtgctgggcgaacatgacctatcggaacacgatggggatgaacagtcaagacgggttgcgcaggtgatcattccatctacttacgtccctgggactactaaccacgatatcgccttgttaagattgcatcagcccgtggtgttgactgatcacgtagtgccgctgtgtttgccggagagaacattctcagagagaacccttgcttttgtgcggttcagcctggtttctgggtggggacagctgctggatagaggcgccacagccctggagctgatggtgctgaatgttcctcggctgatgacacaggattgtcttcaacagtcccggaaagttggcgactctccaaacatcacagaatacatgttctgcgcggggtacagcgatgggtctaaagactcatgcaagggcgactccggcggtccccatgccactcattacaggggcacctggtatctgaccggcatcgtctcctggggacagggttgcgcgacagtgggtcacttcggtgtctacacacgagtgtcacagtatattgaatggctgcagaagctgatgcgtagcgagcctcggcctggggttctactacgcgcacccttccca

SEQ ID NO: 9221 - DNA, 1398 bp, synthetic construct
  misc_feature 1..1398: note = source = /note="Description of Artificial Sequence: Synthetic coding sequence"
  source 1..1398: mol_type = other DNA
atggtgtcacaagcactgcgattgttatgccttttgttgggtttgcaggggtgcctggccgctggaggcgtggctaaggcttcaggaggcgagacccgggatatgccttggaagcccgggccccacagggtgtttgtcacgcaagaagaggcgcacggagtgcttcatcgtcgccgaagagccaacgcttttctggaggagctgagacctggctccctggagagggagtgcaaagaggaacagtgctcattcgaggaggctagagagatcttcaaagatgccgagcggactaagttgttttggatatcctacagcgacggggaccagtgtgcttcttcaccctgtcagaatggaggaagttgtaaggatcaactgcaatcttatatatgtttctgcctcccagcttttgagggtcgtaactgcgagactcacaaggatgatcaactgatctgtgtcaatgagaatgggggttgtgagcagtactgcagcgaccacacaggcaccaaacggagctgtcggtgccatgagggatacagcctcctcgccgacggggtgtcctgcacgcccacggtcgagtatccgtgcggcaaaattcctattcttgaaaagcggaacgcttctaagcctcaggggcggatcgtgggcggcaaagtctgtccaaaaggggaatgcccttggcaggtgctcctgctggtgaatggggcccaactttgcggcggaactctgattaacacaatatgggtggtttcagcagcccactgcttcgataaaatcaagaactggcgcaatctgattgctgtccttggcgaacatgacttatcagaacacgacggagacgagcagagtaggcgcgtcgctcaggtcattatccccagtacatatgtcccaggaacgacgaatcacgacatagccctcctgcggcttcaccagcccgtggtgttgactgaccacgtcgttcccctgtgtctgcctgagcggactttttcagagcgcacactcgcttttgtacggttctcattggtgtctggctggggtcagctgcttgatcgaggcgctactgctctggaattgatggtccttaatgtcccgcggcttatgactcaagactgccttcagcagtcaagaaaggtcggcgactccccgaacatcacggaatacatgttctgtgcagggtattcagatgggtcaaaagattcctgcaagggcgatagcgggggcccacatgcaactcattaccggggcacctggtacctgacaggcatagtgtcgtggggacagggctgcgccaccgtgggtcactttggagtctacacacgggtctcacagtacatcgagtggctacagaagctgatgcgctcagagcccagacctggggtgctactccgagccccattccca

SEQ ID NO: 9222 - DNA, 1398 bp, synthetic construct
  misc_feature 1..1398: note = source = /note="Description of Artificial Sequence: Synthetic coding sequence"
  source 1..1398: mol_type = other DNA
atggtgtcacaggccctacgactactttgcctgcttcttggcctacagggatgtctggcagccggaggagtcgcaaaggcaagtggcggtgagactagggacatgccctggaagccaggaccccacagagtattcgtgacacaagaagaggcccacggtgtactccaccgacgacgtcgtgcaaacgccttcttagaagaattgcgaccaggcagcctggagcgagagtgtaaagaagagcagtgcagcttcgaggaagcgagggagattttcaaggatgccgaaaggaccaaactcttctggattagctatagtgatggcgatcagtgtgccagcagcccctgtcaaaatggtggatcttgtaaggaccagttgcaatcgtacatttgcttctgccttcctgcctttgaaggcagaaactgcgaaacacacaaggatgaccagctcatatgtgtgaatgaaaacggtggctgcgaacagtattgctcagaccacaccggtacgaagagatcttgtcgatgccacgaaggatactcgctgttagcagatggtgtgtcttgcaccccaactgttgagtacccatgtggcaagatcccaatattagaaaagagaaacgcgtctaaaccacagggcaggattgtgggggggaaagtgtgcccaaaaggtgagtgcccatggcaggtgttgctgcttgtgaatggtgctcagttatgcggagggactttaatcaatacgatttgggtcgtgtcggctgcccattgcttcgacaagataaagaattggcgaaatctgatcgccgtactaggagaacacgatttgtccgagcacgacggggatgagcagagccgaagagtggcccaggtgatcattccgagtacctatgtaccaggcactacaaatcacgacatcgcattgcttcgcctgcaccagcctgtggtcctcacagaccacgtggtgccactgtgccttcccgagcgcacattctcagaaagaactctggctttcgttagattcagcttggtctcaggatgggggcagttgttggatcgaggtgctactgccctcgagctgatggtgctcaatgttcctcgcctcatgacgcaagattgtctacagcagagtagaaaggtgggcgattctcccaacatcaccgagtacatgttctgtgccggttactccgatggaagtaaggactcatgtaaaggggattccggggggcctcatgctacacactaccgagggacctggtatctgacaggtattgtgtcttggggacagggatgcgcaacggttggacactttggtgtgtatacaagggtcagccagtacattgagtggcttcaaaagctgatgagaagcgaacctagacctggcgtgttgctgcgcgccccctttcca

SEQ ID NO: 9223 - DNA, 1398 bp, synthetic construct
  misc_feature 1..1398: note = source = /note="Description of Artificial Sequence: Synthetic coding sequence"
  source 1..1398: mol_type = other DNA
atggtgtcccaggccctgagactgctgtgcctgttgctgggacttcagggttgcctggcagccgggggagtggcaaaggcgtctggaggcgaaaccagagacatgccgtggaagccgggaccccacagagtgtttgtgacccaggaggaggcccacggagtgctgcatcggagacgcagagcaaacgccttcctggaagagttgcgcccgggaagcctggaaagagagtgtaaagaagaacagtgcagcttcgaagaagcgagagaaatcttcaaggacgcggagcgcaccaagctgttctggatctcctactcggatggcgatcagtgtgcatcgagcccgtgtcaaaacggagggagctgcaaggaccagctgcaatcgtatatctgtttctgcctgccggccttcgagggaaggaattgcgagacgcacaaagatgatcagctcatttgtgtgaatgaaaacggcggatgcgagcagtattgttctgaccacaccggaactaagcgctcatgcagatgtcacgaaggttactcactgcttgcggacggtgtctcatgcactccgaccgtcgagtacccctgtggtaaaatccctatccttgagaagaggaacgcctcaaagccgcagggtagaatcgtggggggaaaggtgtgcccgaagggcgagtgcccgtggcaagtcctgctgctggtgaacggcgcccagctctgcggcggaactctcattaacaccatctgggttgtgtcagcggcgcattgcttcgacaagatcaaaaactggcggaatctgatcgccgtgctgggagaacatgacctctcagagcacgacggagatgagcagtcccgccgcgtcgcgcaggtgatcatcccatccacttacgtgcctggtactaccaaccacgacatcgcactgctcagactccatcagcccgtggtcctcactgatcatgtggtccctctgtgcctcccggaacgcaccttttccgaaaggactctcgcattcgtgcggttctcattggtatcgggatgggggcaacttctcgacaggggcgcgaccgccctggagctgatggtcctgaatgtcccgcggctgatgactcaagattgtctgcagcaatcgaggaaggtgggagattcaccaaacatcactgagtatatgttttgcgccggatatagcgacgggagcaaggactcatgtaaaggagactcgggcggaccgcacgcaacccattaccgggggacttggtacctgaccgggattgtttcgtggggacaaggatgcgcaacggtgggacacttcggagtctacaccagagtgagtcagtacatcgaatggctccagaagttgatgcgatcggagccaagaccaggagtgctgttgcgcgcccctttcccg

SEQ ID NO: 9224 - DNA, 1398 bp, synthetic construct
  misc_feature 1..1398: note = source = /note="Description of Artificial Sequence: Synthetic coding sequence"
  source 1..1398: mol_type = other DNA
atggtgtcgcaggcacttcgacttctgtgtctcctgctgggacttcaaggatgtttggccgcgggaggagtggccaaggcttcaggaggcgagacgagggacatgccgtggaagcctgggccccatcgggtgtttgttacgcaagaggaagcacatggcgtcctccacaggcggcgacgtgcaaacgccttcttggaagagctgcggccaggtagcctcgagcgcgagtgtaaggaggaacagtgttcattcgaagaagcaagagaaatcttcaaggatgccgagagaaccaaacttttctggatttcctacagcgatggtgatcagtgtgcttcctcaccctgtcaaaatggaggatcgtgcaaagatcagctccaatcctacatctgtttctgtctgcctgcttttgaaggtagaaattgtgaaactcataaagatgatcaactgatctgtgtgaacgagaacggtggatgtgagcaatactgtagcgaccataccggcacgaaaagaagctgtagatgtcacgaaggatacagcctgcttgcagatggagtgtcatgcaccccaactgtggaatatccatgcggtaaaatcccgatccttgaaaagagaaatgcgtccaagccccagggtcgaatagtcggaggtaaggtgtgtcctaagggagaatgtccttggcaggtgctgctgctggtcaacggagcacaactttgtggaggcactcttatcaacaccatttgggtcgtctcggctgcccattgttttgataagattaagaactggagaaatctgattgcggtgctgggagaacacgatctttccgaacacgacggggacgaacagtcccgacgcgtcgcccaagtcatcataccttccacctacgtgcctggaaccactaaccatgatattgccctcctccgccttcaccagcctgtggtgttgactgatcacgtggtgccgctctgcctgcctgaacggacgttttcggaacgcactcttgcattcgtgagattttcactggtgtcagggtggggtcaactgctcgatcggggcgcaactgccctggaactgatggtgttgaacgtgcctcggctgatgacccaggactgccttcagcaatcccggaaagtgggcgattcacctaacattactgagtacatgttttgtgcaggatactcagacggctcgaaggatagctgcaaaggtgattcaggaggtcctcatgcaacgcactacaggggtacctggtatcttaccggcatcgtttcgtggggccagggatgtgctaccgtgggtcactttggagtctacactagggtgagccagtacatcgagtggctgcagaagctgatgaggtccgaacccagacctggtgttctcctgagagcacccttccct

SEQ ID NO: 9225 - DNA, 1398 bp, synthetic construct
  misc_feature 1..1398: note = source = /note="Description of Artificial Sequence: Synthetic coding sequence"
  source 1..1398: mol_type = other DNA
atggtgagtcaggctcttcgacttctttgtctgctgttgggattacaggggtgtcttgccgctgggggagtcgccaaagcttccgggggagaaactagggatatgccatggaaacccgggccacatcgagtgtttgtgacacaggaagaagcccacggagtgctacaccggagacgacgggccaacgccttcctggaagaactaaggcctggatcactcgaacgggaatgcaaagaggaacagtgtagtttcgaagaagcacgcgaaatatttaaagatgctgaaaggacaaagctgttttggatttcttattctgatggagatcagtgcgcttcttctccttgtcagaatggagggagttgcaaagatcagctgcaaagttacatctgcttctgcctccctgcattcgaggggagaaactgcgaaacacataaggatgatcagctgatatgcgtgaatgaaaacgggggatgtgaacagtactgttctgaccacactggaactaaaaggtcttgcagatgtcatgagggatattctctcttagctgatggggtttcttgcactcccactgtcgaatatccatgtgggaagatcccaatccttgaaaagcgcaatgcaagtaaaccacaggggaggattgtcggagggaaagtgtgtcctaagggggaatgcccctggcaagtactgttgctggttaatggggctcagttgtgcggggggacattaattaacactatctgggttgtgtcagcagcccactgcttcgacaaaataaaaaattggcgaaacttgattgcggtgctgggagaacatgatctgtccgaacatgatggggatgaacagtcacgccgggtggcccaggtaatcatcccatccacatatgtaccagggactacaaaccacgatatagcactactcaggctacaccagcccgtggtgttaactgaccacgtcgtgcctctttgcctcccagagcggacattctccgaaagaacactcgcgttcgtacgtttctcccttgtatccggatgggggcagctgctagacagaggagcgacagcgctggaactaatggttctgaatgtgccacgactgatgactcaggattgtctccagcagtctcgaaaagtgggagattctccaaacatcactgaatacatgttctgtgctggatattctgatggatctaaagactcatgtaaaggggattcaggagggccccatgctacgcactataggggaacttggtacctcactggaatagtgtcatggggacagggatgtgcaactgtcgggcattttggagtgtacactagggtatcccagtatattgaatggctccagaaacttatgcgctcggaacccaggcctggagtgctccttagggcaccttttccc

SEQ ID NO: 9226 - DNA, 1398 bp, synthetic construct
  misc_feature 1..1398: note = source = /note="Description of Artificial Sequence: Synthetic coding sequence"
  source 1..1398: mol_type = other DNA
atggtgtcccaggcactccgcctgctttgtctgctcctgggacttcaaggctgtctggccgcaggaggtgtcgcgaaggcttctggcggcgaaactcgagacatgccctggaagccagggcctcacagggtgttcgtgactcaggaggaagcacatggtgtccttcatcgcaggaggcgggcaaacgccttcctcgaagaactccgccctggatcgctggagcgggaatgcaaagaggaacaatgttcgtttgaggaagcccgcgagattttcaaggatgccgagcgtactaaactgttctggatttcctactcagacggggaccaatgcgcatcgtccccctgccagaacgggggttcctgtaaagatcaacttcagtcatacatttgtttttgtctgccagcatttgaggggagaaactgcgaaacccataaagatgatcagctgatatgtgtcaacgagaacggtggctgcgagcaatactgcagcgatcacactggtactaagaggtcatgtaggtgtcacgaagggtacagccttctcgccgatggggtgtcatgtacgcctaccgtggaatacccctgtggaaagatacctattcttgaaaagagaaatgcaagtaagccacaaggaaggatagtcggcggtaaggtctgtcccaaaggtgaatgtccgtggcaagtgctgcttctggtcaacggcgcacagctctgcggtggcaccctgattaacacgatctgggtggtgtcagccgcacattgctttgacaagatcaagaattggagaaatttgattgccgtgctgggagaacatgatctttcggaacatgacggcgatgagcagtctcgccgagtcgcacaagtcatcatccctagcacctacgtcccaggtaccactaatcacgatatcgcactgcttcgcctgcaccagcctgtggttctgactgaccatgtggtgccactgtgtttgccagaaagaaccttctctgaacgtactctggcctttgttcgtttctcgcttgtctcgggatgggggcagctgctggatagaggagctaccgcattggaacttatggtgctgaatgtgccacgacttatgacccaagactgtctccaacaatcaagaaaggtgggagactccccaaacattaccgaatacatgttttgtgccggttatagcgatggttctaaggattcgtgtaaaggggattcgggcggaccccacgccactcattaccgcggtacctggtacttgaccggaatcgtcagttggggacaggggtgtgcaactgtcggccattttggcgtttacactagggtgtcacaatacattgaatggctgcagaagctgatgcggtcggagcctagacctggggtacttctccgtgcaccgtttcct

SEQ ID NO: 9227 - DNA, 1398 bp, synthetic construct
  misc_feature 1..1398: note = source = /note="Description of Artificial Sequence: Synthetic coding sequence"
  source 1..1398: mol_type = other DNA
atggtttcgcaagcgttacgtttattatgtttactattaggtttacaaggttgtttagcggcgggtggtgtagcgaaagcgtcgggtggtgaaacgcgtgatatgccgtggaaaccgggtccgcatcgagtatttgttacgcaagaagaagcgcatggtgtactacatcgacgacgtcgtgcgaatgcgtttctagaagaactacgtccgggttcgttagaacgagaatgtaaagaagaacaatgttcgtttgaagaagcgcgtgaaatatttaaagatgcggaacgaacgaaactattttggatatcgtattcggatggtgatcaatgtgcgtcgtcgccgtgtcaaaatggtggttcgtgtaaagatcaattacaatcgtatatatgtttttgtctaccggcgtttgaaggtcgaaattgtgaaacgcataaagatgatcaattaatatgtgtaaatgaaaatggtggttgtgaacaatattgttcggatcatacgggtacgaaacgttcgtgtcgatgtcatgaaggttattcgttattagcggatggtgtatcgtgtacgccgacggttgaatatccgtgtggtaaaataccgatattagaaaaacgaaatgcgtcgaaaccgcaaggtcgaatagttggtggtaaagtatgtccgaaaggtgaatgtccgtggcaagttctactactagttaatggtgcgcaattatgtggtggtacgttaataaatacgatatgggtagtttcggcggcgcattgttttgataaaataaaaaattggcgtaatttaatagcggtattaggtgaacatgatttatcggaacatgatggtgatgaacaatcgcgtcgagtagcgcaagtaataataccgtcgacgtatgtaccgggtacgacgaatcatgatatagcgctactacgattacatcaaccggtagtactaacggatcatgttgttccgttatgtctaccggaacgaacgttttcggaacgaacgttagcgtttgttcgtttttcgctagtttcgggttggggtcaattattagatcgtggtgcgacggcgctagaattaatggtattaaatgtaccgcgtctaatgacgcaagattgtctacaacaatcgcgtaaagttggtgattcgccgaatataacggaatatatgttttgtgcgggttattcggatggttcgaaagattcgtgtaaaggtgattcgggtggtccgcatgcgacgcattatcgaggtacgtggtatttaacgggtatagtatcgtggggtcaaggttgtgcgacggtaggtcattttggtgtatatacgcgagtttcgcaatatatagaatggttacaaaaattaatgcgttcggaaccgcgaccgggtgttttactacgagcgccgtttccg

SEQ ID NO: 9228 - DNA, 1398 bp, synthetic construct
  misc_feature 1..1398: note = source = /note="Description of Artificial Sequence: Synthetic coding sequence"
  source 1..1398: mol_type = other DNA
atggtttcccaagcccttcgtctcctgtgtctcctgctgggactccagggctgtcttgctgcgggaggagtcgctaaggcatccggaggggaaaccagagacatgccttggaagcctggtccgcatagggtctttgtcacccaggaagaagcgcatggagtgctgcatcggagacggcgcgctaatgcctttcttgaggaactcagacctggctcgctcgaacgtgaatgtaaggaggaacaatgcagctttgaagaagcccgagagatcttcaaggatgcagagcgaaccaagctcttttggatctcgtactcagatggagatcaatgtgcaagctcgccgtgccaaaacggtggttcatgtaaagatcagctccaatcgtacatttgtttttgtctgcctgcattcgaaggacggaattgcgaaacccataaggatgatcagcttatctgcgtgaacgagaacggaggctgtgagcaatactgttcagatcatactggaactaagcgatcgtgtcgatgccatgagggatacagccttctcgccgacggtgtctcctgtactcctaccgtggagtatccctgcgggaagataccaatacttgaaaagcgcaacgcgtccaagccccaggggaggattgtggggggtaaggtgtgtcctaagggtgagtgtccatggcaagttcttctgctggtcaacggcgcacagctgtgtgggggcacccttatcaataccatttgggttgtgtccgccgcgcattgtttcgataagattaagaactggcggaaccttattgcagtgctgggagaacacgacctttcggaacatgatggcgatgaacaatcacgccgcgtcgctcaggtcattattccttcgacgtacgtgccaggtaccaccaaccatgatatcgccctcctgagacttcaccagccggtggtcttgaccgatcacgttgtgccactttgtttgccggaacggaccttttcggaacgcactttggcatttgtgcgtttttcgctggtgtccggatggggacagctcttggaccgcggagccactgcattggaacttatggtgctgaacgtgcctcgcctgatgacgcaagactgcctgcagcaaagcagaaaggtaggtgacagccccaacattactgagtacatgttttgcgccggatatagcgacggatccaaagattcatgtaagggcgattccggagggcctcatgcgacccattaccggggaacctggtacctgaccggtatcgtgtcatggggacagggctgtgcaacggtggggcactttggagtgtacacccgtgtgtcacaatacatcgagtggcttcaaaaactgatgcgctcggaaccgaggcctggagtcctgcttcgcgccccttttccg

SEQ ID NO: 9229 - DNA, 1398 bp, synthetic construct
  misc_feature 1..1398: note = source = /note="Description of Artificial Sequence: Synthetic coding sequence"
  source 1..1398: mol_type = other DNA
atggtgagccaggcacttaggcttctttgtttactgctgggccttcaaggctgtttggccgcaggcggagtggctaaggcatcagggggtgaaaccagggacatgccgtggaaaccaggcccccacagggtctttgtcacacaggaggaggcccatggagtgcttcacagaaggaggcgcgcaaacgcatttctggaagagttgagaccaggcagcctcgagagggaatgcaaagaagagcagtgctcattcgaggaggcacgggaaatctttaaggatgcagaaagaacaaagctcttttggatctcttactccgacggcgatcaatgtgcctctagcccttgccaaaacggaggatcctgtaaagatcagctccagtcttatatttgcttttgtctccctgcattcgagggccgcaattgcgagacccacaaggacgaccaactgatttgcgtaaacgaaaatggcggatgtgagcaatattgcagcgaccataccgggacgaagagaagctgtaggtgccatgagggatatagcctccttgctgacggggtatcgtgtacaccaactgtggaatacccctgcggaaagatacccattctggaaaaacgtaacgcttctaaaccacaaggccggatcgtgggcggcaaggtgtgcccaaagggggagtgtccatggcaggtattattactggtgaacggcgcacagctgtgcggaggaacactgattaacaccatttgggtggtgtcagcagctcattgcttcgacaaaatcaagaactggagaaacctgatcgcagtgctgggcgagcacgacctgtcggaacatgatggtgatgagcagtctagacgtgtagcccaggttattattccaagcacatacgtgcctggtaccaccaaccatgacattgccctgctccgtctgcatcagcctgtggtcctgacagatcacgtcgtgccgttgtgtctccccgaaagaacctttagcgaacggacccttgcgttcgtcagattctccttggtgtccgggtggggccagctgctcgatcgcggggctaccgctctcgagttaatggtcctgaacgtccctcggctgatgactcaagactgtctccagcaatccaggaaggtaggagactccccgaatatcactgaatatatgttttgcgcaggatatagcgatggaagcaaggattcatgcaagggggactccggtggccctcacgcaactcactacagaggtacatggtaccttactggaatcgtatcatggggacagggctgtgcaacggtaggccatttcggcgtctataccagagtgagtcagtatatcgaatggcttcaaaaactgatgagatccgaacccaggcccggtgtgctcctgcgcgcaccatttcca

SEQ ID NO: 9230 - DNA, 1398 bp, synthetic construct
  misc_feature 1..1398: note = source = /note="Description of Artificial Sequence: Synthetic coding sequence"
  source 1..1398: mol_type = other DNA
atggtgtcccaggcgcttagactcctctgcctcctgctcgggctgcagggatgccttgcagcaggtggtgtggcaaaggcttccggcggagaaaccagggacatgccgtggaagccgggaccacatagggtgtttgtgacccaagaggaggcgcacggagttttgcataggagacgacgcgccaacgcattccttgaagagctccgcccgggctcgctggagcgagaatgcaaagaagagcagtgctcgtttgaagaagcccgggaaatcttcaaggacgccgagcgcactaagctgttctggatctcatacagcgacggggatcaatgcgcgtccagcccttgccagaacggcggatcatgtaaggaccagctgcagtcgtacatttgcttctgcctgccggctttcgaggggagaaactgcgaaacccataaggatgaccaactgatctgtgtcaatgagaatggaggatgtgagcaatactgctccgaccacactggaaccaagagatcgtgtcgctgccacgaagggtactcgctgttggcagatggcgtctcatgcacgccgaccgtggaatacccgtgcgggaagataccaatcctcgagaaacgcaacgcctccaagccacagggacgcatcgtcgggggcaaggtgtgcccgaaaggagagtgtccgtggcaagtgctgctcctcgtcaatggcgctcagctgtgtggaggcactttgatcaatacgatttgggtcgtgtcagcagcacattgctttgacaaaatcaaaaactggcggaatctgattgccgtgctgggggaacatgatctctccgagcatgatggagacgaacagagccgccgcgtggcccaagtgatcatcccatcgacttatgtcccgggaaccaccaaccacgacattgcactgctgcgcctccatcagcccgtcgtgctgactgatcacgtggtgccgctgtgtctgccggagcgcacgttctcggaacggacgctcgccttcgtcaggttctctctcgtgtccggatggggccaactccttgaccggggtgctaccgccctggaactcatggtgctgaatgtcccccggcttatgactcaagattgcctgcaacagagcaggaaggtgggagattcaccgaacataaccgaatacatgttctgtgccggctactcagatggaagcaaggactcatgcaagggagacagcggcggtccgcacgctacccattaccggggaacctggtacctgactggaatcgtgtcgtggggccaaggatgcgccactgtggggcactttggagtttacacccgcgtcagccagtacatcgagtggctgcaaaagttgatgcgctcagaacccaggcctggcgttctgcttagagcgccgttccca

SEQ ID NO: 9231 - DNA, 1398 bp, synthetic construct
  misc_feature 1..1398: note = source = /note="Description of Artificial Sequence: Synthetic coding sequence"
  source 1..1398: mol_type = other DNA
atggtatcccaagcgctgcggcttttatgtctgctcctgggattacaaggttgtctggcagccggaggagtagcaaaagcaagtggcggggagactcgggacatgccgtggaagcccgggccgcatcgcgtgttcgtgacccaggaagaggctcacggcgtcttgcaccggagacgtcgcgccaacgctttcctcgaagaactcagacctggatccctggagcgggaatgcaaagaggagcagtgttcatttgaggaagcaagggagatattcaaggacgcggagagaacaaaactgttctggatcagctactctgatggagaccaatgtgcgtccagcccatgccaaaatggcggaagctgcaaggaccagctgcagtcctacatctgtttctgcttgcccgctttcgaaggaagaaactgtgagactcataaagatgaccagctgatttgcgtcaacgagaatggaggttgcgagcagtactgctcggaccacaccgggacgaaacgcagctgcagatgccatgagggctacagtctactggcggatggagtgtcctgcactccaaccgttgagtacccctgtggaaagatacctattttagagaaaagaaatgcctcaaaaccacaaggcagaattgtgggagggaaggtgtgccctaagggtgagtgcccatggcaggtccttcttctggtgaacggcgctcaactttgcggggggactcttatcaacaccatctgggtcgtaagcgcagcccactgctttgataaaatcaaaaactggagaaaccttatcgctgtcctgggtgaacatgacctgtccgaacatgacggggacgagcagagcagaagagtagcccaagtgattatcccaagtacatatgtgcccgggacgaccaatcatgatatcgcactgttgagattacatcagcccgtcgtactcacggatcacgtcgtgcccttatgtctgcccgagaggactttctcagagaggactctagcctttgtgaggttctcactggtgtcaggctgggggcagctcctcgatcgaggcgccaccgccttggagttaatggtgcttaacgtaccgagactaatgacccaggattgtctacaacaatctagaaaggtgggagactcccccaatatcaccgaatacatgttctgcgccgggtattccgatggttcaaaagactcttgtaagggggacagcgggggtccccatgctacacactatcgcggtacatggtaccttacggggatcgtgtcttgggggcaggggtgtgccacagtgggtcactttggagtttacacaagggtgagccaatacatcgagtggctgcaaaagctgatgaggtcggaacctagacccggagtgctccttcgggccccgtttccc

SEQ ID NO: 9232 - DNA, 1398 bp, synthetic construct
  misc_feature 1..1398: note = source = /note="Description of Artificial Sequence: Synthetic coding sequence"
  source 1..1398: mol_type = other DNA
atggtgtcccaagccctaaggctgttgtgcctgcttcttggcctccaaggctgtctggctgccgggggagtcgcaaaggcctcgggtggcgagacccgggatatgccatggaaaccggggcctcaccgagtattcgttactcaagaagaagcccatggagtactgcacagacgacggagagctaacgctttcctggaagaacttcgtcccggatcactggagcgtgagtgtaaagaagaacagtgcagttttgaggaagcccgcgaaatcttcaaggacgccgagcggactaaattgttttggatctcttatagcgacggagatcaatgtgccagttccccgtgtcagaacggcggaagttgcaaggatcagctccagtcatatatttgcttctgtcttccggcttttgaggggcgaaactgcgagacccataaagacgatcagctgatttgtgtcaacgaaaacgggggttgcgaacagtattgttccgaccacacgggcacaaaacgatcatgtcgctgccatgaaggctacagtcttctggccgacggggtatcgtgcacaccgacggtagaatacccatgcgggaaaatacccatcctagagaaaagaaatgctagcaagccacagggaagaatcgttggggggaaagtttgtccaaagggagagtgtccatggcaggttctgctcttagtgaatggcgctcagctgtgcggcggaacgctgattaacacgatatgggtcgtgtctgccgcccactgttttgataaaatcaagaattggaggaatctcattgcagtcctcggtgagcacgacttaagcgaacatgacggagacgagcagagtcggcgggtggcccaggttataatccctagtacctatgtaccagggacaacaaaccatgatatagcgcttttgagactgcaccaacctgtggtactgacagaccacgtggttccactctgcctgcccgaaaggacgttttcggaaagaactttggcattcgtgaggttttcgctggtatcaggctggggccagctgctcgatcggggcgccacagcattagagctgatggttctgaacgtaccccgtttgatgacccaagattgtctgcagcagagccgtaaagttggagacagccctaatatcaccgaatatatgttctgcgccgggtattcggatggtagcaaggattcctgcaaaggcgacagtggcggcccccacgccacccattaccgcggtacctggtacctcaccggaattgtaagctggggacagggttgcgctacagtcggtcattttggcgtttatactcgcgtttctcagtacattgaatggcttcagaaattgatgcgaagcgaaccaagaccaggcgtgctattgagggctcccttcccc

SEQ ID NO: 9233 - DNA, 1398 bp, synthetic construct
  misc_feature 1..1398: note = source = /note="Description of Artificial Sequence: Synthetic coding sequence"
  source 1..1398: mol_type = other DNA
atggtgtctcaggctttgaggctgctgtgcttgctgcttggactgcaaggctgcctagcagcaggcggcgtcgccaaagctagcggaggcgaaactagagatatgccttggaagccaggtccccatagagtgttcgtgacccaagaagaagctcacggtgtgctccacaggagacgtcgcgctaacgcttttctggaggagctgaggccaggcagtctggagagagaatgcaaagaggagcagtgcagcttcgaggaggcgcgggaaatctttaaagatgccgagcgcactaagctgttttggatcagctattccgacggcgaccaatgtgctagttcaccttgccaaaacggcggcagttgtaaagaccaactgcaatcatatatctgcttttgcttaccagccttcgaaggtcgcaactgcgaaacccacaaagatgatcagttgatctgcgtgaatgaaaacgggggctgcgaacaatactgtagcgatcacaccggaacaaaacggtcctgcaggtgccacgagggatacagtctgctggccgacggcgttagctgcacaccgacagtcgagtacccatgtggcaaaattcccattctggagaagcggaacgcttctaagcctcaaggtagaatcgtgggtggcaaggtgtgccccaagggcgaatgtccttggcaagtgctcttgttggtcaatggcgctcagttgtgcggtggcactctgatcaacaccatttgggtggtgtctgcagctcactgcttcgacaaaataaaaaactggcggaacctgattgccgtgctgggcgagcacgaccttagtgaacacgatggagatgaacagtcccggagagtcgctcaggtgatcatcccatctacttacgtcccagggaccaccaatcatgacattgctctgctgcggctacatcagccggtggttctgacagatcatgtggttcctctgtgcctccctgagagaaccttcagcgaaagaactcttgccttcgtgcggtttagcctcgtgagcgggtggggccagctgttggataggggcgccaccgccctggaactcatggttctaaacgtccctcggctgatgacccaggactgcctgcagcagagcaggaaagtgggcgattctcccaacatcaccgaatacatgttttgcgctggctacagtgatgggtctaaggactcctgcaaaggcgacagtggtggtccacacgcgactcactacagaggaacttggtacctgacaggcattgtgagctgggggcagggatgtgctactgttggccactttggtgtctacacaagggtttcccaatacattgagtggctccaaaaactcatgcgcagcgagccaaggcctggagtattgttgagagctcccttcccg

SEQ ID NO: 9234 - DNA, 1398 bp, synthetic construct
  misc_feature 1..1398: note = source = /note="Description of Artificial Sequence: Synthetic coding sequence"
  source 1..1398: mol_type = other DNA
atggtgagccaagccttgagactcttgtgcctcttgctcggactgcaaggttgcctggctgcaggaggcgtggccaaggctagcggaggtgagacccgggatatgccatggaagcccggaccccaccgagtgtttgtcactcaggaagaggcacacggtgtgttgcaccgacgacggcgggctaatgcgttcctggaggaactccgccccgggagcttggaacgggaatgcaaggaagaacaatgtagttttgaggaggctcgggagatcttcaaggacgccgaacggacgaaattgttttggatttcctattctgacggcgaccagtgcgcatcctcaccctgtcagaatggtggaagctgtaaggaccagctgcagagctacatctgcttctgtctcccagcttttgaaggacgcaactgcgagacccacaaggacgaccagctgatctgcgtaaacgaaaatgggggctgtgaacaatactgctccgaccacaccggaaccaagcgatcctgtcgctgtcatgaaggctatagtctgcttgccgatggagtaagttgtactccaaccgtggagtatccatgcggcaaaattcccattcttgagaaacggaacgccagtaagcctcagggcagaattgtaggtggcaaggtgtgccccaagggtgagtgcccatggcaggtcctgctgctggtaaacggcgctcaactttgcggaggcacgcttataaacactatatgggttgtttctgccgcccactgtttcgataagatcaaaaattggcgcaatcttatcgccgtgttgggcgaacatgacttgagcgagcacgatggtgatgaacagtcacggagggttgctcaagtgatcataccaagcacgtacgttccggggactaccaaccatgacatcgcactgttgagactgcaccagcccgtcgtacttaccgatcatgtggttcccctctgtcttccagagagaacgttcagcgagcgcaccctggcctttgttcgattctcactggtttcaggctggggtcagctgctggacagaggggccactgcactcgaactgatggtgttgaatgttcccagactgatgacccaggactgtctccagcagagtcggaaggtgggtgattccccaaacatcactgagtacatgttttgtgccgggtactcagatggaagcaaagactcatgtaaaggcgactcaggaggccctcacgctacccactataggggcacctggtatctgaccggtatagtctcttggggacagggatgtgcgaccgtagggcatttcggggtgtatactcgagtttcacagtatattgagtggctgcagaaattgatgagatcagaaccacgacccggggtgctgttgcgggcacctttcccg

SEQ ID NO: 9235 - DNA, 1398 bp, synthetic construct
  misc_feature 1..1398: note = source = /note="Description of Artificial Sequence: Synthetic coding sequence"
  source 1..1398: mol_type = other DNA
atggttagccaagcacttaggctgctctgccttctgctcggacttcaggggtgtctcgcggcaggtggagtcgctaaggccagtggtggagagaccagagacatgccatggaaacccgggcctcacagagtgttcgtgacccaggaggaagcccacggcgtcttgcatcgccggcgccgcgccaacgccttccttgaagagctgcgacccgggtcactggagagagagtgtaaggaggagcagtgttccttcgaggaggcccgagagatttttaaggatgctgaacgcacaaaactcttttggatctcatatagcgatggcgatcagtgcgctagttctccgtgccaaaatggtgggagctgcaaggatcagctgcagagctacatttgcttttgcttgcccgccttcgaaggtcgtaattgtgaaacacacaaagacgatcagctgatttgtgtgaatgagaacgggggatgcgagcagtattgctcggaccacacgggaacaaagaggtcatgtcgctgccacgagggttactccctgttggccgacggcgtgtcctgtaccccaacggtcgaatacccatgcgggaaaatcccaattctggagaaacgaaatgcttctaaaccccaagggagaattgttggcgggaaggtgtgcccaaagggcgaatgcccgtggcaggtgctgctcctggtgaacggcgcgcagctgtgtggaggcactcttatcaatacaatatgggtcgtatccgctgctcactgttttgacaagataaaaaactggcgaaatttaatcgccgtcctgggcgaacacgatctctctgagcacgacggcgacgaacagtcgaggcgggtggcccaggtgatcattccttctacttatgtgcctgggactactaaccacgacatcgctttactgcgtttgcaccagcccgtggtgttgaccgatcacgtcgtgccgctgtgtctcccggaaagaactttcagcgagaggactctggccttcgtcaggttttccctggtctccggatggggccagctgctggaccggggagccacagctctggagctgatggttttaaatgtgcccagactaatgacccaggattgccttcagcaaagcaggaaagtgggggactcaccaaacatcactgaatatatgttctgtgcgggctacagcgatggtagcaaagactcatgtaaaggagacagcggcggtccacacgcgacgcactacaggggcacttggtacctgaccgggattgttagttggggacaaggatgcgccactgtgggccatttcggcgtctatacacgcgtatcgcagtacattgagtggctccagaaactcatgcggtctgagccccgtcctggcgtcttgctccgggccccttttcca

SEQ ID NO: 9236 - DNA, 1398 bp, synthetic construct
  misc_feature 1..1398: note = source = /note="Description of Artificial Sequence: Synthetic coding sequence"
  source 1..1398: mol_type = other DNA
atggtgagccaggcactgaggctgctgtgcctccttctgggcctccagggctgcctggcagcaggaggagtggcaaaggcatccgggggcgagactagagacatgccatggaaaccaggtcctcacagggtgtttgtgacccaagaagaggcccacggtgtgctgcatagaagaagaagggcaaatgcctttctcgaggaactgcgacccggatccttggagcgagaatgcaaagaagagcaatgctcctttgaagaagcaagagagattttcaaggatgccgaacggactaaacttttctggatctcttacagcgatggcgaccaatgtgcatcgtcaccctgtcaaaacggggggtcctgtaaggaccagcttcaatcgtacatatgtttctgtctgccagcatttgaaggacggaattgcgaaacccacaaggatgaccaactgatttgtgtgaatgagaacggtggatgtgagcaatactgttcggaccacaccggaactaaacgcagctgtcgttgccatgaagggtacagcctccttgccgatggcgtgtcgtgtacgccaactgtggaatacccatgtggaaagatacctattcttgaaaaacggaatgcgtcgaagccgcaaggccgtattgtgggtggaaaggtgtgccccaaaggcgaatgcccctggcaggtcctgctcctggtcaatggggcccaactgtgtggtggcactctcattaacactatctgggttgtcagtgccgcgcattgtttcgacaaaatcaagaactggagaaacctgatcgccgtgctgggagaacatgacctgtccgaacatgacggtgacgaacaatcgcgccgtgtggcccaggtgattattccctccacctacgtccctgggaccactaaccacgatattgctctgcttagacttcaccagccagtggtgctgaccgatcacgtggtcccactgtgcctccctgagagaacgttttcggaacgcactctggcattcgtcaggttctcgcttgtctccggttggggtcagcttctcgatcgtggtgccacggcgctcgaactcatggtccttaatgttccacgccttatgactcaagactgtctgcagcagagccgaaaggtgggtgattccccgaacattactgagtatatgttctgcgcaggctactctgatggctcgaaggactcgtgtaagggcgattccgggggaccacacgcgacccattaccggggtacctggtacttgaccgggattgtgtcatggggtcaaggttgcgctaccgtgggtcattttggagtgtatactagagtttcgcaatacattgagtggctgcaaaagctcatgagatccgagcctcggcccggtgtgttgttgcgtgcaccatttcct

SEQ ID NO: 9237 - DNA, 1398 bp, synthetic construct
  misc_feature 1..1398: note = source = /note="Description of Artificial Sequence: Synthetic coding sequence"
  source 1..1398: mol_type = other DNA
atggtgagtcaggctttgagactgctgtgtctcctgctgggcctgcaaggctgtttggctgccggcggcgtggctaaggcatccggaggtgaaacacgagacatgccatggaagcccggcccccatagagtgttcgtgacacaggaagaggctcacggggtgctgcacaggcggagacgtgctaatgcattcctcgaagaactgaggcctgggagtttggaaagagaatgcaaggaggagcagtgcagttttgaagaagcacgggaaatttttaaggatgcagaaaggaccaaactgttctggatcagctattctgacggggaccagtgcgccagctccccttgccagaatggagggtcatgcaaggatcagctccagtcctatatttgcttctgtctccctgcgttcgagggccgaaattgcgagacccacaaggacgatcaattgatctgtgtgaatgagaacggaggatgtgaacagtactgctccgatcataccgggaccaagagatcttgcagatgccacgaaggctattcactgctcgccgacggcgtcagctgtaccccgaccgttgaatatccttgcggcaaaatccctattttggagaaaaggaacgcaagcaagccacagggcagaatcgtgggcggcaaggtctgccccaagggcgagtgtccctggcaggttttgctcttggtgaacggcgcccaactgtgcggagggaccttgattaacacaatatgggtggtgagcgccgcccattgcttcgataagatcaaaaactggcgaaacttgatcgccgtcttgggagagcacgatctttccgaacatgacggagacgaacagtctcgaagagtggcccaagtgatcattccgtccacctacgtgccaggcactacaaatcacgatatcgcgctcctgaggctacaccagcctgtagtgctgaccgaccacgtcgtgccactctgccttcctgagcgaaccttctcggagagaactcttgcttttgtgagattctctcttgtgagtggatggggccagttattagatcggggcgccactgctttggaactgatggtgctgaacgtacccaggctcatgacccaggattgtctacagcaatctcggaaggtgggcgattctccaaacatcaccgagtatatgttttgcgctggatattcggatggctcgaaggattcttgcaagggagacagcggtggtccacacgccacacattataggggcacttggtatctcacaggcattgtctcttggggacaggggtgtgcgacagtggggcattttggagtatacacacgtgtgtctcagtatatcgagtggctacagaagctcatgaggtcagagcctcggccgggggttttactacgcgcgcccttcccc

SEQ ID NO: 9238 - DNA, 1398 bp, synthetic construct
  misc_feature 1..1398: note = source = /note="Description of Artificial Sequence: Synthetic coding sequence"
  source 1..1398: mol_type = other DNA
atggtgtcccaggccctgcggctgctgtgcctgttgctcggcctgcaggggtgcctggctgctggaggggtggctaaagcatctggcggagaaacgagagacatgccctggaagcctggccctcaccgagtctttgtcacacaggaagaagcacacggggtgcttcaccggcgccgtagagcaaacgcttttctggaggaactcaggcctgggtcactggaaagagagtgcaaagaggagcagtgttccttcgaggaggcaagggagatctttaaggacgccgagagaactaagctcttttggatttcctacagtgatggtgatcaatgtgcaagcagtccctgccagaacggagggagctgcaaagatcagcttcaatcatacatatgtttttgcttgcctgcatttgagggtaggaattgtgaaactcacaaggacgaccagctgatatgcgtcaatgagaatgggggctgcgagcagtactgcagcgatcacacgggtacaaaacgcagctgcaggtgtcacgaagggtattctttgctcgccgatggcgtgagctgcacacccacagtcgaatacccctgtgggaagattcccatcctggagaagcggaacgcctcaaagccacaaggacgaatcgttggcggcaaggtttgtcccaaaggagagtgtccatggcaggtgttgctcctagtgaatggagcccagctgtgcgggggaactttgataaacacaatatgggtagtgtccgcggcccactgctttgacaagataaagaattggcgtaatttgatcgcagttcttggcgaacacgatctgagcgagcacgacggggatgaacaatctcgaagagtggcacaagtaattatcccttccacttacgtgccaggcactacaaatcatgacatcgcgctcctacggctacatcaacctgtcgttctgactgatcacgtcgtgccattgtgcctacctgaacgcacattctccgagcggacccttgccttcgtgcggtttagccttgtatcaggatggggtcagctcttggacaggggcgctacggccctggaactgatggtgctgaatgtgcctagattgatgacccaggactgccttcagcaatcccggaaggttggcgacagtccaaacattactgagtatatgttttgcgcgggctattctgatgggtcaaaggattcgtgcaagggcgactcaggtggcccccacgccacccactaccgcgggacttggtatctgacgggcatcgtgagctgggggcaaggatgtgctactgtggggcatttcggggtctataccagagtgtcacagtatattgagtggctccagaagctgatgcgtagcgaaccgcgacctggtgtattgttgcgggccccgttcccc

SEQ ID NO: 9239 - DNA, 1398 bp, synthetic construct
  misc_feature 1..1398: note = source = /note="Description of Artificial Sequence: Synthetic coding sequence"
  source 1..1398: mol_type = other DNA
atggtgtcacaggctctccggcttctgtgcctgctgctaggattgcagggatgcctcgctgcaggaggggtagctaaggccagtggaggggaaactagggatatgccgtggaaacctgggccccaccgggtctttgtgacacaggaagaagcgcacggggttcttcataggcgacgtcgagcaaatgccttcctcgaagaacttcgacccggatccctggaaagggaatgtaaagaagaacagtgttcattcgaagaggctcgggaaatattcaaagatgccgaacggactaaactcttctggatcagttattctgatggggatcaatgtgcctcatctccctgccagaatggggggtcctgcaaagaccagctccagtcatatatttgcttttgtctccctgcctttgagggaaggaattgcgaaacacacaaggatgatcagcttatctgtgtgaacgagaacggagggtgtgaacaatattgttctgatcacactggaacaaagcgatcctgtaggtgtcatgaggggtactctctactggccgatggagtgtcatgcacacctactgtggaatacccctgtgggaagatacctattctcgaaaaacgaaatgcttccaaaccacaggggaggatcgttggagggaaagtgtgtcctaaaggggagtgtccctggcaagtgctcctattggtcaacggagcacagctctgtggagggactctgatcaacacaatatgggtggtttcagcagctcattgcttcgataaaataaaaaattggcggaacctgattgcagtactcggagagcatgatctgtctgagcacgatggggacgaacagtctagacgggtggcccaggtaatcatcccctctacatatgtccccggaactacaaaccacgacatagctctgctcaggctgcaccagccagttgtgttaacagatcacgtggttcccctctgtctgcctgaacgaacattttccgaaaggactctcgctttcgtcaggttctctctcgtgtcagggtgggggcagttgctagaccgaggggccactgccttagaactcatggttctgaatgtcccccgccttatgacacaggattgcttgcagcagtcaagaaaagtcggagactctcccaacataactgaatacatgttttgcgcgggatatagtgatgggtctaaggattcttgtaaaggagattccggaggaccccacgcaacacactatagagggacatggtatcttacagggattgtctcctgggggcagggatgcgcaacagtaggacactttggagtctatactcgagtctctcaatatattgaatggcttcagaaacttatgcgctcagagccccgcccaggagtgctactgcgggccccttttcca

SEQ ID NO: 9240 - DNA, 1398 bp, synthetic construct
  misc_feature 1..1398: note = source = /note="Description of Artificial Sequence: Synthetic coding sequence"
  source 1..1398: mol_type = other DNA
atggtgtcccaagcactccggctgctgtgtctgctcctgggactgcaaggatgcctcgccgcgggaggagtcgcgaaggcttcgggaggagaaacccgggacatgccgtggaaaccgggtccgcatcgcgtttttgtgacccaggaggaggcacatggggtcctccaccgccgtcggcgcgcaaacgccttcttggaggaactgcggccaggctcgctcgagagggagtgcaaggaagagcagtgtagtttcgaggaagctcgggaaatcttcaaggacgctgaacgcaccaagctgttctggatcagttactccgacggggatcaatgcgcgtccagcccttgccaaaacggcggctcatgtaaggaccagctgcagtcgtacatttgtttctgcttgcccgcctttgagggccgcaattgcgagactcataaagacgaccaactgatctgcgtgaacgagaacggaggatgcgaacagtattgctcagatcacacgggaaccaagcgctcgtgccgatgccatgaaggatactcgctgttggccgatggagtgtcttgcaccccgactgtcgagtacccatgcggcaagattcccatcctggaaaagcgaaacgcgtcgaaacctcaaggacggatcgtgggcggtaaagtgtgcccaaagggagagtgcccgtggcaggtcctcctgctggtgaacggagcacagctgtgtgggggcaccctgattaacactatatgggtcgtgtcggccgctcactgcttcgacaagatcaagaactggcgcaatctcatcgcggttctcggcgaacacgatctttcggagcatgacggagatgaacagtcaagacgcgtggcgcaagtcataatcccctcgacctatgtcccaggcactaccaaccacgacatcgccctgcttcggctgcatcagcctgtcgtgttgactgaccacgtggtacctctgtgtctgccggaacgcaccttctccgaaagaaccctggccttcgtgagattcagcctggtgagcggctggggacaacttttggaccggggcgctactgcactcgaactcatggtgctcaatgtgccgaggctgatgacgcaagactgcctccaacagtccaggaaggtgggagattccccgaatatcactgaatacatgttttgtgcgggatacagcgacggctcgaaggatagctgtaaaggagacagcggaggcccacatgccacgcattaccgcggcacctggtacctgactggcatcgtgtcatggggacagggttgcgccaccgtcggtcattttggagtgtacactagagtcagccagtatatcgaatggctgcagaaacttatgagaagtgaaccgcgcccaggagtgttgcttagagccccgtttcct

SEQ ID NO: 9241 - DNA, 1398 bp, synthetic construct
  misc_feature 1..1398: note = source = /note="Description of Artificial Sequence: Synthetic coding sequence"
  source 1..1398: mol_type = other DNA
atggtgtcccaggcactgaggctgttgtgcctgttgctcggcctccagggttgcctcgcggcgggaggagtggcaaaagcaagcggaggtgagactcgcgacatgccttggaagccaggccctcaccgggtgtttgttacgcaggaagaagcacatggggtgctccaccggcggagacgtgcgaacgcctttctcgaagaactgcggccgggaagcctggaaagggaatgcaaggaagagcaatgctccttcgaggaagcccgggaaatcttcaaagacgctgagcgaactaaacttttctggatctcctacagcgatggcgatcaatgcgcctcgtccccttgtcagaacgggggctcatgtaaggatcagctgcagagctacatctgcttctgtctgccagccttcgagggccgcaattgcgagacgcataaagacgaccaactcatctgcgtcaacgagaatgggggatgcgagcaatactgctcagatcacaccggaaccaagagatcctgccgctgccatgagggatactcgctcttggccgacggggtgtcgtgtactccgaccgtggagtacccgtgtggcaaaatcccgatcctggaaaagcgcaatgcttccaagccccagggaagaatcgtgggaggaaaggtgtgcccgaagggggagtgcccgtggcaagtcctgctcctcgttaatggtgcccaactttgcggtggtacccttatcaatacgatctgggtggtgtcggccgcacactgtttcgataagattaagaactggcgcaacctgatagctgtcctgggggagcacgacctgtcggaacacgacggggacgagcaaagcagaagagtggcgcaggtcatcatcccatcaacctacgtcccgggaaccactaaccacgatatcgcccttttgcgtctgcatcaaccggtcgtcctgaccgaccacgtcgttcccctgtgcttgccggaacgtactttctcggaacggactttggcgtttgtgcggttctccctggtcagtggctggggacagcttctggaccgcggagccactgcgctggaattgatggtgctcaacgtgccacgcctcatgacccaggactgcctgcagcagtcgcgcaaggtcggcgatagccctaacattacggagtacatgttttgtgctggatactcagacggaagtaaagatagctgcaagggcgatagcggcggaccacatgccacccactataggggaacctggtacctcactggtatcgtgtcctggggacaaggttgtgccactgtgggacatttcggagtatacacccgcgtgagtcagtacattgaatggctgcagaagttgatgcgctcagaacctcggccaggagttctgttgagagcaccattcccc

SEQ ID NO: 9242 - DNA, 1398 bp, synthetic construct
  misc_feature 1..1398: note = source = /note="Description of Artificial Sequence: Synthetic coding sequence"
  source 1..1398: mol_type = other DNA
atggtaagtcaagcattaagattattatgtcttcttttaggacttcaaggatgtcttgcagctggaggtgttgcaaaagcatcaggaggagaaactcgagacatgccatggaaaccaggtccacatagagtttttgtcacacaagaagaagcacatggagttcttcataggagaagaagagctaatgcatttttagaagaattaagaccaggttcattggaaagggaatgtaaagaagaacaatgtagttttgaagaagctcgagaaatatttaaagatgcagaaagaacaaaattattttggattagttatagtgatggtgatcaatgtgcttcatctccatgtcaaaatggtggatcttgtaaagatcaattacaatcttatatttgtttttgtttaccagcttttgaaggaagaaattgtgaaacacataaagatgaccaattaatatgtgtaaatgaaaacggaggatgtgaacaatattgttcggatcatacaggtacaaaaaggtcatgtagatgtcatgaaggttatagtcttttagctgatggagtatcttgtactccaacagttgaatatccttgtgggaaaattccaattttagaaaagagaaatgcttcaaaaccacaaggaagaattgttggaggaaaagtatgtcctaaaggagaatgtccatggcaagttttattattagtaaatggagcccagttatgtggaggtacacttattaatactatttgggttgtaagtgcagctcattgttttgataagattaaaaattggagaaacctaattgctgtcttaggtgaacatgatttatcagaacatgatggagatgaacaatcaagacgagttgcacaagtaattattccaagtacctatgttccaggaactacaaatcatgatattgcattactaagattacaccaacctgtagttcttaccgatcatgttgttccattatgtttgccagaaagaactttttcagaaaggactttagcatttgttagattttcattagtttcaggttggggacaattacttgacagaggagcaactgctttagagttgatggttttgaatgttccacgtttaatgactcaagattgtttacaacaatcccgtaaagttggggattcacctaatattacggaatatatgttctgcgctggttattcagatggatcaaaagattcttgtaaaggagattctggaggtccacatgcaactcattacagaggaacttggtatttaactggaatagtttcttggggacaaggttgtgctacagtaggacattttggagtttatacaagagtttctcaatatatagaatggttacaaaagttaatgagaagtgaaccaagaccaggagttcttcttagagctccatttcct

SEQ ID NO: 9243 - DNA, 1464 bp, synthetic construct
  misc_feature 1..1464: note = source = /note="Description of Artificial Sequence: Synthetic coding sequence"
  source 1..1464: mol_type = other DNA
atgggtcggccactccatcttgtcctgctttcagcgtcgttggcgggccttcttcttctgggtgagtcgctctttatacgacgcgaacaagctaataacattctggccagagtcacccgcgcaaattcatttcttgaagaaatgaaaaagggacatctggaaagagaatgcatggaagagacgtgttcgtacgaagaggcccgagaggtctttgaagattccgataaaacgaatgagttctggaacaagtacaaggacggagatcagtgcgagactagcccttgtcaaaaccagggcaagtgtaaggacgggcttggggaatacacttgtacgtgcctcgaggggtttgaaggaaaaaactgtgaacttttcaccaggaaactttgttccctggataacggagattgtgatcagttctgtcacgaagaacagaactccgtcgtgtgctcatgtgcacgcggctacactctggctgacaacggcaaagcatgtattccgactggaccttacccctgcggtaagcaaacgctggagcgtcggaagagatccgtcgcacaagcaacttcgtcctcaggggaagcaccagattccattacttggaagccatacgacgctgccgacctcgatccaactgaaaatccttttgatctgctcgatttcaaccagacccaacctgaacggggcgacaacaaccttactcggattgtcggcggacaggagtgtaaagatggcgaatgtccttggcaggcattgctcattaacgaagagaacgagggtttttgtggtggtaccattctctccgagttctatatcctgactgcggcacattgtctttaccaagcaaagcgttttaaggtaagggtgggagacagaaacacggaacaagaggaaggtggtgaagcagtccatgaagtcgaagtggtgatcaaacacaatcggttcaccaaggaaacttacgattttgacatcgccgtgctgcgccttaagacccctattacctttcgaatgaatgtggcaccggcctgcttgcccgagagagattgggctgagagcacccttatgacgcaaaaaactggaatcgtgtcaggttttggtagaacccatgaaaaaggccgtcagtcaaccagacttaagatgctcgaagttccctacgtggatagaaatagctgtaagctgagttcctcgttcatcataacccaaaacatgttctgcgctggttacgacaccaagcaagaggatgcatgtcaaggcgattccgggggacctcacgtgaccaggtttaaagatacttactttgtgaccggaatagtaagctggggggagggatgcgctcggaagggcaagtacggaatctacaccaaagtgactgcattccttaaatggattgacagatcgatgaaaactagaggccttccgaaggctaagtcccacgccccagaggtgattacttcctcaccattgaaa

SEQ ID NO: 9244 - DNA, 1464 bp, synthetic construct
  misc_feature 1..1464: note = source = /note="Description of Artificial Sequence: Synthetic coding sequence"
  source 1..1464: mol_type = other DNA
atgggacggccgctgcatctggtccttctgagcgcttcgttggcaggactgcttctgcttggcgaatccctctttattcgccgggaacaagcaaacaacattttggcgcgggtgaccagagcgaactcgtttctcgaagagatgaagaagggccacctcgaaagagaatgcatggaggaaacctgttcgtacgaagaggcaagagaagtatttgaagattcagacaagactaatgaattttggaacaaatacaaggatggagatcagtgcgaaacctccccatgtcaaaatcagggaaagtgtaaggacggattgggggaatacacctgcacttgtctcgaaggattcgaaggtaagaactgtgagctgttcaccagaaagctctgcagcctggataatggagattgtgaccagttttgccatgaagaacaaaattcagtggtgtgttcatgcgcgagagggtacacccttgccgataacggaaaggcatgtattccgaccggaccttacccttgtggtaagcagaccctcgaaagacgcaagcgctccgtggcccaagcgacgtcatcatccggcgaagcaccagactcgatcacctggaagccctacgatgcggcagatctcgatcctaccgaaaaccccttcgaccttctggacttcaaccagacccaacctgaaaggggtgacaataaccttactcggatcgtggggggacaagaatgcaaggatggtgaatgcccctggcaggcacttcttatcaacgaggaaaacgagggattttgtggaggtaccatcctgagcgagttttacatccttactgcagctcactgtctttaccaagcgaagcgtttcaaagtccgcgtgggtgatagaaacaccgaacaagaggaaggaggagaagccgtccatgaagtggaagtggtgattaaacacaatagattcaccaaggaaacctacgactttgatatcgcagtgctccgccttaagaccccaattacctttcgcatgaatgtggcaccagcctgtctgccggaaagagactgggcagagagcactcttatgactcaaaaaactggaatcgtgtcggggtttgggcggacccatgagaagggccggcaatccactcgtctgaaaatgcttgaagttccatacgtggatagaaattcgtgtaaactgtcctcgagctttatcattacccagaacatgttttgtgccggttacgataccaagcaagaggatgcgtgtcaaggagactcagggggaccacatgttactcggtttaaagatacgtacttcgtcaccggcattgtctcatggggtgaaggttgcgcacgcaaaggaaagtacggaatttacactaaggtgaccgcattcctcaagtggatagaccgcagcatgaaaaccagaggactgcctaaggcgaaaagccatgcccctgaagtgattacttcatcacccctgaag

SEQ ID NO: 9245 - DNA, 1464 bp, synthetic construct
  misc_feature 1..1464: note = source = /note="Description of Artificial Sequence: Synthetic coding sequence"
  source 1..1464: mol_type = other DNA
atgggaagaccactacatcttgttcttttatcagcatctttagctggacttttgttattaggagaaagtttatttattagaagagaacaagctaataatattttagcacgagttacaagagcaaatagttttttagaagaaatgaaaaaaggacatttagaaagagaatgtatggaagaaacttgtagttatgaagaagcacgtgaagttttcgaagactcagataaaaccaatgagttttggaataagtataaagatggtgatcaatgtgaaacttcaccttgtcaaaatcaaggtaaatgtaaagatggattaggagaatacacctgtacatgtttagaaggattcgaaggtaagaattgtgaattgtttactagaaaattgtgttcacttgataacggagattgtgaccaattctgtcatgaagaacaaaattctgttgtatgttcatgtgcaagaggttatacattagccgacaatggaaaggcatgtattccaactggtccatatccatgtggaaaacaaactttagaaagacgaaaaagatcagttgctcaagcaacctcttcttctggagaagctccagattctattacctggaaaccatatgatgctgcagatcttgatccaactgaaaatccattcgatttattagattttaaccaaactcaaccagaacgaggagataataaccttacaagaatagtaggtggacaagagtgcaaggatggtgaatgtccatggcaagctcttttaattaatgaagaaaatgaaggattttgtggtggaactattttatctgaattttatattttaacagcagctcattgtttatatcaagctaaacgatttaaagttagagtaggtgatagaaatacagaacaagaagaaggtggagaagctgtacatgaagttgaagtagttattaagcataatagatttactaaagaaacatacgattttgatatagcagttttacgtttaaaaacacctataacatttcgtatgaatgttgcacctgcatgtcttccagaaagagattgggctgaatcaacacttatgacacaaaaaactggaatagtttcaggatttggtcgaactcatgaaaaaggaagacaatcaactagattaaaaatgttagaggttccatatgtcgatagaaattcatgcaaactttcatcttctttcattattacacaaaatatgttttgtgcaggatatgatacaaaacaagaagatgcatgtcaaggggattcaggtggaccacatgttacaaggtttaaggacacatattttgttaccggaatagtttcatggggagaaggatgcgcaagaaaaggaaaatatggaatttatacaaaagtaacagcatttcttaaatggattgatagatcaatgaaaacacgtggattaccaaaagctaaaagtcatgctcctgaagtaattacatcatcaccattaaaa

SEQ ID NO: 9246 - DNA, 1464 bp, synthetic construct
  misc_feature 1..1464: note = source = /note="Description of Artificial Sequence: Synthetic coding sequence"
  source 1..1464: mol_type = other DNA
atgggtagacctctgcatttggtgttgttgagcgcatcgctggccgggcttctgcttctgggagaatcattgtttatcagacgagaacaagcaaataacatcctggcacgagtgacgagagcaaactcctttctcgaggagatgaagaaaggccacttggaaagagagtgtatggaggaaacttgctcttacgaagaggcgagggaagtgtttgaggactctgacaaaacgaacgaattctggaacaagtacaaggacggtgatcagtgcgaaacttccccttgccaaaaccaggggaagtgtaaggatggactcggcgaatacacctgtacctgtctggaaggtttcgagggtaaaaactgtgaactgtttaccagaaaactttgtagccttgataatggtgattgtgaccaattctgtcacgaagaacaaaattcagtggtctgtagctgcgcaagaggatataccctggcggataatggaaaagcctgtattccaaccggcccatacccctgcggtaagcagaccctggagcgaagaaagagatcggtggcgcaagccacctcgagctccggtgaggcacctgattccataacttggaagccttacgacgcagccgatcttgacccaaccgaaaacccatttgatcttcttgactttaaccagactcaacctgaacggggggacaacaatcttaccagaatcgtcggaggccaggaatgcaaagatggagaatgtccttggcaggctctgttgattaacgaggaaaacgaaggtttttgtggagggaccattctgtccgaattctacatacttactgccgcacattgcctttaccaggcaaagagatttaaggtccgggttggggatcgcaatactgaacaagaggagggaggagaggcagtccatgaggtggaagttgtgatcaaacataaccggttcaccaaggaaacctacgattttgacattgctgtccttaggctcaagactccaatcacctttcgcatgaatgtggcgccggcctgccttccggaacgcgattgggccgagtccacgctgatgactcaaaagactggaatcgtgagcgggttcggtcggacccatgagaaagggagacaatcgaccaggctgaagatgttggaagtcccttatgtggatcgaaactcatgcaagctctcatcatcctttatcatcactcagaatatgttttgtgcaggctacgacactaagcaggaagatgcatgtcaaggggatagcgggggcccacatgtgactcgttttaaggatacttacttcgtcacgggtattgtgtcgtggggggagggatgtgcgcgtaagggtaaatacggcatatacaccaaggtgaccgcattcctgaagtggatagatcgatcgatgaaaacgagaggccttcctaaggcaaaatcccacgccccggaagtgattacctcgtcgccactcaaa

SEQ ID NO: 9247 - DNA, 1464 bp, synthetic construct
  misc_feature 1..1464: note = source = /note="Description of Artificial Sequence: Synthetic coding sequence"
  source 1..1464: mol_type = other DNA
atgggccgaccacttcatctggtgcttctgtcggcgagcctggcagggcttcttctccttggagaatccctgtttatcagacgggaacaagccaacaatattctggctagagtgaccagggccaactccttcctggaggaaatgaaaaaaggacatctggaaagggagtgcatggaggaaacctgttcatacgaggaggcaagggaagtttttgaggactcggacaaaaccaacgagttttggaacaagtataaggatggcgaccaatgtgaaacctcgccatgtcaaaatcagggaaagtgtaaagacggactgggagagtacacttgtacctgtttggagggattcgaagggaaaaactgtgaactttttaccaggaagctgtgcagcctggataatggtgattgtgatcaattttgccatgaagaacaaaatagcgtggtgtgctcatgtgcgcgcggttacacccttgctgacaatggcaaggcatgtattcctactggtccctacccttgcggaaagcaaaccctggaacgtcggaagcgatccgtggcgcaggcgacctcgtcgtcgggcgaggctccagacagcatcacttggaaaccttacgatgcagcagacctcgaccctaccgaaaacccttttgatcttcttgactttaaccaaacccaacccgagcgtggagataacaatctgactcggattgtcggtggccaggaatgcaaggatggagaatgcccttggcaggcgcttctgattaacgaggaaaacgaagggttctgtggagggaccatactgtcggaattctacatcttgaccgctgcccactgtctttaccaggcaaagcgtttcaaagtccgggtgggagatcgaaacaccgaacaagaagagggtggagaagcagttcatgaagtcgaggtggtgataaagcataaccggttcaccaaggagacttatgattttgatatcgccgtccttcgcctgaaaacgccaattacgtttagaatgaacgtcgcaccagcttgtttgcctgagcgcgactgggccgaatcgactcttatgacccaaaaaaccggcatagtctcgggattcggacgtacccacgagaaggggcgtcagtcgacccgcctcaagatgctggaagtgccttacgtcgataggaacagctgcaaactgtcctcatcgttcataatcactcagaatatgttctgcgcaggctacgacaccaagcaagaagatgcatgtcagggagattccggcggcccacatgtgaccagatttaaggatacctactttgtgactggaattgtgtcgtggggagaaggttgtgcgagaaaggggaagtacgggatttacaccaaggttactgcatttctgaagtggatcgatagatccatgaaaacgcgaggactgcctaaggctaagtcacacgcgccagaagtcatcacttcctccccgctgaaa

SEQ ID NO: 9248 - DNA, 1464 bp, synthetic construct
  misc_feature 1..1464: note = source = /note="Description of Artificial Sequence: Synthetic coding sequence"
  source 1..1464: mol_type = other DNA
atgggacgcccacttcatctcgtgctcctgagcgcctccctcgcgggactgctgctgctgggtgagtccctcttcatcaggcgcgagcaggccaacaatatcctggcgcgagtcactagagcaaattcatttctggaggaaatgaaaaagggacacttggagcgtgagtgtatggaagagacgtgcagctacgaggaagcgagagaagtgttcgaggactccgataaaactaacgaattctggaacaagtacaaggacggggaccagtgtgagacttcgccatgccagaaccagggaaagtgcaaggacggtctgggcgaatacacctgcacttgcttggaggggttcgaagggaagaactgtgaactgttcacccggaagctgtgctcgcttgacaatggggattgcgaccagttctgccacgaagaacagaattcagtcgtgtgcagctgtgcgagaggttacaccctggcagacaacggtaaagcctgcatcccgacgggcccatatccgtgcggcaagcaaaccctggagcgccgtaaacgaagcgtcgcgcaagcaacctcgtccagcggagaggccccagattcaatcacctggaagccgtacgacgcagccgatctcgacccaaccgagaacccattcgatctccttgatttcaatcaaacccagcccgaaagaggagataacaacctgaccaggatcgtgggagggcaggaatgcaaggacggcgagtgtccttggcaagccctgctcatcaatgaagagaacgagggattctgtggcggaaccatcctcagcgagttctacatcctcaccgccgctcattgtctgtatcaggccaaacggttcaaagttcgcgtgggcgaccgcaacactgagcaagaagaaggaggcgaggctgtgcacgaagtggaggtggtgattaaacacaacaggtttaccaaggaaacctacgactttgatatcgcagtgctgagactcaagaccccaatcacctttcgcatgaatgtcgccccagcttgcctgccggagcgggattgggccgaaagcacgctgatgacccaaaaaaccggaatcgtgagcggctttggccggactcacgaaaaaggcaggcagtctactaggctgaagatgctggaggtgccgtacgtcgaccggaattcttgtaagctctcaagctcgttcatcattacccagaatatgttttgcgctgggtacgatacgaagcaagaggacgcctgccaaggagactccggcgggccgcatgtgactaggttcaaggatacttacttcgtcaccggaattgtctcctggggggaaggatgcgccaggaaggggaaatacggcatttacaccaaggtgactgcgttcctgaagtggattgacaggtcgatgaaaacccggggactgccgaaggcgaagagccatgccccggaggtgatcacgagctcaccactgaag

SEQ ID NO: 9249 - DNA, 1464 bp, synthetic construct
  misc_feature 1..1464: note = source = /note="Description of Artificial Sequence: Synthetic coding sequence"
  source 1..1464: mol_type = other DNA
atggggcgcccgctccacctcgtgctcctctcggcatctctggcgggacttctacttttgggcgaatccctttttatacgaagggagcaggcgaataatatcctagctagagtgacaagagccaattcttttttagaagagatgaagaaagggcatctggagcgcgagtgcatggaggaaacctgctcatacgaggaggcccgcgaagtctttgaagactctgacaagaccaatgagttttggaataaatataaggatggagaccagtgcgagacgtccccctgccagaatcagggtaagtgtaaagacggcctgggcgaatacacttgtacctgtctggaggggttcgagggtaagaattgtgagctgtttacgcgtaagctgtgtagtctggacaacggagactgcgatcagttttgccacgaagagcagaactctgtggtctgctcttgcgcgagaggctacaccttggcagacaatgggaaagcctgcattcccactggtccatacccctgcggcaaacagaccctggagcgccgcaagagatccgtcgcccaggctaccagcagcagcggtgaggcccccgactctataacttggaagccctacgatgccgccgatcttgatcccacggagaatcctttcgatcttctcgacttcaaccagacacagccagagcgaggggataataacctcactagaattgtaggcggacaagaatgtaaagatggagaatgtccgtggcaggccctcttaattaatgaggaaaatgaaggattttgtggtggcaccattctgtccgaattttatatcctgacagctgcccattgtttgtatcaggctaagcgatttaaggtgcgggttggagatagaaacacagaacaggaagaaggaggcgaggcagtccatgaggtggaggtggtgattaagcataatcggttcaccaaggagacctacgatttcgacattgctgtgcttagattaaaaacacccataacgttcagaatgaacgtggcccccgcatgcctcccggagagggactgggcagaatccacactgatgacgcagaagacaggaatagtttcaggcttcggccgtacccacgagaagggcaggcagagtaccaggttaaagatgctggaggtaccctatgtggatcgtaattcgtgcaagctgtcttcttcatttatcatcactcagaacatgttttgcgccggctacgacaccaagcaggaggacgcttgtcaaggggattcgggggggccccatgtcactcgattcaaagacacatattttgtcacaggaatcgtgtcttggggcgaagggtgtgctcgtaaaggaaagtacggcatttatacaaaggttactgcattcctgaagtggattgaccgttccatgaagacacgtggtcttccaaaggccaagtcacatgctcctgaggtgattacttcaagccccctgaag

SEQ ID NO: 9250 - DNA, 1464 bp, synthetic construct
  misc_feature 1..1464: note = source = /note="Description of Artificial Sequence: Synthetic coding sequence"
  source 1..1464: mol_type = other DNA
atgggccgcccactgcatctggtgctactttccgccagtttagctggtctgctgctcttaggagagtctctcttcataaggagggaacaggctaataacattctggcgagggtgacgcgggctaacagctttctggaggaaatgaagaagggacatctggaaagagagtgcatggaggaaacctgttcttacgaggaggcacgcgaggtgttcgaggacagcgataaaactaatgagttctggaataagtataaagacggcgatcaatgcgagacaagtccgtgtcaaaaccagggcaagtgcaaagacgggctgggtgagtacacttgcacttgtctcgaagggttcgagggcaagaactgcgagttgtttacccggaagctttgtagcctggacaatggcgactgcgaccagttctgccatgaggagcaaaatagcgtagtgtgcagctgcgcccgcggctacaccctagctgacaacggcaaggcgtgtatccccacagggccctatccgtgcggcaaacagactttagagagacgcaagcggtcagttgcccaggctacttcttcatccggagaggctcctgacagtattacttggaaaccttacgacgccgccgacttggatcccactgaaaacccgttcgatttgctagatttcaatcagacacagccagagcgcggcgataacaacctgacccgaattgtcggcggtcaggagtgcaaagatggcgaatgcccatggcaagcccttctgatcaatgaggaaaacgaaggcttctgcggaggaaccattctgagtgagttctatattctgaccgctgctcattgtctgtaccaggctaaacgcttcaaagtgcgggtgggagatcggaacacagaacaggaggaaggtggcgaagcagtgcacgaggtggaagtcgtgattaaacacaaccggtttactaaggagacctatgacttcgatattgccgtactgagacttaagacaccaatcactttccgaatgaacgtggcacccgcctgtctacctgagcgggactgggccgagtcaaccttaatgacccagaaaacaggcatcgtgtccggattcgggagaacgcatgagaagggccgccagtctacccggctaaagatgctggaagtaccctacgttgatcggaattcctgcaagctctcctcatcattcatcatcacccagaatatgttctgcgctggttatgataccaagcaagaggatgcttgccagggtgattcaggaggacctcacgtgacacgcttcaaagacacctacttcgtcacaggcatcgtgagttggggagagggatgtgccagaaaaggaaaatatggtatttacactaaggtgaccgcttttcttaaatggatagataggagcatgaagacacggggtctccctaaggccaaaagccatgcccccgaggttattacttccagccctctcaaa

SEQ ID NO: 9251 - DNA, 1464 bp, synthetic construct
  misc_feature 1..1464: note = source = /note="Description of Artificial Sequence: Synthetic coding sequence"
  source 1..1464: mol_type = other DNA
atgggacgcccgctccatctggtcctgctgagcgcgtcactcgcaggcctcctgcttctcggcgagtcgcttttcatccggcgagagcaggcgaacaatatcctcgcccgggtcactcgggccaatagcttcctcgaagagatgaagaaaggacatctggaaagagagtgcatggaggagacttgtagctacgaagaagcgcgagaagtgtttgaggattcggacaagactaacgagttctggaacaaatacaaggacggagatcagtgtgaaacctccccttgtcagaaccaaggaaaatgcaaagacggactgggggagtacacttgcacctgcctcgagggattcgaaggcaagaattgtgagctgtttaccaggaagctgtgctcattggacaacggagactgcgaccagttctgccacgaagagcagaattcggtggtctgcagctgtgcgcggggctacaccctggcagacaacggcaaagcctgtattcctactggcccttacccgtgcggcaagcaaactctcgaacgccgcaagcgctcagtggctcaagccacttcgtcatctggggaagcgccagactcaatcacttggaagccttacgatgccgctgacctcgacccgaccgaaaacccgttcgacttgcttgactttaaccagacgcaaccggagcggggagacaacaatctcactcggattgtgggaggtcaggaatgcaaggatggggaatgcccatggcaagccctgctgatcaacgaagagaatgagggattctgtggcggtactatcctgtccgaattctacatcctcaccgctgcccattgtctgtaccaggcgaaaagattcaaggtgcgagtcggagatcggaatacggaacaggaagaaggtggcgaagcagtccatgaagtggaggtcgtcatcaagcataacagatttactaaggagacttacgacttcgacatcgcagtgctgagactcaagactcccatcactttccgcatgaatgtggcaccagcctgcttgccggagcgggactgggctgaaagcaccctgatgactcagaaaaccggaatcgtgagtgggttcggaaggactcatgagaaggggagacaatcgactagactgaagatgctggaagtcccctatgtggaccgcaactcatgtaagctgtcgtcgtcgttcatcatcactcaaaacatgttctgtgctgggtacgataccaaacaggaggacgcgtgccagggggactcaggaggaccgcacgtcactcgcttcaaggacacttacttcgtgactgggatcgtgagctggggtgagggatgcgcgcggaagggaaaatacggaatctacaccaaagtgaccgctttcttgaagtggatcgaccgctcgatgaaaactcggggcctcccgaaagcgaagtcacacgcaccggaagtgattacctcgtccccactgaag

SEQ ID NO: 9252 - DNA, 1464 bp, synthetic construct
  misc_feature 1..1464: note = source = /note="Description of Artificial Sequence: Synthetic coding sequence"
  source 1..1464: mol_type = other DNA
atgggccggcctctgcatcttgttctgttgagcgctagtctggcgggcctgctgctgctgggtgaaagtctgtttattaggcgagagcaggccaataatatactcgccagagtcaccagagctaattccttcctggaggaaatgaagaaaggacatctggagcgagagtgcatggaagagacttgttcctacgaggaagccagagaggtctttgaggatagcgacaaaacaaacgagttttggaacaaatacaaagacggagatcagtgcgagacctccccttgccaaaaccaaggtaagtgcaaggatggactgggggagtacacatgcacctgtttggaaggatttgaaggaaaaaactgtgaactctttacaaggaaactgtgcagtctggacaacggcgactgtgaccagttttgccacgaagagcagaactccgtggtttgtagctgcgccagaggctatacacttgcagacaacggcaaggcctgtatacccactggcccctatccatgtggcaaacaaactctcgagcgacggaaaaggagtgtcgctcaggctacaagctctagcggagaagccccagattcaattacctggaagccatacgacgctgctgacttggaccccacagaaaatccgttcgacctcttggatttcaatcagacccagccagagcggggtgacaataatcttactcgaatcgtgggtgggcaggaatgcaaggatggggaatgtccatggcaggctctgctcatcaacgaggagaacgagggcttttgtgggggtaccatcttgagcgaattttacattcttacagcagcacattgcctttaccaggctaagcgcttcaaagtgcgcgtgggagatcggaataccgaacaagaagaaggcggagaggccgtgcacgaggtcgaagtggttatcaagcataatagatttacaaaggagacctacgactttgacatcgccgtgcttaggctgaagacaccaatcacattccggatgaacgttgcgcctgcctgccttcccgaacgagactgggccgagtccacattgatgacgcagaagaccggaatcgtaagtggatttggccggactcatgaaaaaggcagacaaagtactcggctgaagatgctcgaggtcccatacgttgatcgcaattcttgcaagctgtcttcatcctttatcataacacagaacatgttctgtgctggctatgacaccaagcaggaggacgcttgccagggcgactccggcggcccccatgtcacaaggtttaaagatacatatttcgtgacgggaattgtcagctggggcgaaggctgtgcacggaaaggaaagtacggcatctacaccaaggttacggcctttctgaaatggattgacaggagtatgaagactagaggactcccaaaagctaagtctcatgcccccgaggtcataacgagttcccccctcaaa

SEQ ID NO: 9253 - DNA, 1464 bp, synthetic construct
  misc_feature 1..1464: note = source = /note="Description of Artificial Sequence: Synthetic coding sequence"
  source 1..1464: mol_type = other DNA
atgggtaggccactgcaccttgtcctcttgagcgcctccttggcaggtctgctccttctcggagaatccctgtttattcgccgcgagcaggccaacaacattcttgcacgtgtgaccagagccaattcgttccttgaggaaatgaaaaagggccacctggaacgtgaatgcatggaagaaacttgctcgtacgaagaagcacgtgaagtgtttgaagattcagataaaaccaacgagttttggaataagtacaaggatggggatcaatgtgaaacttcaccctgccagaatcaaggtaaatgtaaggatggtttgggagagtacacttgtacctgtctcgaaggctttgaaggaaagaactgtgagctgttcactcgcaagctgtgctcgttggacaacggcgattgtgatcagttctgccatgaggagcaaaactcggtggtgtgttcctgtgcacgcggatacaccttggcagacaatggaaaggcctgtattccaactgggccttatccctgcggtaagcaaactctcgagagacgcaagaggtcggtggcgcaggcaacttcgtcctcaggcgaagccccagatagcataacctggaagccctacgacgcagcagacctggatcccaccgaaaacccctttgacctcctggacttcaaccaaacgcagcctgagcggggagacaataatcttaccaggatagtcgggggacaagagtgtaaggacggggagtgtccttggcaagcccttttgataaacgaagagaacgaaggattttgtggaggcacgattctcagcgagttttacatccttactgcggcacactgcctttaccaagccaagcgcttcaaggttcgcgtgggcgaccggaacactgaacaagaggagggtggagaggcagtgcacgaagtggaagtcgtcattaagcacaacaggttcaccaaggaaacctatgattttgacattgcagtgctgagattgaaaacccctatcaccttccgtatgaacgttgcacccgcgtgcctgccagagcgcgattgggcagagtcaacccttatgacccagaaaactggtattgtgtcaggatttggaagaactcacgaaaagggacgacagagcacccggctgaaaatgctggaagtcccgtacgttgataggaatagctgcaaactttcttcatcatttatcatcactcagaatatgttttgtgccggctacgacacgaaacaggaggatgcatgtcaaggcgattcaggaggccctcatgtgacccgcttcaaagacacgtactttgtgactgggattgtgtcatggggtgaaggttgcgccagaaaagggaaatacgggatctacactaaggtgaccgccttcctgaagtggattgataggagcatgaaaacccgaggtctgcctaaagcaaagtcacatgccccggaggtcatcaccagctctcctctgaaa

SEQ ID NO: 9254 - DNA, 1464 bp, synthetic construct
  misc_feature 1..1464: note = source = /note="Description of Artificial Sequence: Synthetic coding sequence"
  source 1..1464: mol_type = other DNA
atgggaagacctcttcacctcgtgctcctgtcagcttcgctggctggtctcctgcttctgggtgaatctctgttcatccgcagggagcaggcaaataacatcctcgcaagagtgacgcgtgccaattcgtttttggaagaaatgaaaaagggccatcttgagagagaatgcatggaagagacctgcagttacgaggaggcacgagaggtgttcgaggacagcgataaaacaaacgagttctggaacaaatacaaggatggagatcagtgtgagaccagtccctgccagaatcaggggaagtgcaaggacgggctcggcgagtatacatgtacctgcctcgaggggttcgaggggaagaactgtgaactttttaccagaaagctgtgctcgctggacaacggcgactgtgatcaattctgccacgaagaacagaattccgttgtctgcagttgtgcacgaggctacaccctggcagacaacgggaaagcgtgcatccccacgggaccttacccgtgcggaaaacagactctggagcgcaggaaacggagcgtggcgcaggcaacttcttcttctggagaggccccagatagtatcacttggaagccatacgatgccgcagatctcgaccccaccgaaaatcctttcgacctgcttgatttcaaccagacacaacccgaacggggcgataacaacctgactcgcatcgtcggaggacaggaatgtaaggatggcgaatgtccctggcaagcactcttgatcaacgaggaaaatgagggattttgtgggggaacaatcctctccgaattctatatactcactgcagcccattgtctctaccaggcaaagaggttcaaagtccgcgtcggcgatagaaacacagagcaggaagaagggggagaggcggtgcatgaagtggaggttgtgattaagcataataggtttactaaagaaacatacgacttcgatatcgccgtccttcgcctcaaaacacccatcacgttcaggatgaatgtcgcccctgcatgtttgcctgagagagattgggcagagtctacattaatgactcagaagaccggtatcgtatctggtttcggcaggacacacgaaaaaggaaggcaatcgacccgtcttaagatgcttgaggttccatacgtagatcgcaatagctgtaaactgtcttcctcgtttatcatcacacagaatatgttttgtgcaggatacgatactaaacaggaggatgcttgtcagggcgatagcggggggcctcatgtgacaaggttcaaagatacatatttcgttaccggcatcgtgagctggggtgaggggtgtgcgcgcaaagggaagtatggcatttacacaaaggtgacggcctttttaaaatggatagatcggtccatgaagacgagagggctaccaaaggccaagtctcacgctccagaagtaatcacttccagtccactgaag

SEQ ID NO: 9255 - DNA, 1464 bp, synthetic construct
  misc_feature 1..1464: note = source = /note="Description of Artificial Sequence: Synthetic coding sequence"
  source 1..1464: mol_type = other DNA
atgggacgcccgctgcacctggtgctcttgtcggcatcacttgcgggacttctcctgctcggtgagtccctgttcatccgtagggaacaggccaacaatatcctggccagagttactcgagcaaattccttcctggaagagatgaagaagggacaccttgagcgcgagtgcatggaagaaacttgcagctatgaggaagcccgcgaagtgtttgaagattccgacaagaccaacgaattttggaacaagtacaaggacggagatcagtgcgaaacttccccgtgccaaaatcagggaaaatgtaaagacggtctgggcgaatacacctgcacttgcctcgagggattcgaaggcaaaaactgcgagctgtttacgagaaagttgtgcagcctcgacaatggggactgcgatcagttttgtcacgaggagcagaactcggttgtctgctcctgtgcccgcggatacacccttgcggacaacggaaaggcctgcattccaaccgggccgtacccctgtgggaagcaaactctggagcggaggaagcggtccgtggcgcaagctactagctcgtccggggaagccccagactcaatcacgtggaagccttacgatgcggcggatctggaccctactgaaaatccattcgacctgctcgacttcaaccagacccaaccggaacgcggagataacaacctgacccggattgtgggaggccaggaatgtaaggatggggagtgtccgtggcaggcactgctcatcaacgaagagaacgaaggcttctgcggagggacgatcctctcggaattctacatcctgaccgccgcccactgcctgtatcaggctaagcgctttaaagtgcgggtgggcgacagaaacaccgagcaagaagaaggaggtgaggcagtccatgaggtggaggtcgtgatcaagcataatcgcttcaccaaggaaacctacgacttcgacatcgcagtgttgagactcaagaccccgattaccttcagaatgaatgtggccccagcttgcttgcctgaacgggactgggcggaatccactctgatgactcaaaagaccggaatcgtctctggcttcggacgcacccatgagaagggaaggcaaagcactcgcctgaagatgctggaagtcccgtacgtggaccggaactcgtgcaagctgtcgtcatcattcatcatcacgcagaatatgttctgcgccggttacgacaccaaacaggaggatgcgtgccagggtgatagcggcggaccacacgtgactagatttaaagatacttacttcgtgactggaattgtctcgtggggcgagggctgtgcacgcaaaggaaagtacggaatctacaccaaagtgactgctttcctcaagtggatcgatcggtcgatgaaaactcgggggctccccaaggctaagtcacatgcccctgaggtcatcaccagcagcccgctgaaa

SEQ ID NO: 9256 - DNA, 1464 bp, synthetic construct
  misc_feature 1..1464: note = source = /note="Description of Artificial Sequence: Synthetic coding sequence"
  source 1..1464: mol_type = other DNA
atgggacgcccacttcatctcgtgctgttgtccgcgtctctcgcgggacttctcctgctgggagagtccctgttcatcaggagagaacaggccaacaatatcctggctcgagtgacccgcgcaaactcattcctcgaggagatgaagaagggacatctggaacgcgaatgtatggaggaaacctgctcctacgaggaagcccgcgaggtgttcgaggactccgacaaaaccaacgaattctggaacaaatacaaggacggcgatcagtgtgaaacttccccatgccagaaccaaggtaaatgtaaggatggtctgggagaatacacgtgtacgtgcttggagggctttgagggcaaaaactgcgagctgttcactagaaaactttgctcgctggacaacggtgattgcgatcaattttgccacgaagagcagaatagcgtcgtgtgtagctgcgcacgggggtacactctggcggacaatgggaaggcatgcatcccgactggaccctacccgtgcggaaagcagactcttgagcgcaggaaaagatcagtggctcaggctacctcatcgtccggagaggcgccagactcgatcacgtggaagccttacgatgcggcggacttggatccaactgagaatccgttcgacctgctcgacttcaatcagactcaaccggagcgtggggacaataacctgacccgaattgtggggggacaagaatgtaaggacggcgaatgcccttggcaggccctgctgatcaacgaggaaaatgagggattctgcggtggaaccattctttccgagttctacatcctgaccgcagcgcactgcctttaccaagccaagagattcaaagtcagagttggggatcgcaacactgagcaggaagaaggcggggaagcggtccatgaagtggaggtcgtgattaagcacaataggttcaccaaggaaacctatgatttcgacatcgccgttctgcggctcaaaaccccgatcacctttcggatgaatgtggcaccggcctgcctgccggagagagactgggcggagtcgacgcttatgacccaaaagactggcatcgtgagcggatttggaagaactcatgaaaagggtcggcagtctactcgactgaagatgctggaagtgccctacgtggatcggaacagctgcaagctctctagctccttcatcatcacccaaaacatgttctgcgccggatatgacacgaagcaggaagatgcttgccaaggagattcaggaggcccacacgtcacgcgctttaaggatacttacttcgtcactggaatcgtctcatggggcgaagggtgtgctcgcaaaggcaaatacggtatctacactaaggtcaccgcctttttgaagtggatcgaccggtccatgaaaacgaggggcctccccaaagctaagtcacacgccccagaggtcataacttcgtctccgcttaag

SEQ ID NO: 9257 - DNA, 1464 bp, synthetic construct
  misc_feature 1..1464: note = source = /note="Description of Artificial Sequence: Synthetic coding sequence"
  source 1..1464: mol_type = other DNA
atgggccgtccactgcacctcgtgctgctgtcagcatcattggccggcctgcttcttctcggcgagagcctgttcatccgcagggagcaggctaacaatattctcgcgagggtgacaagagccaacagctttctggaagaaatgaaaaagggccatcttgagagggaatgcatggaggagacctgttcctatgaggaagccagggaagtgtttgaagactcagataagactaatgagttttggaataagtacaaggacggggatcagtgcgagacttccccttgccagaatcagggaaagtgtaaggacgggttgggggagtatacttgcacgtgcttagagggatttgagggcaaaaactgcgagctgttcacccgtaaactctgttcgctcgataatggcgattgcgaccagttctgtcatgaggagcagaatagtgtagtgtgctcttgcgcgagggggtatactctcgcagataatggcaaggcctgtatcccgaccggcccatacccatgtggcaagcagactctggagcggcgtaagcgctcagtcgcccaggccacatctagtagcggggaggctcccgactctattacctggaagccttacgatgctgcagatctcgatccaaccgagaacccattcgacttgctcgatttcaaccagactcagcccgagcggggggacaacaatttaacacgtatcgtgggcggccaggaatgtaaggacggcgagtgcccctggcaggcgcttctgataaatgaagagaatgagggcttctgtggcgggacgattctgtcggaattttatatccttaccgcagcccattgcctctatcaagccaagcggttcaaggttagggtcggcgatagaaatacagagcaagaggagggcggcgaggctgtccacgaggtagaggttgtgattaaacacaatcgttttaccaaggaaacctatgacttcgacatcgcagtgctgcgtctcaagacccccatcacatttcgcatgaacgtcgcccccgcctgcctaccggaacgagactgggccgagagtacgctgatgacacagaagactgggattgtgtccggttttgggcgcacacatgaaaaaggacggcaaagcactagactaaagatgcttgaggtaccttacgtggatagaaactcttgtaagctcagtagtagttttataattacccaaaacatgttttgtgccggatatgacactaagcaagaagatgcctgtcagggagacagtggcggcccccacgtgacacgcttcaaagacacgtatttcgttaccgggattgtgtcctggggggaaggatgcgctagaaaggggaaatacggtatttatacgaaagtcactgcatttcttaagtggattgacaggtctatgaaaacaaggggactgccgaaagcgaaatcacacgccccagaggtgataacgtcaagcccccttaag

SEQ ID NO: 9258 - DNA, 1464 bp, synthetic construct
  misc_feature 1..1464: note = source = /note="Description of Artificial Sequence: Synthetic coding sequence"
  source 1..1464: mol_type = other DNA
atgggtcggcccctgcaccttgtgcttctaagcgcttccctcgccggtctcttactactgggagaatctttgttcatcagacgtgaacaggccaataatatcctagcacgagtgacacgcgcaaatagcttcctggaggaaatgaaaaagggtcacctggagagagagtgcatggaagagacctgtagctatgaggaagctagagaagtgttcgaggactccgacaagacgaatgagttttggaataaatataaagacggtgaccagtgtgagacgagcccatgccagaaccagggcaaatgcaaagatggattgggagagtacacatgcacttgcctggagggatttgagggtaagaattgtgagctgtttacaaggaaactgtgttcattggacaacggcgactgcgatcagttttgtcacgaggagcagaacagtgtggtgtgctcttgtgcccggggatacactctagctgacaacggcaaagcgtgtatcccgacagggccatacccatgcggtaaacagacattggaacggagaaagaggtccgtcgcccaggcaacgtcctcctccggagaggcaccagacagtattacctggaagccctacgatgctgccgatctggatcccaccgaaaaccccttcgatctgctagacttcaaccagacacagcccgaaaggggagataataacctgactcgtattgtgggcggccaggagtgtaaagatggtgaatgcccgtggcaggcgttattgattaatgaagagaacgagggtttttgtggcggcactatcctatccgaattctacatcctaaccgccgcccattgcttgtaccaggccaagcgctttaaggttagagtcggagacaggaatacagaacaggaggaaggcggcgaggcagtgcacgaagtagaggttgtgatcaaacataatcggtttaccaaggagacctatgacttcgacatcgcagtccttcggctgaagacacctatcacttttagaatgaatgtggcccctgcttgcctcccagaaagggactgggcagaatcaaccctgatgacccaaaaaaccggtatcgtatccgggttcggccggactcacgagaagggacgacagtctactagacttaaaatgctcgaggtcccctacgtggacaggaattcttgtaagttgtccagcagctttatcatcacacaaaacatgttttgtgccggctacgataccaaacaggaggacgcatgccagggcgacagtggcggtccgcacgtaactcgcttcaaagatacgtacttcgtcaccggtattgtgtcgtggggtgaaggctgcgctcgtaaaggcaaatatgggatctacacaaaggtaaccgcattcctgaagtggatcgatcgaagcatgaagaccagaggcctgcctaaggcaaagtcacatgcacccgaagtgattacttcatctcccttgaaa

SEQ ID NO: 9259 - DNA, 1464 bp, synthetic construct
  misc_feature 1..1464: note = source = /note="Description of Artificial Sequence: Synthetic coding sequence"
  source 1..1464: mol_type = other DNA
atgggacgcccactgcacttggtcctgctgagcgcttcgctggctggcttgctgctgctcggcgagagcttgttcatccggcgcgaacaagccaacaatatcttggcccgggtgacccgggctaattcctttctcgaggaaatgaaaaagggccatcttgagcgggagtgtatggaagaaacctgttcctacgaggaggcccgagaagtgtttgaggattcggataagaccaatgaattctggaataagtataaggacggcgatcagtgcgaaacctccccttgccagaatcagggcaagtgcaaggacggactcggagagtacacctgcacttgcctggaggggttcgagggaaagaactgtgaactgttcactcggaagctgtgctcactcgacaacggcgattgcgaccagttctgccatgaggaacagaacagcgtggtctgctcgtgtgcgcggggctacactctcgcagacaatggaaaggcctgcatcccgaccggtccgtacccatgcggaaagcaaactctggaacgccgcaagcggtcagtggcccaggcaacctccagctcaggagaagctccggacagcatcacctggaagccgtacgatgcggccgatctcgaccctactgagaatcctttcgacctcctggacttcaaccagacccaaccggaacgcggtgacaacaacctgacccgcatagtcggaggtcaggaatgcaaagacggagagtgtccgtggcaagctcttctgattaacgaagaaaatgaaggattctgcgggggtactattctgtctgagttctacatcctgaccgccgcacactgcctgtatcaggcgaagaggttcaaggtgcgcgtgggtgatcggaatactgaacaggaggagggcggagaggccgtccacgaggtggaggtggttatcaagcataaccggttcactaaggagacttacgacttcgatatcgcggtcttgcgtcttaagacccccatcaccttccggatgaacgtggcaccggcgtgtctgccggagcgcgactgggcagagagcactctcatgactcaaaagaccggcatcgtgtcgggattcggacggacccacgagaagggaaggcagtccactcgcctgaagatgctggaggtgccatacgtcgaccgcaattcctgcaaactctcgtcctcctttatcattacccagaatatgttttgcgccggatacgacactaagcaggaggacgcctgccagggggatagcggaggaccacatgtgactcgattcaaggacacttactttgtcactggcatcgtgtcctggggagagggctgcgcacgcaagggcaagtacggcatctacaccaaggtgaccgccttcctcaagtggatcgataggtccatgaaaactagaggactccctaaagcaaagtcccacgccccagaagtcattacgtccagcccactgaag

SEQ ID NO: 9260 - DNA, 1464 bp, synthetic construct
  misc_feature 1..1464: note = source = /note="Description of Artificial Sequence: Synthetic coding sequence"
  source 1..1464: mol_type = other DNA
atgggtcgtccccttcatcttgtgctgctttcagcctcccttgcaggactgctgctgctcggagagtctctgtttatccggagggagcaagcaaacaatattctggcccgtgtcactagagcaaactcattcctcgaagagatgaaaaaaggccacctggaaagggaatgtatggaggaaacgtgttcatacgaagaagcacgggaagtctttgaggattccgacaagacgaacgagttttggaataagtacaaggatggagatcagtgcgaaaccagcccctgccaaaatcaaggcaagtgtaaggatggactgggcgaatacacttgtacgtgtctggagggcttcgaaggaaagaactgtgagttgtttactagaaagttgtgcagccttgacaacggggactgcgaccaattctgtcatgaagaacaaaactcggttgtctgcagctgtgcacgaggatacaccctggcagataacggaaaggcttgtattcctactggtccctacccttgtggtaaacagacccttgagcgacgcaagcggtcggttgcacaggcgacctcctcgtcgggagaagctcctgattccatcacttggaagccctacgacgcagccgatcttgacccaactgaaaaccctttcgatcttcttgatttcaaccaaactcaaccagaacgtggcgacaacaaccttacccggatcgtcggagggcaagaatgtaaagatggagaatgtccatggcaagcgcttctcattaatgaagaaaacgaaggcttctgcggtggaactattctttccgaattctacattcttaccgcagctcactgtctgtaccaagccaaaagattcaaggtgcgagtgggagacaggaataccgaacaggaagaaggcggcgaagcagtgcacgaagttgaagtggtcattaagcataatcgatttactaaagagacttacgatttcgatattgcagtgcttaggttgaaaactcccatcacttttcggatgaacgtggcaccagcatgtctccctgaacgtgactgggccgaatccaccctgatgacccaaaagacgggaatcgtcagcggtttcggaaggacccacgagaagggtaggcagtcgacccggctgaagatgcttgaagtgccttatgtggacagaaacagctgtaagctctcgtcgtcattcatcattacgcagaatatgttttgtgcaggctacgataccaaacaagaggacgcctgtcagggagattccggtgggccacatgtgactcgctttaaagatacttacttcgtgaccggaattgtctcatggggtgaaggatgtgcaagaaagggcaaatacggaatctatactaaggtaactgcgtttctgaagtggatcgacaggtcgatgaaaactagaggacttcctaaggcaaagagccatgcccctgaagtcattactagctccccccttaag

SEQ ID NO: 9261 - DNA, 1464 bp, synthetic construct
  misc_feature 1..1464: note = source = /note="Description of Artificial Sequence: Synthetic coding sequence"
  source 1..1464: mol_type = other DNA
atgggacggcctcttcaccttgtgttgctctcagcatctctggccgggttgctgctcttgggagaaagcctgtttattcggcgagagcaagcaaacaatatcctggcaagggtgactcgggcgaactcctttctggaggagatgaaaaagggtcatctggaaagagaatgcatggaggaaacctgcagctatgaagaggcccgtgaagttttcgaagattccgataagaccaacgaattctggaataagtataaggatggggaccaatgtgaaacctcgccgtgccaaaaccagggtaagtgcaaagatggacttggtgagtacacctgtacctgcctggagggctttgaaggaaaaaactgtgagcttttcacgagaaagctgtgttcgctggacaacggtgattgcgaccagttttgtcatgaagaacagaattcggtcgtgtgtagctgtgcccgaggttacaccctggccgataatggcaaggcatgtatacccactggtccgtacccttgtggtaaacaaaccctcgagagacgtaagaggtcagtggcacaggccacttcatcatccggtgaggccccagattcgattacctggaaaccttacgatgccgcagatttggatcctactgaaaatccattcgacctgctcgacttcaaccaaactcaaccagagagaggtgacaataaccttacgagaattgttggtggccaagaatgcaaggatggtgaatgtccatggcaggccctcctgattaacgaggagaacgaaggattttgtggtggcaccattttgtcggagttttacattctgactgctgcgcattgtctgtaccaagcaaagcgttttaaggtgcgtgtgggggatcgtaataccgaacaggaagaaggaggtgaagctgtgcacgaggtggaagtggtgataaagcacaaccggtttacgaaagaaacttacgacttcgatattgccgtccttagactgaaaacccctatcacctttcgcatgaacgtggcacctgcatgtctcccagagagagattgggcagagagcactctgatgacccaaaaaaccggaattgtgtcaggcttcggcagaacccacgaaaaaggtagacaatcgacccggctgaagatgcttgaggtcccttacgtggataggaattcgtgtaaacttagctcctccttcatcattactcagaatatgttttgtgcaggatacgataccaaacaggaggatgcatgccagggggattcggggggtccacatgtgaccagatttaaggatacctacttcgtcaccggaattgtctcgtggggagaaggatgtgcgcgaaagggtaagtacgggatatacactaaagtgaccgcctttcttaaatggatcgacaggtcaatgaaaactagaggtctgcctaaggccaagagccacgcaccggaagtgattactagctcgccgctcaag

SEQ ID NO: 9262 - DNA, 1464 bp, synthetic construct
  misc_feature 1..1464: note = source = /note="Description of Artificial Sequence: Synthetic coding sequence"
  source 1..1464: mol_type = other DNA
atgggtcggccgctgcacctcgtgctgttgtccgcatcattggcgggtctgctgctgctgggggagtccttgttcatccgccgcgaacaggccaataacatcctggctcgcgtgacccgagctaactctttcctggaggagatgaaaaaaggtcacctggaaagagaatgcatggaggaaacttgcagctacgaggaggcccgcgaggtctttgaggattcagacaagactaacgagttctggaacaaatacaaagatggagatcaatgcgaaacttcgccatgccagaatcaggggaagtgcaaggacggactgggggaatacacctgcacgtgccttgaaggcttcgagggcaagaattgtgagctgttcactcgcaagctgtgcagtctggataacggcgactgtgaccagttctgtcacgaagaacaaaactccgtcgtttgctcatgcgctcgcggctacactttggcagacaacggaaaggcttgcatcccgaccggcccgtacccttgcgggaagcagaccctggaacggagaaagagatcggtggcccaggctacctcatcatccggtgaagccccagactccatcacctggaagccgtacgacgccgcggacctggatccaacggaaaacccattcgatctcctcgacttcaatcaaacccagcccgaacggggcgacaataacctgacgaggatcgtgggaggacaagaatgtaaggatggggaatgcccgtggcaggccctgctcatcaatgaagagaacgaaggattctgcggaggcactatcctgtcagagttttacatactcaccgcggctcattgtctctaccaggccaaaagatttaaggtacgagtgggcgatcggaataccgaacaagaagaagggggagaggcagtgcacgaagtcgaggttgtcatcaagcataaccgcttcaccaaggagacttacgacttcgatattgctgtgctgaggctgaaaaccccaattacctttcggatgaatgtcgcgcccgcctgccttccggagagggactgggcggaatcgacgttgatgactcaaaaaacgggaatcgtgagcggttttggaaggacgcatgaaaagggtcgccaatcgacccgccttaagatgcttgaagtgccttacgtggaccggaactcgtgcaagctgagcagctcttttatcatcacgcagaatatgttctgtgcgggatacgacaccaaacaggaggatgcatgccagggtgattccggaggtccgcacgtcactcgttttaaggacacctatttcgttaccggcatcgtgagctggggagaggggtgtgcgagaaaaggaaagtacggaatctacactaaagtaactgccttcctcaaatggatcgatcgctcaatgaaaactaggggactgccgaaggctaaatcccacgctcctgaagtgattacttcttcgccgttgaag

SEQ ID NO: 9263 - DNA, 1464 bp, synthetic construct
  misc_feature 1..1464: note = source = /note="Description of Artificial Sequence: Synthetic coding sequence"
  source 1..1464: mol_type = other DNA
atgggccggccattgcacctagtgttgcttagtgcttcgctggcaggtttacttttgcttggggagagcctttttattcgccgagaacaggctaacaatatcctggctcgggttacaagagcaaacagtttcctcgaggagatgaagaaggggcacctggagcgtgagtgcatggaagagacgtgttcttacgaagaagcgcgtgaggtgtttgaagattctgacaaaactaacgagttctggaacaaatataaggatggcgatcagtgtgaaaccagcccatgtcagaatcagggaaaatgcaaggacggtctcggcgaatacacatgcacctgtctggagggctttgaaggcaagaattgcgagctgttcacccgcaagctttgtagcctagataacggagactgcgatcagttctgtcacgaggagcagaactcagtggtatgttcatgtgccagaggatacaccctggcagacaacgggaaagcatgcattccaaccggcccatatccatgcggcaaacagacactggaacgacggaaacggtctgttgctcaagcaactagcagctcgggtgaagcacctgactccattacatggaagccatacgacgccgcagatctggatcctaccgagaatccttttgatctgcttgattttaaccaaacccaaccagagagaggagacaacaacctgacccggattgtgggtggccaggagtgtaaggatggcgagtgcccatggcaggccctgcttatcaacgaagaaaatgaagggttttgcggtggtaccatccttagcgagttctatatattaaccgcagcccactgtctataccaagctaaaaggttcaaggttcgcgtcggtgacaggaacacagagcaagaagaggggggggaggctgtacatgaggtcgaggtcgtcattaaacacaaccggttcacaaaggagacttatgactttgacattgctgtcttgcgccttaagactccaatcacgttcaggatgaacgtggctcctgcttgtcttccagaaagagattgggccgaatctacactgatgacacagaaaactgggattgtgtccggtttcggccgcacacacgaaaaaggcaggcaatctacgagactcaagatgctcgaggtcccatacgtagataggaattcttgcaaactctcttccagctttattatcacccagaatatgttttgtgccggctacgacacaaagcaggaggacgcttgtcaaggggatagcgggggaccacacgtcactcgcttcaaggacacatacttcgtcaccggaatcgtttcgtggggtgagggctgtgcccgcaaagggaaatacgggatttatactaaggtgaccgcatttcttaaatggatcgaccggtctatgaaaacccgtgggctccctaaggcaaagtcacacgcgccagaggtcattactagctcaccattaaaa

SEQ ID NO: 9264 - DNA, 1464 bp, synthetic construct
  misc_feature 1..1464: note = source = /note="Description of Artificial Sequence: Synthetic coding sequence"
  source 1..1464: mol_type = other DNA
atgggtagaccactgcacctggtgctgctctccgcctcgctcgccggattgcttcttttgggagaaagcctctttatcagaagggaacaagcgaacaatattctcgccagagtcacgcgcgcaaactcgtttctggaggagatgaagaagggtcaccttgaaagagaatgcatggaagagacttgctcatacgaggaggccagggaagtgtttgaagattcggataagaccaatgaattctggaacaagtataaagatggagatcagtgtgaaacctcaccatgtcagaaccaagggaaatgcaaagatggactgggggaatacacttgtacttgtcttgaaggatttgaaggcaagaattgtgaactgttcaccagaaaactttgttccctcgataacggtgattgtgatcagttctgtcatgaggagcagaactcggtggtctgcagctgcgccagaggatacaccctcgcggataacggtaaagcgtgtattcccaccgggccttacccttgtggaaaacaaaccttggagaggcgaaaacgctccgtggcacaagcaacgtcatcgtcgggcgaagcacccgattcgattacctggaagccgtacgatgcagccgaccttgatccaacggagaatccattcgaccttctggatttcaatcagacccaacccgagcgcggcgacaataacctgacgcggatcgtcgggggacaggagtgtaaagacggcgaatgtccttggcaggccctgcttatcaatgaagagaacgaagggttttgtggtggtaccattctttcggagttttacattctgactgcagcccattgcctgtaccaagcaaagcgctttaaagtccgcgttggtgaccggaatactgagcaagaggaaggaggggaggcagtgcacgaagtcgaagtggtgataaagcacaatagattcactaaagaaacttacgatttcgatatagcagtcctgcgtcttaaaaccccaataacgtttcgcatgaacgtggcaccggcatgccttccagagagagactgggctgagtcaactctgatgactcagaaaaccggaatcgtgagcggatttggtagaactcacgagaaggggagacaatctacccgcctgaaaatgctcgaggtcccttacgtcgacaggaattcatgtaaactttccagctccttcattatcactcagaatatgttttgcgccggttacgacaccaagcaggaggacgcctgtcaaggagactcgggcgggccccacgtgactcggttcaaggatacttacttcgtcactggtatcgtgtcatggggggaaggttgtgcaaggaagggcaagtacggtatctatactaaggtgaccgcattcttgaagtggatcgaccggtccatgaaaacgagaggtctgccaaaggcaaagagccatgcgcctgaagttatcacctcatcccctctgaag

SEQ ID NO: 9265 - DNA, 1464 bp, synthetic construct
  misc_feature 1..1464: note = source = /note="Description of Artificial Sequence: Synthetic coding sequence"
  source 1..1464: mol_type = other DNA
atgggacgccctctgcatttggttctcctctcggcctctttggcgggtctgctgcttctcggggagtccctgttcattcgcagagaacaggccaacaatatcctggcgagagtgacccgcgcgaattcgttcctggaagaaatgaagaaaggacatctcgaaagagaatgtatggaagaaacttgttcatacgaggaggcacgcgaggtctttgaggactctgataagactaatgagttctggaataagtataaggacggtgaccaatgcgagacgagcccgtgtcaaaaccagggcaagtgtaaggacggactgggagaatacacctgcacgtgcctcgaaggttttgaagggaagaactgcgagctgtttaccaggaaactctgcagcctggacaacggcgactgcgatcagttctgtcatgaagaacagaactcggtggtatgctcctgcgcccgggggtacactttggcggacaacggaaaggcctgcatccccactggcccatacccatgcggaaagcagactttggagcggagaaagcggtcagtcgcccaagcgactagtagctcgggcgaggcccctgactcgattacttggaagccgtacgacgctgctgatctggacccaactgagaacccgttcgatctgttggacttcaatcagactcagcccgaacgcggcgacaacaatttgacccgcattgtgggaggacaggagtgcaaggatggggagtgcccgtggcaggccctgctgatcaacgaggaaaacgaaggattttgcggagggaccatcttgtccgaattctacatccttactgcagcccactgcctgtatcaagccaaacgctttaaagtgcgtgtcggagatagaaacaccgaacaggaagaaggaggagaagccgtccacgaagtggaagtggtgatcaaacacaaccggttcactaaagaaacttacgacttcgacatcgccgtcctgcgcctcaagactccgataaccttcagaatgaacgtggccccagcctgtctcccagaacgggactgggctgagtccactctgatgacccaaaagaccggtatcgtgagcgggttcggtagaactcacgaaaagggacgccagagcactcggctgaagatgttggaagtaccgtacgtggaccgaaattcctgcaaactcagctctagcttcattatcactcagaatatgttttgcgcgggctacgacaccaagcaagaggacgcgtgtcagggagattccggaggaccgcatgtgacccgctttaaggacacgtacttcgtcaccgggatcgtctcatggggcgagggatgtgctcggaagggcaaatacggaatctacactaaggtcactgccttcctgaaatggatcgataggtccatgaaaacccgcggcctgcctaaagcaaagagccatgcaccggaggtcatcactagctcaccactgaaa

SEQ ID NO: 9266 - DNA, 1464 bp, synthetic construct
  misc_feature 1..1464: note = source = /note="Description of Artificial Sequence: Synthetic coding sequence"
  source 1..1464: mol_type = other DNA
atgggcaggcccttgcaccttgtcctgctgtctgccagcttggctggactgctgttgcttggcgagagtctgttcattcgcagggagcaggcaaataatattctcgcacgtgttaccagggctaacagctttttggaggagatgaaaaaaggtcaccttgagagggagtgtatggaggagacatgttcctacgaggaggcaagagaagtttttgaggattccgacaaaaccaacgagttttggaacaaatacaaggacggtgaccagtgtgagactagcccttgccagaaccagggaaagtgtaaggatggcctcggtgagtacacctgcacttgtctggagggtttcgagggaaaaaactgcgaactcttcaccaggaaattgtgctctctcgacaatggtgattgcgaccaattctgccatgaggaacaaaattctgtcgtgtgcagctgtgcccgtggttacaccctggcagacaacggaaaagcctgcatccctaccggtccttacccatgtggaaagcagaccctggaacgtagaaaaagatccgtggcacaagcaaccagcagcagtggcgaggccccagacagcatcacttggaaaccatacgatgcagccgacctcgacccaactgaaaatccttttgatctcctcgacttcaaccagacacagcctgaacgcggagacaacaatcttactaggattgttggtggtcaagagtgtaaggacggtgaatgcccatggcaggcactgctgatcaacgaagagaacgagggcttctgtggcggcaccatactgtctgagttctatattcttaccgctgcccactgtctgtaccaagccaagcgcttcaaagtccgcgtcggtgacagaaacactgagcaggaggaaggcggtgaggctgttcacgaggtcgaggttgtcataaaacataacaggttcaccaaagagacctatgactttgacattgccgtgctgagattgaaaactccaatcacattcaggatgaacgtggcaccagcttgcctgccagaacgcgactgggccgagagtacactcatgacccagaaaactggaatcgtatccggcttcggtcgcacccatgaaaagggccgccagtcaactaggctgaagatgcttgaggtcccctacgtggatcgtaactcctgcaaactgagctccagcttcatcattacccaaaatatgttttgcgctggctacgatactaagcaagaggatgcttgtcaaggtgattccggtggtccccatgtgacaagattcaaggacacctattttgtgactggcatcgtgagttggggtgagggctgtgcacgcaaaggaaaatacggaatctacactaaagtgaccgctttcctgaagtggattgaccgcagcatgaaaacccgtggcctccccaaggcaaagtcccacgctcccgaagtaatcacatcatctcctttgaaa

SEQ ID NO: 9267 - DNA, 1464 bp, synthetic construct
  misc_feature 1..1464: note = source = /note="Description of Artificial Sequence: Synthetic coding sequence"
  source 1..1464: mol_type = other DNA
atgggtcgtccgctacatttagtattactatcggcgtcgttagcgggtttactactattaggtgaatcgttatttatacgtcgtgaacaagcgaataatatattagcgcgtgtaacgcgtgcgaattcgtttttagaagaaatgaaaaaaggtcatttagaacgagaatgtatggaagaaacgtgttcgtatgaagaagcgcgtgaagtttttgaagattcggataaaacgaatgaattttggaataaatataaagatggtgatcaatgtgaaacgtcgccgtgtcaaaatcaaggtaaatgtaaagatggtctaggtgaatatacgtgtacgtgtttagaaggttttgaaggtaaaaattgtgaactatttacgcgaaaactatgttcgttagataatggtgattgtgatcaattttgtcatgaagaacaaaattcggttgtttgttcgtgtgcgcgaggttatacgttagcggataatggtaaagcgtgtataccgacgggtccgtatccgtgtggtaaacaaacgttagaacgtcgtaaacgatcggtagcgcaagcgacgtcgtcgtcgggtgaagcgccggattcgataacgtggaaaccgtatgatgcggcggatctagatccgacggaaaatccgtttgatttactagattttaatcaaacgcaaccggaacgtggtgataataatctaacgcgaatagtaggtggtcaagaatgtaaagatggtgaatgtccgtggcaagcgctattaataaatgaagaaaatgaaggtttttgtggtggtacgatattatcggaattttatatattaacggcggcgcattgtctatatcaagcgaaacgatttaaagtacgagtaggtgatcgaaatacggaacaagaagaaggtggtgaagcggtacatgaagtagaagtagtaataaaacataatcgttttacgaaagaaacgtatgattttgatatagcggtactacgtttaaaaacgccgataacgtttcgtatgaatgtagcgccggcgtgtttaccggaacgagattgggcggaatcgacgttaatgacgcaaaaaacgggtatagtatcgggttttggtcgtacgcatgaaaaaggtcgtcaatcgacgcgtttaaaaatgttagaagtaccgtatgtagatcgaaattcgtgtaaactatcgtcgtcgtttataataacgcaaaatatgttttgtgcgggttatgatacgaaacaagaagatgcgtgtcaaggtgattcgggtggtccgcatgttacgcgttttaaagatacgtattttgttacgggtatagtatcgtggggtgaaggttgtgcgcgtaaaggtaaatatggtatatatacgaaagtaacggcgtttttaaaatggatagatcgatcgatgaaaacgcgaggtctaccgaaagcgaaatcgcatgcgccggaagtaataacgtcgtcgccgctaaaa

SEQ ID NO: 9268 - DNA, 1464 bp, synthetic construct
  misc_feature 1..1464: note = source = /note="Description of Artificial Sequence: Synthetic coding sequence"
  source 1..1464: mol_type = other DNA
atgggaagaccacttcatttggtgctgctgagcgccagcctcgcaggtctgctgctgctgggcgagagtctgttcataaggcgcgagcaggcaaacaacatcctggcgcgggtgacccgcgcaaacagtttccttgaggaaatgaagaaaggccacctcgaaagagagtgtatggaagagacatgtagttatgaggaggccagagaggtctttgaagatagcgacaaaacgaatgagttctggaacaagtacaaagatggcgaccagtgcgagactagcccttgccaaaatcagggtaaatgtaaggatggactgggcgagtacacatgtacgtgccttgaggggtttgagggtaaaaactgcgagctctttactcggaagctgtgtagcctggataacggggactgcgatcagttctgtcacgaagagcaaaacagcgtagtgtgtagttgcgcacgcggctatactctcgctgacaacgggaaggcatgcattcctaccggcccgtatccttgtggtaagcagaccctggagagaaggaaaagaagtgtagcgcaggcaacatcaagctccggggaggcccccgattcaatcacatggaagccatacgatgccgctgacctggatcccaccgaaaaccctttcgacttgttggatttcaaccagacccagcctgagagaggggacaacaatttgaccagaatagtgggcggacaggaatgtaaagacggagaatgtccttggcaggctctgctcataaatgaggagaatgaaggtttttgtggaggtacgatcctgtctgagttctacatactgacggctgctcactgtctgtaccaggccaagagatttaaggtcagggtgggggacagaaacacagagcaagaagagggcggtgaggcagtccatgaggtggaggttgtcatcaagcataaccgcttcacaaaagagacctacgactttgacattgccgtcctgcggctcaagactcccattacgttccgcatgaatgtggcaccagcctgcctgcccgagcgagattgggcagaatctacactcatgactcagaagaccggcatcgtgtccggcttcggtcgcacgcacgagaaggggaggcagagcacaaggctgaaaatgttggaggtgccatatgtcgataggaattcttgtaagctcagctcctccttcattataacccagaacatgttttgcgcaggttacgacacaaagcaggaagatgcctgccagggcgatagcggaggcccacacgtaacgcggtttaaagatacctattttgtgactgggatagtgagctggggagagggatgcgctcggaagggtaaatacggcatctacaccaaggtcacagctttcctgaagtggatagatcgctcaatgaagactagagggctgccaaaagccaagtctcatgctcccgaagtgattactagctcaccactgaag

SEQ ID NO: 9269 - DNA, 1464 bp, synthetic construct
  misc_feature 1..1464: note = source = /note="Description of Artificial Sequence: Synthetic coding sequence"
  source 1..1464: mol_type = other DNA
atgggtaggcccctgcacttggttttactaagtgcttcgctggccggcctgctgctgcttggcgagagcctttttattcgcagagagcaggctaacaacattctagctcgagttacccgggccaattcattcctcgaagaaatgaagaaggggcatctggagcgggaatgtatggaagaaacttgctcatatgaggaagctcgtgaggtcttcgaagattctgacaagaccaacgaattctggaacaagtataaagacggggaccagtgtgagaccagtccgtgtcagaatcaaggcaaatgcaaggacggtctcggagagtacacctgtacgtgcctggaaggcttcgaggggaagaattgtgaactttttacaaggaagctgtgctcacttgataatggcgattgtgaccagttttgtcatgaggaacagaactctgtcgtgtgctcctgcgctagggggtacacactcgcagacaatggtaaggcctgcatccctaccggcccctacccttgtgggaagcagacgctagagcgccgcaagcgatctgtggcacaagcaacctcttcatctggagaagccccggactccattacttggaaaccatacgatgcggccgatctcgatccgacagaaaaccccttcgatttgctggactttaaccaaacccagccagagcggggcgacaataacctcacgcgcattgttggaggccaagagtgtaaagacggtgaatgcccctggcaggcgcttctgataaacgaggaaaacgagggtttttgcggcggcaccattctgagcgagttctacatcctaaccgcggctcactgtctctaccaagccaagagattcaaggttcgcgtgggtgaccggaatacagagcaagaggagggaggggaggcggtgcatgaagttgaagttgttattaaacataatcgctttacgaaagagacatatgacttcgatattgccgtgctgaggttgaagacacccatcacgttccgcatgaatgtcgcccctgcttgcctgccagaacgcgattgggctgagtcaaccctgatgacacagaaaacaggcattgtgtcaggctttggcagaactcatgaaaaaggccggcagtccacaagactgaagatgctggaagtcccgtatgtcgacaggaattcctgcaagctgtcaagtagcttcataatcacccaaaacatgttttgcgctgggtatgatacgaaacaggaggatgcctgtcagggggacagcgggggccctcatgttaccagatttaaggatacctacttcgtcacgggcatagtatcctggggcgagggttgcgcgcgcaagggaaaatatggcatctataccaaagttactgcattcctgaaatggattgaccgcagcatgaagaccagagggctccctaaggctaaatctcacgctccagaggttatcactagctcgccccttaaa

SEQ ID NO: 9270 - DNA, 1464 bp, synthetic construct
  misc_feature 1..1464: note = source = /note="Description of Artificial Sequence: Synthetic coding sequence"
  source 1..1464: mol_type = other DNA
atgggtcggcctttacatttagtccttctgtctgcctcacttgccggactccttctccttggagaatcattgttcattcgacgtgagcaggctaataatatattggctcgagtgacacgagcaaatagttttttggaagaaatgaagaaaggacatttggagagagaatgtatggaagaaacatgctcctatgaagaggctagagaagtgtttgaggattcggataagacaaacgaattttggaacaagtataaggatggtgatcaatgtgaaaccagtccgtgtcaaaatcaaggtaaatgtaaggatggactgggagaatacacatgcacatgtctagaaggcttcgagggtaagaactgcgagctttttacacgaaaattgtgttcacttgataacggagactgcgatcagttttgccatgaagagcaaaactctgtggtctgttcttgtgcacgtggatacactctcgctgacaatggaaaggcttgcattccaactggcccatatccgtgtggaaaacaaaccctcgaacgaagaaaacgttcagttgcacaggcgacttcgtcctcgggtgaagcaccagattctatcacgtggaagccatacgacgcggctgatttagacccaactgaaaatccattcgatctgttggattttaatcagacacaaccggaacgaggagataataatctcacacgtatcgtaggaggccaagaatgcaaagatggtgaatgcccatggcaagcacttcttattaatgaagagaatgaaggattttgtggagggactatcctttcagaattctacattctcacggcggctcattgcttgtaccaagccaaacgatttaaagttcgtgttggtgacagaaatactgaacaagaagaagggggtgaagcggttcacgaagtagaagtcgtaattaagcacaatcgtttcacaaaggaaacctatgatttcgatatcgccgtgctgagacttaaaacacctataacctttcgcatgaatgtggctccagcctgtctgccagaaagagattgggccgagtcaaccctgatgactcagaagactggcattgtatcgggcttcggtagaacacacgagaagggaaggcaatcaactagactgaagatgttggaggtgccatacgtggatagaaattcatgtaaactgtcctctagtttcatcatcacacagaatatgttttgcgcgggatatgatactaagcaagaagatgcttgtcaaggggattctggaggaccgcatgtaacacgattcaaagatacgtacttcgttacgggaattgtgtcctggggcgagggttgcgctagaaaaggaaaatacggtatatacacaaaggttactgccttccttaaatggattgacagatcaatgaagacgcgtggattaccgaaagctaaatctcatgcgccagaagtcataacgtcttcaccattgaaa

SEQ ID NO: 9271 - DNA, 1464 bp, synthetic construct
  misc_feature 1..1464: note = source = /note="Description of Artificial Sequence: Synthetic coding sequence"
  source 1..1464: mol_type = other DNA
atgggacgccctttgcatctcgtgctcttgtctgcatcgctggctggtctgcttcttcttggggaatcactctttatacgccgggagcaagcaaacaatatcctcgcacgcgtgaccagggcaaactcctttctggaggagatgaagaaaggccatctcgaacgggaatgtatggaggaaacctgctcatacgaggaggcgcgggaggtgttcgaagatagcgataagactaatgagttttggaacaagtacaaggatggtgaccaatgcgaaacctcgccctgtcaaaaccaagggaaatgcaaggatgggcttggagagtacacttgtacctgtctcgaaggcttcgagggaaagaactgcgagctctttacccgtaagctgtgcagccttgataatggcgactgtgatcagttctgtcatgaggaacagaactccgtggtttgctcctgtgcacgaggttacaccctcgcagataacggaaaagcctgtatccctactggaccatatccatgcggtaagcagacgcttgaacgtagaaagcgctccgtcgcacaagctacctcatcatccggagaggcacctgactcaattacttggaagccctatgacgcagcagacctggatccaactgaaaatccgtttgaccttctggatttcaaccagactcaacctgaaagaggcgacaataatctgactaggatagttggtggacaagaatgtaaagacggagaatgtccatggcaagctctgctgattaatgaggagaacgaagggttttgtggtggcaccattctttctgaattctacatcctgaccgcggcacattgcttgtaccaagcaaaacgttttaaggtcagagtcggagatcgcaacactgaacaggaagaagggggagaagcagtgcatgaagtggaagtggtgattaaacacaataggtttaccaaggaaacgtacgactttgatattgcggtgttgcgacttaaaaccccaataacctttagaatgaacgtggcacctgcctgtctcccagaacgggactgggcggaatcgaccctcatgacccagaaaaccggaattgtctcgggattcggtagaacccatgaaaaggggcgtcaatcgactcgccttaagatgctcgaagtgccatacgtggatcgtaactcctgtaaactttcttcatcctttatcatcacccagaatatgttctgtgccggttacgatactaagcaagaagatgcatgtcagggtgactccggaggtcctcatgtgaccagatttaaggatacttactttgtcaccggtatcgtgtcgtggggagaaggatgcgcacgcaaaggcaagtacggtatttacactaaggtgactgcctttcttaagtggatcgataggtcgatgaaaacgcggggactgcctaaggcaaagtcacatgctcctgaagtgattacctccagccctcttaag

SEQ ID NO: 9272 - DNA, 1464 bp, synthetic construct
  misc_feature 1..1464: note = source = /note="Description of Artificial Sequence: Synthetic coding sequence"
  source 1..1464: mol_type = other DNA
atgggtaggcccctgcatttggttctactgtctgcaagtctggcaggcctgttactgcttggagagagtctgtttatccggagggaacaggccaacaatatcctggcacgggtgacccgggccaacagcttcctggaagagatgaagaaaggtcacttggagcgggaatgcatggaagagacttgttcctacgaggaggcaagggaggtgttcgaagacagcgacaagactaatgaattttggaataaatacaaggacggggatcagtgcgagactagcccatgccagaaccagggtaagtgtaaagacggtttgggggagtatacctgtacatgtttggaaggttttgaaggtaaaaattgcgaactcttcacaagaaaactctgttccctggataatggagattgtgatcagttttgccatgaagagcagaattcggtggtgtgctcatgtgcccgcggttacacccttgctgacaacgggaaggcctgtatccccaccgggccatacccatgcgggaaacaaacgctggagagacgaaaaaggtcagttgcccaagcgacgtcatcaagcggcgaagctcctgactccattacgtggaagccgtacgatgctgcggatctggacccaactgagaacccctttgatctgctggactttaatcaaacacagcccgaaagaggtgataacaatctgactcgcatcgtgggtggtcaggaatgcaaggacggggagtgtccatggcaggcactactaatcaacgaggaaaacgagggtttctgtggcggcaccatcttgtctgagttttacattttgaccgccgctcattgtctctaccaggcaaaacgatttaaagttcgggttggggatcggaatacagaacaggaagagggcggcgaggcagtgcacgaggtagaggtagtaattaagcacaatcgcttcactaaagagacgtatgacttcgatatcgcagtcctccgcttgaagacacctataacatttcgcatgaacgttgcccctgcctgtctgcccgagcgcgactgggccgagagtacattaatgacccagaagacgggaattgtctctggcttcggtagaacacatgagaagggaagacagtccacacgccttaaaatgctggaagtgccctacgtcgatcgcaactcctgtaagctgtccagctctttcataattactcaaaacatgttttgcgcaggatacgacacaaagcaggaggacgcatgccagggagattcaggcggaccccacgtaacacgcttcaaggatacctacttcgtgactgggatcgtgtcatggggagaagggtgcgcccggaagggaaaatacggcatctacacgaaggtaaccgccttcctgaaatggatcgaccgctctatgaagactcgcgggctgcccaaggcaaaatctcacgctcctgaggtaatcactagttctccattgaag

SEQ ID NO: 9273 - DNA, 1464 bp, synthetic construct
  misc_feature 1..1464: note = source = /note="Description of Artificial Sequence: Synthetic coding sequence"
  source 1..1464: mol_type = other DNA
atggggcgccccctccatctggtgctgctgtcagctagccttgctggactgttactgctcggggaaagcctgtttataaggagagaacaggctaacaacatcctggcacgggtgaccagagccaatagcttcctcgaggagatgaagaaggggcatcttgagcgggagtgtatggaggaaacctgctcgtacgaggaggcccgggaagtctttgaggactctgataagacaaatgaattctggaacaagtacaaggatggagaccagtgcgagacaagcccttgtcagaaccaggggaagtgtaaagacgggctgggggaatatacctgcacgtgcctcgagggttttgagggcaagaactgcgaattgtttacccgtaaattgtgtagcctggacaatggcgactgtgaccagttttgccatgaggagcaaaacagcgtagtctgctcgtgtgcacggggctatactttggccgataacggcaaggcctgcatacccacaggtccttatccatgtgggaaacagactctggaaaggaggaaacgatctgtcgcacaggcgaccagcagctctggcgaggcccccgactcgattacttggaagccttatgacgctgccgaccttgatcccactgagaacccctttgacctgctggatttcaaccagacacagccagaacgtggcgacaacaacttgacacggatagtaggtgggcaggagtgtaaggacggagagtgtccctggcaggccctcctgatcaacgaggaaaacgaagggttctgtggtggcactatcctgtcggagttctacatcttgaccgccgctcattgcctctaccaagccaagaggttcaaggtgcgagttggcgaccgaaacacggagcaggaggagggtggagaggcagtacacgaggtcgaggtggtgattaagcacaaccgcttcacaaaggaaacatacgatttcgatatcgccgtgctccgcctgaagactcctatcacttttcggatgaacgttgcaccggcatgcttacccgagcgtgattgggctgaatctactctgatgacacagaagactgggatagtttctgggttcggccggacgcatgagaaggggcgccaatccacgaggctcaagatgttagaggtgccctatgtggataggaactcttgtaagctgtctagcagtttcatcataactcaaaatatgttctgcgccggatacgacacgaaacaggaagatgcctgccagggagactcaggggggccacatgtgactagattcaaggacacgtactttgttacaggcatagtttcatggggggaggggtgcgcacggaaggggaaatatgggatctacaccaaggtgaccgccttcctcaagtggatagataggagcatgaagacgcgaggtctgcctaaggccaaaagccacgcacctgaagtaataacctccagtcctctaaag

SEQ ID NO: 9274 - DNA, 1464 bp, synthetic construct
  misc_feature 1..1464: note = source = /note="Description of Artificial Sequence: Synthetic coding sequence"
  source 1..1464: mol_type = other DNA
atgggccgacctcttcatctggtattgctgtcagcatcgctcgccgggctgcttcttctgggagagtcgctgtttattcggagggagcaggctaacaacattctggcacgggtgactcgcgccaatagctttctggaggaaatgaagaaggggcatctcgaaagagagtgtatggaggaaacctgttcctacgaagaggcgcgcgaggtgtttgaggattccgataagaccaacgaattttggaacaagtacaaagacggcgatcaatgtgaaacctccccatgtcagaaccaaggcaagtgtaaggacggactgggtgaatatacctgtacctgcctcgaaggtttcgagggaaagaactgcgaacttttcaccaggaagctgtgctcgcttgataatggtgattgtgatcaattctgccacgaggaacagaacagcgtcgtctgttcatgcgccagaggatacactttggccgacaacggaaaagcgtgcattccgactggcccttacccatgtggtaagcagactctggaaagaagaaaacgtagcgtcgcacaggcaacttcctcaagcggagaagcccccgattctattacctggaagccttatgatgcagccgatcttgatcctactgaaaatccctttgacctgctggactttaaccaaactcaaccagaaaggggcgataacaatcttacccggattgtgggtggtcaggagtgtaaagacggggaatgtccgtggcaggcacttctgattaatgaagaaaatgaaggcttttgcggcggtaccattctgagcgagttttacatcttgactgccgcacactgtctgtaccaggcaaaacggtttaaagtgcgggtgggcgatcgaaacaccgaacaggaagaaggaggagaggcagtgcatgaggtggaagtagtgatcaagcacaatagattcactaaggagacttacgattttgatatagcggtcctccggctcaaaactccaataaccttcagaatgaatgttgcacctgcctgtctgccagagcgggactgggccgaatcaaccctgatgacgcaaaaaactggaatcgtgtcaggcttcggccgaacccatgaaaagggcagacagtcgactagacttaagatgcttgaagttccgtacgtcgataggaattcgtgtaagctctcaagcagctttatcataacccaaaacatgttctgcgcagggtacgataccaagcaagaggacgcgtgccaaggagatagcgggggtccacatgtgactcggttcaaggacacctactttgtgaccggaattgtgtcctggggagagggttgtgcacgcaagggcaagtacggtatttacactaaagtgactgcctttctgaagtggatcgataggtcaatgaaaacgcggggactcccaaaagctaagtcacatgcccccgaagtcattacctcatcgcctctgaag

SEQ ID NO: 9275 - DNA, 1464 bp, synthetic construct
  misc_feature 1..1464: note = source = /note="Description of Artificial Sequence: Synthetic coding sequence"
  source 1..1464: mol_type = other DNA
atgggcagacccttgcacctggtgttgctgtcggccagcctcgccggactcctgctcctgggggaaagcctcttcatcagaagagagcaagcaaataacattctggcaagagtgacccgggcaaattcgttcctcgaggagatgaaaaaagggcatctcgaacgggaatgcatggaagaaacttgttcgtacgaggaggctcgagaggtgttcgaggacagcgacaagactaacgaattctggaacaagtacaaggacggggaccagtgcgaaacctcaccgtgccagaaccaaggaaagtgcaaggatggactcggagaatacacctgtacctgccttgaaggattcgagggtaagaattgcgagctgttcactagaaaactgtgctccctggataacggtgattgtgatcaattctgtcatgaagagcagaatagcgtcgtgtgttcgtgcgctaggggctacactctcgctgacaatggaaaagcatgcatcccgaccggtccgtacccctgcggaaagcagacgctggaacgccgcaagagatcggtcgcccaagccacttccagctcgggcgaagccccagactcgattacttggaagccgtacgatgctgcggatttggatcctaccgagaacccgttcgacctcctggacttcaaccagacccagccggagcgcggcgacaataacctgactcggatcgtcgggggacaggaatgcaaggacggagagtgtccgtggcaggcccttctcatcaatgaagaaaatgaagggttctgcggaggtaccatcctcagcgagttttacatcctgaccgctgctcactgcctctatcaagcaaagcgctttaaagtgcgggtcggagacaggaacacggaacaggaagaggggggtgaggcagtgcacgaagtggaagtggtcatcaagcacaatcgcttcacgaaggaaacctacgatttcgacatcgctgtgctgaggctgaaaactccaatcaccttcagaatgaatgtggctccagcatgcctgccagagcgcgactgggctgaatccactctgatgacccaaaagacgggaattgtgtcgggatttggacggactcatgagaaaggccgccagtccacccggttgaaaatgctggaagtcccttacgtggacaggaacagctgtaaactgagcagcagctttatcattactcaaaacatgttctgcgccggatacgatactaagcaggaagatgcgtgccaaggagatagcgggggaccgcatgtgactagatttaaggatacttacttcgtgactggaattgtgtcctggggagaaggctgcgcccggaaaggaaagtacggcatctacaccaaagtgacggcgttcctgaagtggattgacaggtcgatgaaaacccggggcctgccaaaggcgaagagtcacgcgcccgaggtgataacttcgagccctctcaag

SEQ ID NO: 9276 - DNA, 1464 bp, synthetic construct
  misc_feature 1..1464: note = source = /note="Description of Artificial Sequence: Synthetic coding sequence"
  source 1..1464: mol_type = other DNA
atgggtaggcctttgcacctggtgctactcagcgcatccttagcaggcctcctgctcctgggcgaatctctgttcattcgcagagaacaggctaacaacattctggccagagttacaagagctaatagctttttggaggagatgaaaaaggggcacctggagagggaatgtatggaagaaacatgcagttatgaggaggctagggaagtttttgaggactctgacaagaccaatgaattctggaataagtacaaggacggggaccagtgcgaaacttccccctgccaaaaccaggggaaatgtaaggacggcttgggggaatacacctgtacgtgtttggaagggttcgaagggaaaaattgtgagctgttcacacggaaactttgctctcttgacaacggcgactgcgatcagttctgccacgaggaacagaacagtgtggtttgtagctgtgccaggggttacacccttgccgacaatggcaaagcctgtatccccacaggaccatacccttgtggcaaacagaccctcgagcggagaaagcgatcggttgcccaggcgacctcatcttctggggaagcccctgactctatcacatggaagccatacgacgcagccgaccttgaccctaccgagaacccttttgacttactggactttaatcaaacacagcctgagcggggggataacaatttaactcgaatcgtgggtggtcaggaatgtaaggatggggagtgcccttggcaagccttgctgatcaatgaagaaaatgaaggattctgcggcggcactatactctccgaattttacattttgactgcagctcactgtctctaccaagctaaaagatttaaggtgcgagtgggggataggaatacagaacaagaggaaggcggtgaggccgtacacgaagtggaggttgtgatcaagcacaacaggtttacgaaggagacatatgacttcgacattgctgttttgcgactgaaaactcctattacgtttaggatgaacgtggccccagcttgcctgccggagcgggattgggcggaatccaccctcatgacacaaaaaacaggtatcgtgtcaggattcgggagaactcacgaaaagggacgacaatctaccaggctgaaaatgcttgaggtaccgtatgtggacaggaactcctgtaagctgtcctcatcgtttatcatcacccaaaatatgttctgtgccggatatgacacaaagcaggaagatgcatgccagggcgatagcggggggccacatgtgacgcgatttaaagatacctatttcgtaaccggcatcgtatcatggggcgaagggtgcgcccgaaaaggcaagtatgggatctacacaaaggtgacagccttcttaaaatggattgataggtcaatgaagacaagaggattgcctaaagcaaagtcacacgctcccgaggtaattaccagctccccactcaaa

SEQ ID NO: 9277 - DNA, 1464 bp, synthetic construct
  misc_feature 1..1464: note = source = /note="Description of Artificial Sequence: Synthetic coding sequence"
  source 1..1464: mol_type = other DNA
atgggccggcctctgcatctggtgctgttatcggcatcactcgcgggcctcctgcttctgggtgaatcactttttattcgcagggaacaggccaacaatattcttgctcgcgtcacccgcgcaaatagctttctcgaagagatgaagaagggtcatcttgagcgcgagtgcatggaggagacctgtagctacgaggaagccagggaggtgttcgaggatagcgataaaaccaatgagttctggaataaatataaggacggcgatcagtgcgagacttccccctgtcagaatcaaggtaaatgcaaggatggcttaggcgagtacacctgtacctgcctggagggcttcgagggcaagaactgcgaattattcaccaggaagctgtgctccctggacaatggtgactgcgatcagttctgtcatgaggagcaaaactccgtcgtctgcagttgtgcccggggatataccctggccgataatgggaaagcttgtatcccaaccggtccgtatccctgtggaaaacaaacactggagaggcggaaacgcagcgttgctcaggccacgagcagtagcggcgaagctccagacagcatcacctggaaaccttatgacgctgcagatttggatcccactgaaaacccgtttgacctgcttgattttaatcaaacccagcctgagcgcggggacaataatcttacccgcattgtcggcggtcaggagtgcaaggatggcgaatgcccatggcaggccctgttgatcaatgaagagaacgaggggttctgcggcggcaccattttatcagaattctacattttgacagctgcacactgtctgtaccaggccaagagattcaaagttagggttggcgatcgaaataccgagcaggaggagggaggagaagcagttcacgaagttgaagttgtaataaaacataatagattcactaaggagacctatgactttgatattgctgtgttgcggctgaagaccccgattaccttccggatgaatgttgctcctgcttgccttcccgaaagggactgggcggagagcacgttaatgacccagaaaacggggatcgtgtccgggttcggtcggactcatgagaaaggccggcagtccaccagactaaaaatgctggaggtgccctacgttgacagaaactcttgtaagctttcctctagctttataataacccagaacatgttctgcgcaggttacgatacaaaacaggaagacgcctgccagggggattcgggcggacctcacgtgactcgtttcaaggacacttatttcgtcaccggcatcgtgtcttggggggagggatgcgctaggaaaggtaaatatggcatctatacaaaggttacagccttcttgaaatggattgatcgatcaatgaagacaaggggcctacccaaggcgaaaagccatgctcccgaggttattacatcttcacccctgaag

SEQ ID NO: 9278 - DNA, 1464 bp, synthetic construct
  misc_feature 1..1464: note = source = /note="Description of Artificial Sequence: Synthetic coding sequence"
  source 1..1464: mol_type = other DNA
atggggcgacctctccatctcgtgttgctgagtgcttctctggccgggcttctgctgctgggggagtcccttttcattcggcgggagcaggctaataacatcctggccagagtgactcgcgctaattcgttcctggaagagatgaaaaaggggcacctcgagcgggagtgtatggaagagacctgctcttacgaggaggcaagggaggtgttcgaggattcagacaaaaccaacgagttctggaataagtataaagatggggaccagtgcgagacttcaccctgccagaaccaagggaagtgcaaggatggtctaggtgagtacacatgtacctgtctagaaggatttgaaggcaagaactgtgaactctttacacgcaagctgtgctctctggacaatggcgactgcgatcagttttgccatgaggaacagaattccgtggtgtgcagttgcgcacggggttacactctcgcagataatgggaaggcatgtatcccaaccggcccttatccatgcggcaagcagacattagaaaggcgaaaacggtctgtggcgcaggcaacaagctccagtggtgaggcaccagatagcatcacttggaaaccctacgatgcagcagatttggaccctactgagaacccctttgatctactcgacttcaaccagacacagcctgaacggggggataacaatttgactcggatcgtggggggccaagagtgcaaggatggagaatgtccctggcaggccctgctcatcaatgaggaaaatgagggattctgcggcggaaccattctttcagagttctatatactcacagcggcccactgcctataccaggctaagagatttaaggtgcgcgttggagaccgtaatactgagcaagaggagggaggcgaagcagtgcatgaggtggaggtggttatcaagcataaccgatttacaaaggagacctacgattttgatattgctgtgctgagacttaagacccccatcacgttcaggatgaatgtggccccggcatgtctcccagagagagattgggctgagtctacactgatgacacaaaaaaccggaatcgtgagcggttttgggcgcacccacgagaagggacgccaatctaccaggctcaaaatgctggaggtgccgtatgtagatcggaacagctgcaagctgagcagttccttcattatcactcagaatatgttttgcgctggttatgacacaaagcaagaggacgcatgtcagggagacagtggcggaccacacgtgacacgctttaaggatacctacttcgtcaccggaatcgtgtcctggggggaggggtgcgctagaaaagggaaatacggcatttatacaaaggtgaccgcctttctgaaatggatcgaccgcagcatgaagacacgaggtctgccgaaagcaaagagccatgcaccggaggtgatcaccagttctcccttgaag

SEQ ID NO: 9279 - DNA, 1464 bp, synthetic construct
  misc_feature 1..1464: note = source = /note="Description of Artificial Sequence: Synthetic coding sequence"
  source 1..1464: mol_type = other DNA
atggggagaccacttcacctggtactgctgtcagcttctttagccggcctcttgttgcttggcgagagcctcttcatccggagggagcaggccaacaatattctagcccgagtgacccgtgccaatagcttcctggaggagatgaaaaagggccacctagaacgagagtgcatggaggagacgtgttcttacgaggaggccagagaagtattcgaggattccgataaaaccaatgagttttggaataaatataaagatggcgaccaatgtgagacatctccctgccagaaccagggcaaatgcaaagacggcctcggagagtacacctgtacctgcctggaaggctttgaggggaaaaattgtgaactcttcacccgcaagctctgttctttagacaacggggactgcgatcagttctgccatgaagagcagaactccgttgtatgctcatgcgcccgggggtacacgctcgccgataatggaaaggcttgtattccaactgggccctatccttgcggaaaacagaccctcgaacggagaaaacgaagcgtggctcaggctacctctagctctggtgaggcaccagatagcatcacatggaaaccctacgatgcagcggatcttgatcccaccgaaaaccccttcgatctgctcgatttcaatcagactcagccagagaggggcgataacaaccttactagaatcgttgggggtcaggagtgcaaggacggcgaatgcccttggcaggccttgctgataaatgaagagaatgaggggttctgtggcggcactatcctgagtgaattctatatccttaccgctgctcattgcctttatcaggcaaagagattcaaagtgagggtaggtgacagaaacactgagcaagaggaagggggagaagctgttcatgaggtggaggtggtgatcaagcataaccgcttcaccaaagagacctatgacttcgacattgccgtactgaggctgaaaacacccattacctttcgcatgaacgtcgcacctgcatgcctgcccgagcgcgactgggcggagtccacattgatgacacaaaaaactggcatcgtttccggcttcgggcgcactcatgaaaaaggccggcaatcgacccggctcaaaatgctggaagtaccatatgtggaccggaatagttgcaaactgtccagttcttttatcattacccagaatatgttctgtgcaggttacgatacaaagcaagaggatgcctgccagggagactctggcggcccccacgtcacccgcttcaaggacacatacttcgtgaccggtatagttagttggggggaaggatgcgctcggaagggaaagtacgggatctacacaaaggtgactgccttccttaaatggatcgatcgttcaatgaaaacccggggacttcccaaggcaaagagccacgcgcctgaggtgattacgtcttcccctcttaag

SEQ ID NO: 9280 - DNA, 1464 bp, synthetic construct
  misc_feature 1..1464: note = source = /note="Description of Artificial Sequence: Synthetic coding sequence"
  source 1..1464: mol_type = other DNA
atggggcgaccgttgcacctggtgctgctgagcgcgtcgctggcgggactcctgttgctgggcgaatctctgttcattcgacgcgagcaggccaacaatatcctggcgcgggtgaccagagcaaactcattcctggaagaaatgaaaaaggggcacctcgagcgcgaatgtatggaggaaacgtgttcctacgaggaggcccgcgaagtttttgaggattccgacaagaccaatgaattctggaacaagtacaaggatggggaccaatgcgaaacttcgccatgccaaaaccagggaaaatgcaaggacggcctcggtgagtacacttgtacctgccttgaaggattcgagggcaaaaactgcgaactctttacgagaaagctctgcagcctggacaacggagattgcgatcaattctgtcatgaagaacagaactccgtggtgtgttcgtgcgcgcgggggtacacccttgccgataatggcaaggcctgcattcccactggaccttacccatgcggcaagcagactctggaaagacgcaaaaggtccgtggctcaggccacttcgagctcaggggaagcccctgattcgatcacctggaagccatacgacgctgccgatctcgatccaacggaaaatcccttcgacctcctggatttcaaccagactcagcctgaacgcggcgacaacaatctgacgcgcatcgttggaggacaggaatgcaaagatggagagtgcccgtggcaggcgctgcttatcaatgaggaaaatgagggtttttgtggtggaaccatcctgtccgagttttacatcttgaccgcagcacattgtctgtaccaagcgaagaggttcaaagtcagagtgggcgaccggaatacggagcaggaggaaggaggcgaggccgtccacgaagtagaggtcgtcatcaaacacaaccggttcacgaaagaaacctacgatttcgatatcgccgtgctgaggctcaagaccccgatcacctttcgcatgaacgtcgctccggcgtgcctgcccgaaagggactgggcagaatcgaccctgatgacccagaaaaccggaatcgtgtctggctttgggaggactcatgaaaagggccgccaaagcaccagactcaaaatgctggaggtgccttatgtggacagaaatagttgcaaattgtcctcctcatttatcatcacccagaacatgttttgtgccggctacgacactaagcaggaagatgcctgccaaggagactcgggaggacctcatgtgacccgcttcaaggacacctacttcgtgaccggaattgtgtcgtggggcgaaggatgcgcgagaaagggaaagtacggtatatacacgaaggtgaccgccttccttaagtggatcgaccgatcgatgaaaactcggggcctcccgaaagccaaatcgcacgcgccggaggtgattacttcaagcccactgaag

SEQ ID NO: 9281 - DNA, 1464 bp, synthetic construct
  misc_feature 1..1464: note = source = /note="Description of Artificial Sequence: Synthetic coding sequence"
  source 1..1464: mol_type = other DNA
atgggacgacctctgcacctagtgctgcttagtgcatccctggccggcctgctgctcctaggtgaaagtctcttcatccgtcgggagcaagccaacaacatactcgccagagttaccagggccaatagttttctagaggaaatgaagaagggccacttggagcgggagtgcatggaagagacatgcagttacgaagaggctcgggaagtgtttgaggattcagacaagactaacgagttctggaataaatacaaggatggagatcagtgcgaaaccagcccttgtcaaaaccagggcaagtgtaaagacggactgggagagtacacatgtacctgcctagagggatttgaaggcaagaattgtgaactgttcaccagaaagctgtgcagcctggataacggagactgcgaccagttttgccacgaggaacagaactccgttgtgtgctcctgcgcacgaggatacactctggctgacaatggcaaggcatgtattcctaccggaccttatccctgtggaaagcaaaccttagaaagacgcaagaggagtgtggcacaggctacatctagttcaggcgaagcaccagattctatcacttggaagccatacgacgccgcagacctagatccaaccgaaaaccctttcgatctcctggacttcaatcagacccagccagagcgtggagacaacaatctaactcgcatcgtaggtggacaggagtgtaaggatggagaatgtccatggcaggctctgctgataaacgaggagaacgaggggttttgtgggggtactattctgtctgaattttacatcttgaccgcagcacattgtctgtatcaggccaagcggtttaaagtcagggtgggagatagaaacaccgagcaggaggaaggcggagaagccgtgcatgaggttgaggtggtcataaaacacaacagatttactaaggaaacctacgacttcgatatcgccgttttacgattaaagacccctatcaccttccgcatgaatgtggcccctgcctgcctgccagaacgcgactgggccgagtctaccctgatgactcagaagacaggcatagttagtggcttcggcagaactcacgagaaaggccggcaaagcacccggctaaaaatgctggaggtcccttatgtggacaggaactcttgcaaactgagtagctcattcatcatcacacagaatatgttctgtgctggctatgataccaaacaggaagatgcatgccagggtgatagtggtggacctcacgttacccgctttaaggatacctatttcgtgaccgggatcgtttcctggggcgaggggtgcgctcgtaagggcaagtatggaatctacacaaaagtaacagccttcctgaagtggattgatagatccatgaagacacggggactgcctaaagctaagagtcatgcccccgaggtgataacatcaagtccactcaag

SEQ ID NO: 9282 - DNA, 1464 bp, synthetic construct
  misc_feature 1..1464: note = source = /note="Description of Artificial Sequence: Synthetic coding sequence"
  source 1..1464: mol_type = other DNA
atgggacggcctctccatttagtgctcctgagcgcttctctggccggtctcctgctgttaggcgagtccctcttcatccggcgcgagcaggcgaacaacatattggcgagagtgacgagagctaactcctttcttgaagaaatgaaaaagggccatctggagcgggaatgtatggaggagacctgctcatacgaggaagcacgagaagtgttcgaagactccgacaagacgaacgagttttggaacaaatataaagatggagatcagtgcgagacaagcccttgccagaaccagggaaaatgtaaggatggcctgggcgaatacacctgtacatgtctagagggctttgagggcaagaattgcgaattatttacccgaaagctgtgttccttagacaatggagactgcgaccagttttgccacgaagagcagaattctgtagtctgctcgtgcgccaggggctataccttggctgataatggtaaagcttgcattccgacgggcccatatccctgcggcaagcagacactcgagcggaggaagagatctgttgcacaagctacaagctcttccggggaggccccagatagcatcacctggaagccttatgacgcagctgacctcgaccccaccgagaatcccttcgacctgctcgatttcaaccagacgcagcctgaacgaggggataacaacctaaccaggatcgttggtggtcaagaatgtaaggacggagagtgtccttggcaggcactgctgattaacgaagaaaacgaagggttttgtggcgggacaatcctgtcagagttctacattctgacggccgcccactgcctgtatcaggccaaacgttttaaagttcgcgtgggagaccggaatactgaacaagaggagggcggagaggcggtgcacgaagtggaggtggttataaagcataatcggttcaccaaagaaacttacgactttgatattgcagtgctgcgcctgaagacccccatcacattcaggatgaacgtagcaccagcctgcttacccgagcgggattgggccgagagcacgctgatgactcagaaaaccgggattgtgagcggttttggtagaacacatgagaagggacgccagagcaccaggttgaagatgctggaagttccatatgtggatcggaactcatgcaagctgtcatccagttttataatcactcagaatatgttctgcgccggatacgacacaaaacaggaagacgcctgccagggagactcaggcggcccccacgttacgagattcaaagacacctacttcgttacagggattgtcagctggggcgagggttgcgcccggaaaggaaagtatggcatctatacgaaggtgactgcttttctaaaatggatcgatcgtagtatgaagaccagaggtttaccaaaagctaaaagtcatgccccagaagtgataacgtcctcccctttaaag

SEQ ID NO: 9283 - DNA, 1464 bp, synthetic construct
  misc_feature 1..1464: note = source = /note="Description of Artificial Sequence: Synthetic coding sequence"
  source 1..1464: mol_type = other DNA
atgggaaggcctcttcatttagttctcctctccgcctccctcgccgggttgctccttctcggggagtccctcttcatcagacgagaacaggctaataacatcctcgcgcgagtcacaagagcaaactctttcctggaagaaatgaagaaaggacatttagaacgagaatgtatggaagagacatgcagttatgaagaggcgagagaagtgtttgaggatagtgataagactaacgaattttggaacaaatacaaagatggagatcaatgtgaaacaagtccatgtcaaaaccaaggaaaatgcaaagatgggctaggggaatatacatgcacttgtcttgaagggtttgaaggaaaaaattgtgaactgttcacacggaagctgtgttctctggataacggggactgtgatcagttctgtcatgaagagcagaatagtgtagtgtgttcctgtgctcggggatatactctcgccgataatggaaaagcatgtattccaactggaccttacccatgtggaaaacagacacttgaacggagaaaacgatctgtggcacaggccactagttcttctggggaagcccctgactccatcacttggaaaccttatgatgcagctgatctggatccaacagagaacccctttgacctgttggattttaatcagactcagcccgagcggggagataacaatctaacaaggatcgtgggggggcaggaatgtaaagatggagaatgtccctggcaggctcttttaataaacgaagaaaacgagggattttgtggggggactatcctttccgaattttatatcctcacagcggctcattgtttatatcaggccaagcggtttaaagtccgggtcggggataggaacacagaacaggaagaagggggagaagctgttcacgaagttgaggtggtcatcaagcacaaccgcttcacaaaagaaacttatgatttcgatatagccgtacttcggctcaagacaccaataacatttaggatgaacgttgcaccagcatgtctcccagaacgagattgggcagaatctacacttatgacacagaagacagggatagtatctgggtttgggcggactcatgaaaaaggacgacagtctactcggctgaaaatgctcgaagtaccttacgtggatcgaaactcttgcaaactatcttcatcctttatcattacacagaacatgttctgtgctgggtatgatactaaacaggaagatgcttgtcagggggattctggagggcctcatgtaacaaggtttaaagatacgtattttgtgacaggaatcgtgagttggggggaagggtgcgcccgcaaagggaaatacgggatttatacaaaagtgacagccttcttgaaatggattgaccgctctatgaaaactagggggctccctaaagcaaaatcacacgcacccgaagttattacatcgtctcccctcaag

SEQ ID NO: 9284 - DNA, 1464 bp, synthetic construct
  misc_feature 1..1464: note = source = /note="Description of Artificial Sequence: Synthetic coding sequence"
  source 1..1464: mol_type = other DNA
atgggtaggccgctccacctggtgctcctttccgcttcgctcgctggcctcctgctgctgggagagagccttttcatccgcagagaacaggctaacaacatcctggctcgagtcacccgcgcgaactccttcctcgaggagatgaagaaaggacatctcgaacgcgaatgcatggaagaaacgtgcagttacgaggaggcccgcgaggtgttcgaggactcggataaaactaatgaattctggaataagtacaaagacggcgaccagtgcgaaacctccccatgccagaaccaagggaagtgtaaggacggcctgggagaatacacgtgcacctgcctcgaaggtttcgaagggaaaaactgtgagctcttcacccgcaagctctgcagcctggataacggagactgtgaccaattttgtcacgaggagcagaactcagtcgtgtgctcctgtgcccgcggctacactcttgccgacaacggcaaagcatgcatccccaccgggccatacccatgtggaaaacagaccctggaacgccggaagagatctgtggcgcaggcgacgtcatcctccggtgaagcccccgatagcatcacctggaagccttacgacgccgcagatttggatccgaccgaaaaccccttcgatctcctcgactttaaccagacccaaccagaacgaggagacaataacttgactcggattgtgggaggacaggagtgcaaagacggagagtgcccgtggcaagcgttgctgatcaacgaagaaaacgaaggattctgcggcggcactatcctgtcggagttttacatcctcactgcggcccactgtctgtaccaagcgaaacgcttcaaggtccgcgtgggcgaccgcaacacggagcaagaagagggaggagaagccgtgcacgaggtggaggtggtgataaaacacaacaggtttactaaggagacgtacgatttcgatattgcagtgctgcggctcaagacccctatcacttttcggatgaatgtggcgccagcttgcctcccagaacgggattgggcagaatcgaccctgatgacccaaaagaccggaatcgtgtccggattcggacggacccatgagaaaggacgccagtccactcgcctgaaaatgcttgaggtgccctatgtggacagaaattcgtgcaagctgtcctcgtcgttcatcatcactcagaacatgttttgtgctggttacgacaccaagcaggaagatgcttgccagggagactcggggggcccgcacgtcaccagattcaaagatacttatttcgtcactggcatcgtgtcatggggagaaggatgtgcgcgcaagggaaagtacggaatctacactaaggtgactgcttttctcaaatggatcgatcggtcgatgaaaacccgcgggctgccgaaggcaaaaagccacgccccagaagtgatcacctcttccccactgaaa

SEQ ID NO: 9285 - DNA, 1464 bp, synthetic construct
  misc_feature 1..1464: note = source = /note="Description of Artificial Sequence: Synthetic coding sequence"
  source 1..1464: mol_type = other DNA
atgggaagacccttgcacctagttttattgtccgcctctctggccgggcttcttcttctgggcgagagtttgttcatcagaagagagcaggcgaataacattctcgccagggttacgagagcaaactccttcctggaagagatgaagaaaggtcacttggaacgtgagtgtatggaagaaacatgctcatacgaggaagcacgcgaagtgttcgaagactccgataaaacaaacgaattttggaataaatataaagatggagaccagtgtgagacttcaccctgtcagaaccaggggaagtgcaaggatggccttggcgagtatacatgtacctgcctggagggttttgagggcaagaactgcgaactgttcacaagaaagctgtgttccctagacaatggggattgtgaccagttctgccatgaggagcagaattcagtggtgtgttcttgtgcccgagggtatacactggcagacaacgggaaggcgtgcatccccacagggccttatccctgtggtaagcagactctggaacgtagaaaaaggtccgtggcacaggctacatcttccagcggcgaagctccagactccatcacctggaaaccctacgatgccgctgatctggatcccaccgagaaccctttcgacctcctggactttaatcagacacagcccgaaaggggggataacaatctcacacgaatagtgggcgggcaagaatgcaaagatggtgagtgcccttggcaggcactgcttattaatgaagagaatgaaggattttgcggcgggactatcctgagcgaattttacatccttactgccgcccactgcctctaccaagcgaagagatttaaggtccgggtcggtgatcgaaacacagaacaggaagaggggggggaggccgtccatgaagtcgaggtagttataaaacataaccggttcactaaggaaacatatgactttgatattgctgtgctgagactgaaaacacctattaccttccgaatgaatgtggctcccgcttgtctacctgagagggattgggcggaatctacactgatgacgcagaaaacaggaatagtctctgggttcggccgtacacatgagaaagggaggcagtccactaggctcaagatgctggaagtaccttacgtggaccgaaattcttgcaagttgagcagtagttttatcattacacagaatatgttctgcgctggctatgacacgaaacaggaggatgcttgtcagggcgactcaggaggcccccacgtaacacgctttaaggatacgtacttcgtgacgggaattgtctcatggggagagggatgcgcaagaaagggcaagtacgggatctacacaaaagtaacggcgttcttgaaatggatcgaccgctcaatgaaaacaagaggactgcctaaagcaaagtcacacgctcccgaggtcataaccagctcacccctcaag

SEQ ID NO: 9286 - DNA, 1464 bp, synthetic construct
  misc_feature 1..1464: note = source = /note="Description of Artificial Sequence: Synthetic coding sequence"
  source 1..1464: mol_type = other DNA
atgggtagaccactccatctggtccttctctcagcatcacttgctggcctgcttcttctcggagaatcacttttcatcaggcgcgaacaagccaacaacatcctcgcacgggtcaccagagcaaactcatttcttgaagaaatgaagaagggtcacttggagagggagtgtatggaggagacttgctcgtacgaagaagcaagggaggtgtttgaggactccgataagaccaatgaattttggaacaagtacaaggacggggatcaatgcgaaacctcaccatgtcaaaaccaaggcaagtgtaaggatgggctcggtgaatacacctgcacttgtctggaaggtttcgaaggaaagaattgcgagttgtttaccagaaagctgtgttcgctggataatggagattgtgaccaattttgtcatgaagaacagaactccgtcgtgtgctcctgtgcaaggggttacacgctggccgacaacggaaaagcatgtattcccaccggaccatacccatgcggaaagcagacgctggaacggagaaagcgttcggtcgcacaagctacctcgtcatccggcgaggcgcctgatagcatcacctggaagccatacgatgcagccgacctcgacccgactgagaatcctttcgacctgcttgatttcaaccaaacccaacccgagagaggcgacaataatctgacccgtattgtcggaggacaggagtgtaaggacggtgaatgcccgtggcaggcgctgcttatcaacgaagaaaacgagggtttttgtgggggcacgattctctccgaattctacatacttactgccgcccattgtctctaccaggcaaagagatttaaggtgagggtgggtgaccgcaacactgaacaagaggaagggggcgaagctgtgcatgaagtggaggtcgtcataaagcataatagatttaccaaagagacttacgactttgatattgccgttctgcggcttaaaacgcctatcacctttagaatgaacgtcgcacccgcatgtctgcctgagcgagattgggccgaatccactcttatgacccaaaagaccggaattgttagcgggtttggaaggacccatgagaagggaaggcagagcacccggcttaagatgctcgaggtcccatacgtcgaccgcaactcgtgtaaactcagctcctcgttcattatcacgcagaatatgttttgcgcaggttacgacaccaaacaggaggatgcctgccagggagattccgggggtccacatgtgactagatttaaggatacctacttcgtgactggaattgtgtcgtggggagaaggttgcgctagaaagggaaagtacggtatctacaccaaggtcaccgcatttcttaagtggattgaccgaagcatgaaaacgcgcggactcccaaaggcaaagtcgcatgcgcctgaggtgattaccagctcgcccttgaag

SEQ ID NO: 9287 - DNA, 1464 bp, synthetic construct
  misc_feature 1..1464: note = source = /note="Description of Artificial Sequence: Synthetic coding sequence"
  source 1..1464: mol_type = other DNA
atgggacgaccgctccatctggtgctgctctcggcttcgctcgccggcctgctgctcctcggggaaagcctgttcatccggagagaacaagcaaacaacatcttggctcgcgtcactcgggccaacagcttcctcgaagagatgaagaaaggtcatctggagagagaatgcatggaagagacttgctcctacgaagaggcaagggaggtgttcgaggatagcgacaaaaccaacgagttctggaacaaatacaaggatggcgatcaatgcgaaacttcgccttgccaaaaccagggaaagtgtaaggacggactgggtgagtatacctgcacctgtctggaagggtttgagggtaagaattgcgaactttttactagaaagctgtgctcgctggataatggggactgcgaccagttctgccacgaagagcagaactcggtggtgtgctcttgcgcgaggggatacaccctggctgacaacggaaaggcatgtatccctaccggtccatacccatgtggaaagcagactcttgaacggcggaagagaagcgtggcgcaagcgacttccagctccggggaagccccagactcaatcacttggaagccatacgacgccgccgatctggacccgacggaaaatccgttcgacctcctggactttaatcaaacccagccggagagaggggataacaacctgactcgaatcgtcggcggacaagagtgtaaagacggcgagtgcccgtggcaggcgcttttgattaacgaggaaaacgagggattttgcggtggaacgattctctcagagttctacatcctgactgccgcgcactgcctctaccaggcaaagcgcttcaaggtgagagtgggagatcgcaacactgaacaggaggaaggaggtgaggctgtgcacgaggtggaagtggtcatcaagcataatagattcaccaaggaaacttacgacttcgatattgccgtcctgaggttgaaaaccccgattaccttccgcatgaacgtggccccggcctgcctgccagaaagagactgggcggaaagcaccctcatgactcagaaaaccggaatcgtgtcaggcttcggaaggacccatgagaagggtcgccaaagcacgcggctgaagatgctcgaagtgccatacgtcgatcggaactcctgcaagctgtcgtcctcgttcatcattacccagaatatgttctgcgccggatacgacaccaaacaggaggacgcatgccagggagatagcggcggaccgcacgtcacccggttcaaagatacttacttcgtcaccggcattgtgagctggggtgagggctgtgcaaggaagggaaagtacggtatatacaccaaggtgactgcctttctcaaatggatcgaccgctctatgaaaacgcggggactgccgaaggccaaatcccacgctccggaggttatcacctcttcaccgttgaaa

SEQ ID NO: 9288 - DNA, 1464 bp, synthetic construct
  misc_feature 1..1464: note = source = /note="Description of Artificial Sequence: Synthetic coding sequence"
  source 1..1464: mol_type = other DNA
atgggtagacccttgcatcttgtgcttttgagcgcctcgttagccggcttgttgctccttggtgagagtctgtttattcgcagggagcaagcaaacaatatcttggcccgtgttacgcgagccaacagctttctggaagaaatgaagaagggccatttggaacgcgagtgcatggaagagacatgctcttacgaagaggcccgagaagtttttgaggacagtgacaaaacgaatgaattctggaacaagtacaaagatggagatcagtgcgagacttccccctgccaaaaccaggggaagtgcaaagatggtttaggcgagtacacctgcacttgtctggagggcttcgaagggaaaaactgtgagctgttcacacgaaagctgtgctcgctcgataacggcgattgcgaccaattctgtcatgaggagcagaacagcgtggtttgctcgtgtgcccgcggctacaccctagccgataacggaaaggcctgcatccccactggtccatatccgtgtggcaagcagaccctggagcgcagaaagcgctccgtggcgcaagctacatcgtcgtccggcgaagcgccggattccattacgtggaaaccctatgacgccgccgatcttgaccccaccgaaaacccgttcgatctgctggactttaaccaaacacaaccggagcgtggggataacaacctgactcgtattgttggcggccaggagtgcaaggatggagagtgcccctggcaggccctgttaataaacgaagagaacgagggattttgcggaggcaccattttgtcagagttttatatcctgacagctgctcactgtttgtatcaggcaaagcgatttaaggtgcgagtgggcgaccgaaatactgagcaagaggaaggcggagaggccgtccatgaggtggaggttgtgatcaagcataaccggtttaccaaggagacctacgacttcgacatcgccgtgttgagactgaaaacgcccattacgttcaggatgaatgtggctccagcttgcctcccagagagggattgggcggaatcgaccctgatgacccaaaagaccggcattgtttccggcttcggacgcacacatgaaaagggacgccaatcgacccgcctgaagatgctcgaagtgccctacgtggatcgaaatagctgcaagctatcgtcgagtttcatcatcacccagaacatgttctgcgcgggatatgatacaaaacaggaggatgcatgccagggggatagcggaggaccccacgtgacccgcttcaaggacacgtatttcgtcactggtatcgtctcttggggcgagggttgcgccaggaaggggaagtatggtatctacactaaggtgacggcattcctcaagtggattgaccgctcgatgaagacccgcggacttcccaaggccaaaagccacgccccggaggtgattacctcctcccctctgaaa

SEQ ID NO: 9289 - DNA, 1464 bp, synthetic construct
  misc_feature 1..1464: note = source = /note="Description of Artificial Sequence: Synthetic coding sequence"
  source 1..1464: mol_type = other DNA
atgggccggccgctgcacttggtgctcctgtccgcctcactcgcagggctgttactgctcggagaatctttattcatccggagggaacaggccaataacatactggccagagtgacgcgcgctaacagttttctcgaagaaatgaagaaggggcatctggagcgtgaatgtatggaagagacctgttcttacgaggaggcgcgtgaggtgtttgaggactcggataagaccaatgagttctggaataaatataaagatggtgaccagtgtgaaacctccccttgtcaaaatcaaggtaaatgtaaggatggcctgggtgaatacacttgcacatgtttggaggggtttgaggggaagaattgtgaactatttaccaggaagctatgctccctggacaacggcgactgcgaccaattctgccacgaggagcagaactcggtcgtatgctcttgcgccaggggatacactctcgctgacaacggaaaagcctgcattccgacagggccgtacccctgtggcaaacagaccctggaacggcgcaaacggtcagtggcccaggctactagttccagtggcgaggcccccgattctattacttggaagccatacgatgcggctgacctggacccaactgagaaccctttcgacctattagacttcaaccaaacccagcccgaaagaggtgacaataatctgacgcgcatcgtgggaggccaggagtgcaaggacggcgagtgtccctggcaggccttattgatcaacgaggaaaatgaagggttttgtggaggcacaatcttgagcgagttttatatcctgacagcggcgcattgcttgtaccaggcgaagcggtttaaagtgcgtgtgggggatcggaatactgagcaggaggagggcggagaggctgtgcacgaagtagaagtcgtaataaagcacaaccggttcactaaagaaacctatgacttcgatattgctgtgctgagattgaaaacccctattacttttagaatgaacgtcgcccctgcctgcctgccagagcgcgattgggccgagagtaccttgatgactcagaagactggaattgtcagcggttttggtaggacgcatgagaaggggaggcagtcgacccggctgaaaatgcttgaagtaccctacgtggatcgtaacagttgtaagctatcaagctccttcattatcacccagaatatgttctgtgccggctacgacaccaagcaggaggacgcttgccaaggggactccggtggtcctcacgtgactagatttaaggacacttattttgtgacgggaattgtgagttggggagaaggctgtgctcggaaggggaaatatgggatatacacgaaggtcaccgcatttctgaagtggatagatcgatcgatgaaaacgaggggcctcccaaaggcaaaaagtcacgcccccgaggtgatcacgtcgtccccactgaag

SEQ ID NO: 9290 - DNA, 1464 bp, synthetic construct
  misc_feature 1..1464: note = source = /note="Description of Artificial Sequence: Synthetic coding sequence"
  source 1..1464: mol_type = other DNA
atgggacgccctctacacctggttctgctcagcgctagtctggccgggctgttgctgctcggggagtctctgtttatccggagagagcaggcgaacaacattctggctagggtcacccgcgcgaattccttccttgaagagatgaagaaggggcatctggagcgcgaatgcatggaggagacctgctcctacgaagaagccagggaagtgttcgaagactcagataagacaaacgagttttggaataagtacaaagatggggatcagtgtgaaacatcaccatgccaaaatcaaggtaaatgtaaggatgggctcggcgaatacacctgcacctgccttgaaggcttcgagggaaaaaactgcgagcttttcacacggaagttgtgcagtctggacaacggtgattgcgaccagttttgccacgaagagcagaactctgtagtatgtagctgcgctagaggatatactctcgctgacaacgggaaagcctgtattcccaccgggccatatccatgtggcaaacagaccctggagaggaggaaacggtctgtggctcaggcgacaagttccagtggtgaggcacccgattctataacatggaagccatatgacgccgcggacctggatccaacggagaaccccttcgacctcttagactttaatcaaactcagccagagaggggtgacaataacctcaccagaattgtggggggccaggagtgcaaagacggagagtgcccctggcaggccctgctgatcaatgaggaaaatgagggtttttgtgggggcaccatcctcagcgagttctacattctgaccgccgcccactgtctctaccaagcaaagcgatttaaggttcgcgtcggagaccgcaacaccgagcaggaagaggggggcgaggcagttcacgaagttgaggtcgtgatcaaacacaatagattcactaaggaaacatatgactttgacatcgctgttttacggctcaagactcccatcaccttccggatgaacgtggcccctgcttgcttgcccgagcgggattgggctgaatctacccttatgacacagaaaacgggaattgtttctgggttcggccggacacacgaaaaaggtcgacagtctaccagactcaaaatgctggaagttccttacgtggatcgaaactcatgtaagctgtcatctagttttatcatcacccagaatatgttctgtgctggatacgatacaaagcaggaagacgcgtgccagggggattcaggaggccctcacgttactcggttcaaggacacgtacttcgtcaccggcattgtcagctggggcgagggctgcgcccgaaagggtaaatatggaatttatacgaaggtcactgcgttcctgaaatggatcgatcggtctatgaagaccagaggattgccgaaagcaaagtctcacgcccctgaagtgataaccagctctcctttgaag

SEQ ID NO: 9291 - DNA, 1464 bp, synthetic construct
  misc_feature 1..1464: note = source = /note="Description of Artificial Sequence: Synthetic coding sequence"
  source 1..1464: mol_type = other DNA
atgggaagacctttgcaccttgtcttgttgagtgctagtcttgccggtttactcctgttgggtgagtcactgtttatcagacgggagcaagcaaacaacatacttgccagggtgactcgggctaactccttcctggaggagatgaaaaagggacatttagagcgcgagtgcatggaggagacatgttcctacgaagaggcgagagaggtctttgaggattccgataaaaccaatgaattttggaataaatacaaagacggagatcaatgtgaaacctccccttgtcaaaaccagggaaaatgtaaggacggactgggcgagtacacctgcacatgtcttgaaggatttgaaggaaaaaactgtgagctgttcaccaggaaattgtgttctctggacaacggagactgtgatcagttttgccatgaagagcagaacagtgttgtctgcagctgcgcgcggggttatacacttgccgataacggaaaagcgtgcatccctaccggcccttacccttgcggcaaacaaacccttgagagacgaaagagatctgtggctcaggcaaccagcagctcaggagaagctccagactcaataacgtggaagccatatgatgcagctgatctcgacccaacagagaacccttttgatctgctcgacttcaatcaaactcaaccggaacggggcgataataatttgactcggatcgtgggtggacaagaatgtaaggacggggaatgtccgtggcaggctctgctgatcaacgaggagaacgagggcttctgcggaggcaccatcctctcggagttctacatcttgactgctgcacactgtctttaccaggcaaagcgctttaaagtgagagtaggagaccggaacaccgaacaggaagagggcggagaggccgtgcacgaggtcgaagtggttattaagcacaacagatttacaaaagagacctatgacttcgacatagctgtcctcaggctgaaaacccccatcacatttagaatgaacgtggcgcctgcttgcctgccagagcgtgactgggccgagtctaccctgatgacccaaaaaactggcatcgtgtctgggtttggaaggacccatgaaaagggccgtcagagcacacgcttgaaaatgctggaggtaccctacgtggacaggaactcctgcaaattgagttcaagctttattattactcagaacatgttctgtgctggatatgacacaaaacaggaagatgcttgccagggcgattccggaggccctcacgtcactaggttcaaggacacttatttcgttaccggcatcgtaagctggggtgaaggctgcgcccggaagggaaagtacgggatatatactaaggtgactgcttttctcaaatggattgatagaagcatgaagacaaggggactccctaaggctaagtcacacgcccctgaggtgatcaccagcagtccactcaaa

SEQ ID NO: 9292 - DNA, 1464 bp, synthetic construct
  misc_feature 1..1464: note = source = /note="Description of Artificial Sequence: Synthetic coding sequence"
  source 1..1464: mol_type = other DNA
atggggaggccgcttcatctggtgttgctctccgcgtcgctggctggactcttgctgcttggggaatcgttgttcattaggcgcgagcaagccaataacatcctggcccgggtgactcgtgccaattcgttcctggaagaaatgaagaaaggtcaccttgagagggaatgcatggaggaaacgtgttcgtacgaagaagctcgggaggtgtttgaggactccgacaaaacgaacgaattctggaacaagtacaaggacggtgatcagtgcgagacttcaccatgccagaaccaaggaaagtgcaaggatggactgggggaatacacctgcacctgtctggagggcttcgagggaaagaactgcgagctgtttacccgcaaactgtgttccttggacaacggcgactgcgatcaattctgccacgaagagcagaattcggtcgtgtgttcctgtgcacgcggttacaccctcgcggataacggaaaggcctgcatccctactggtccctacccctgcggcaagcaaaccctggagcgacgcaagcggagcgtcgctcaggccaccagtagctctggagaagcgccagattcaatcacctggaaaccatatgatgccgcagatcttgatcctacggaaaatccattcgacctgctggatttcaatcagacgcaaccggaacgcggcgacaacaatctcactagaatcgtgggaggacaggaatgcaaagacggtgaatgcccgtggcaggcgcttctgatcaacgaagagaacgaaggtttctgcggaggaactatcctgtccgagttttacattctgacggccgctcattgcctctaccaggccaaaaggtttaaggtccgcgtgggtgaccgcaacactgagcaggaagagggaggagaggcagtgcatgaagtagaggtggtgattaagcacaacagattcactaaggaaacttacgatttcgatattgctgtgctccggctcaagacccctatcactttccgaatgaatgtcgcgccggcttgcctgcccgaacgcgactgggccgagtctactctgatgactcaaaaaaccgggatcgtgagcggcttcggaagaacccacgagaagggccgccaatcaacgagactcaaaatgctggaagtgccgtatgtcgacaggaacagctgcaaactttcatcctcgttcatcatcacccagaacatgttttgcgcggggtacgacaccaagcaagaggacgcctgtcagggagactccgggggacctcacgtcaccagattcaaggacacgtacttcgtgactggaatcgtcagctggggcgagggctgtgcgcgtaaggggaagtacggaatctacaccaaggtgaccgccttcctgaagtggatcgaccggtccatgaaaaccagaggcctcccgaaagcaaagagtcatgccccggaagtaataactagcagccccctcaag

SEQ ID NO: 9293 - DNA, 1464 bp, synthetic construct
  misc_feature 1..1464: note = source = /note="Description of Artificial Sequence: Synthetic coding sequence"
  source 1..1464: mol_type = other DNA
atgggccgcccgctgcacctggtgctcctctcagcatctctggctggactgttgttgcttggagagtccttgttcattaggagggaacaggcaaataatatactcgctagagtgacacgcgctaacagcttcctcgaagaaatgaaaaagggtcatttggaaagagaatgtatggaggagacatgcagctatgaggaggcccgcgaagtcttcgaagactctgacaagactaacgagttctggaataaatacaaggatggtgatcagtgcgagactagcccttgtcaaaaccagggcaagtgcaaggatggactgggagagtacacttgtacatgcctggagggatttgagggtaagaactgcgagctttttactagaaaactctgtagcctcgacaacggtgactgtgaccaattctgccacgaagagcagaactccgtcgtgtgttcatgcgccagaggttacaccctggcagacaatggtaaagcctgcattcccactggcccttacccgtgcggaaagcaaaccctcgaaagaaggaaacgctcagtggcccaagccacatcaagttctggcgaggcccctgactcaattacttggaagccatacgatgctgcagacctggacccaacagagaatcctttcgacctgttggacttcaatcagacccagcccgagagaggagacaacaatcttacacgcatcgtaggcggtcaagaatgtaaagatggcgagtgcccatggcaagctctgttgataaatgaggagaatgaaggtttttgcggaggaaccattctttctgagttctatatcttgacggcggcccattgcctctaccaagccaaaaggtttaaagtaagagtcggcgaccgcaataccgaacaggaagagggtggcgaggctgtacatgaagtggaggtggtcattaaacataaccgctttaccaaggagacctacgacttcgatatcgccgtactgaggctgaagactccaatcacattcagaatgaacgtggcaccggcttgcctgccagagcgcgactgggctgagagcaccctgatgactcagaagaccggtattgtctccggcttcggtcgcacccatgagaagggaagacaatctaccagactcaagatgctggaggtcccctacgttgacaggaactcatgtaagctgagctcatcatttatcatcacccaaaatatgttctgtgctggctatgatactaagcaggaagacgcttgccaaggcgatagtggtggtccccatgttacccgctttaaggacacttatttcgtgaccggaatagtgagttggggtgagggctgcgcacgcaaaggcaagtatggcatctacacgaaggttacggcttttctgaagtggatcgataggtccatgaaaactagaggattgccaaaggccaagagccacgcgcctgaggttataacatccagccccctgaag

SEQ ID NO: 9294 - DNA, 1464 bp, synthetic construct
  misc_feature 1..1464: note = source = /note="Description of Artificial Sequence: Synthetic coding sequence"
  source 1..1464: mol_type = other DNA
atgggccggcctctgcacttggtcctgttgtcagcatcccttgcaggtcttctgctgcttggggaaagcctttttattcgtcgggagcaggctaataacatcctcgcgcgcgttacccgggctaactctttcctggaggagatgaagaaagggcacttggagcgcgaatgcatggaggaaacatgttcctacgaggaggccagggaggtgttcgaggactcagacaaaacaaatgagttttggaataagtataaggatggggatcagtgcgaaactagtccttgtcagaaccagggcaagtgcaaagacggactcggagaatacacttgcacgtgcttggagggcttcgagggcaagaactgcgaactgtttactagaaaactgtgttccttggacaacggagactgcgaccagttctgccacgaggaacagaactctgtcgtgtgttcctgcgcacgcgggtatacactcgctgataatggcaaagcgtgtattccaaccggcccatatccttgcggaaagcagactctagagagaaggaagaggtcagttgcgcaggcaaccagctcttccggcgaggcaccggatagcattacctggaaaccttacgatgccgcggatctcgacccgacggagaacccattcgatttgcttgattttaaccagacccagcctgaaagaggggataacaatctcacacgtattgtcggaggtcaggagtgcaaggacggagaatgtccttggcaggcccttttaatcaacgaagagaacgaaggtttttgtggcggcaccatcctgtcagagttctatatcttgactgccgcacactgcctctaccaggcaaagaggttcaaggttagagtcggcgaccgcaacaccgagcaggaagaaggaggggaggcagtccatgaagtcgaggtcgtgatcaagcataacaggtttaccaaggagacctatgactttgacatcgccgtactaaggctcaagaccccgataaccttccgcatgaatgtcgctcctgcttgcctgcccgaacgggactgggctgagtccactctgatgacccagaagactggcattgtaagcggctttggacggacacacgaaaaggggcgccagagtacaaggttaaagatgctggaagtgccttacgtggatagaaattcatgtaaactctccagcagttttatcatcactcagaatatgttctgcgcaggttatgacacgaaacaggaggatgcatgccaaggggattcaggtgggccccacgtgactcgtttcaaggacacttacttcgttaccggaattgtaagttggggcgagggttgcgcaaggaaaggtaagtatggcatttatactaaggtgactgcgttccttaagtggattgatcggagcatgaaaactagaggtctgccgaaggccaagtcccacgcgcctgaagtgattactagctcccccctcaaa

SEQ ID NO: 9295 - DNA, 1464 bp, synthetic construct
  misc_feature 1..1464: note = source = /note="Description of Artificial Sequence: Synthetic coding sequence"
  source 1..1464: mol_type = other DNA
atggggcggcccctccacctggtgttgttgagcgcttcgctggccggactgctgcttcttggagaaagcctcttcatccggagggaacaagcaaacaacattctggctcgcgtcactcgagccaacagctttctggaagagatgaagaagggccatctcgaacgggaatgcatggaagaaacgtgctcatacgaagaagcccgcgaggtgtttgaggatagcgacaaaactaacgagttctggaacaaatacaaggacggagatcaatgcgaaacttcgccttgccaaaaccaaggtaaatgcaaggatgggctgggagaatacacgtgcacctgccttgaaggattcgagggaaagaattgtgagctgtttactcggaagctctgctcattggataatggagactgcgatcagttctgccacgaggaacagaattccgtggtctgttcctgcgcgcgcggatacaccctggcggataacggcaaggcctgcatccctacgggtccttacccatgtgggaaacagacccttgagaggaggaagcgctcagtcgctcaggctacttcttcgtccggagaagcccctgattcaatcacttggaagccatacgacgcagccgacctcgacccgaccgagaatccgtttgacctcctcgacttcaaccagacccagcccgaacgcggagataacaatcttacccggatcgtcggcggacaggaatgcaaagacggtgaatgtccttggcaggccctcttgataaacgaagagaacgaaggcttctgcggagggaccatcctgtccgagttctacattctcactgcagcccattgcttgtaccaagccaagcggttcaaagtgcgggtgggcgacagaaataccgaacaagaagaaggaggggaagcagtgcatgaggtggaagttgtgatcaagcacaacagatttaccaaggagacttatgacttcgacatcgcggtcctgagacttaagactccgatcactttccgcatgaacgtcgcaccggcatgtctgccggaaagggattgggccgagtccacccttatgacgcagaaaactggaatcgtctccggattcggccggactcatgagaagggaaggcagagcactcggttgaagatgctcgaggtgccgtatgtcgatcgcaattcatgcaagctgtcatcatcttttatcatcacccagaatatgttttgcgcaggatacgataccaagcaggaagatgcgtgccaaggagacagcggtggtccccacgtgacccggttcaaggatacttatttcgttacgggaattgtctcgtggggagaaggatgtgcgagaaaaggaaagtacggtatctacaccaaggtgaccgcattcctgaaatggattgatcggtccatgaaaacgagaggcctgcccaaagcgaaatcccacgctccagaggtcatcaccagctcgccactgaag

SEQ ID NO: 9296 - DNA, 1464 bp, synthetic construct
  misc_feature 1..1464: note = source = /note="Description of Artificial Sequence: Synthetic coding sequence"
  source 1..1464: mol_type = other DNA
atgggacggcctctgcacctagtattgctgtccgcctctcttgcaggactcctgctgctgggggagagcctattcatcagacgcgagcaagccaataatattctcgcccgggtcacacgggcgaattcatttctcgaggaaatgaaaaaggggcacctagagcgcgagtgcatggaggaaacttgtagttacgaagaggctcgagaggttttcgaagacagcgataagacaaatgagttttggaataaatataaggacggcgaccagtgtgagacaagcccttgccaaaatcagggaaaatgcaaggacggcctcggggagtacacctgtacctgtttggaaggctttgaggggaaaaattgtgaactattcacaaggaagctctgcagccttgataatggagattgcgatcaattttgtcacgaggagcagaatagcgtggtctgttcttgcgctcgggggtatacgctggccgacaacgggaaagcatgcattccaacaggtccctatccttgtggcaagcaaacactagaacgccgcaagcggtcagtggcccaggccactagctctagcggtgaagctcccgacagtatcacttggaagccctatgacgccgccgatctcgacccaactgagaaccctttcgacctgttggatttcaatcagacccagccggaacgaggtgacaacaacctgacacggatcgtcgggggacaggagtgtaaagatggggagtgcccttggcaggccctcttgattaacgaggaaaatgaagggttctgcggcggcacgatactttctgaattctacatacttaccgccgcacactgtctatatcaagccaaacgcttcaaagtgcgtgtgggtgatagaaacacagagcaagaagagggcggcgaagccgttcatgaagtggaagttgtgatcaagcataaccgcttcacaaaggaaacctacgatttcgatattgccgttctacggctcaagactccgattaccttcaggatgaacgtagcaccggcttgtttgccggagcgtgattgggcggaaagcactctgatgacccagaagacgggaatagtttcaggatttggaaggactcatgagaaaggacgccagagtaccaggctgaagatgctggaagtgccttatgtcgatcgcaattcatgcaaactctccagctcttttatcattacgcagaatatgttttgtgctggctatgacactaagcaggaagatgcctgccagggggatagcgggggcccacatgtcactaggtttaaggacacatacttcgtcaccggcatcgttagctggggagaaggctgtgcgcgaaaggggaagtacggaatttacactaaagtgaccgcgttcctgaagtggatagatagaagcatgaagacacgcggtctgcccaaggcgaaatcacacgctcctgaggttatcaccagttctccactcaaa

SEQ ID NO: 9297 - DNA, 1464 bp, synthetic construct
  misc_feature 1..1464: note = source = /note="Description of Artificial Sequence: Synthetic coding sequence"
  source 1..1464: mol_type = other DNA
atgggaagaccattgcatctggtactgctcagcgctagcctggcaggcctgctcctactgggtgaaagcctgttcattaggcgagaacaggccaacaatattctggctcgggtcacacgggctaatagctttctggaagaaatgaagaaaggccaccttgaacgggagtgtatggaagagacttgttcatacgaagaggcacgagaagtctttgaggacagcgataaaaccaacgaattttggaacaaatacaaggacggcgaccagtgtgaaaccagcccatgccagaaccaagggaaatgtaaggacggcctcggagagtatacatgtacgtgcttggaaggttttgaggggaagaattgtgagctgtttacacgtaaactgtgttcgctggacaacggggactgcgaccagttttgccatgaggaacagaattccgttgtctgttcatgcgccagaggatacaccctggctgataatggcaaagcttgtatcccaacgggtccgtatccttgtggaaagcagaccttagaaagacgaaaacggagcgtggcccaggcaacgtcttccagcggagaggcacctgattctattacctggaagccctatgacgcagcggacctagatccgaccgagaatccattcgacctactcgatttcaaccagacccagcctgaaagaggagacaataatcttactcgcattgtgggtggacaggaatgtaaggatggcgagtgtccttggcaagctctgttaatcaacgaggagaatgagggattctgcggcgggaccatactgagcgagttttatatcttgaccgcagctcattgcttataccaggccaaacggtttaaggtccgggtcggtgatcgcaacactgagcaagaggaggggggggaggccgtacatgaagtcgaagtcgtcattaaacacaaccgttttacaaaagagacctatgatttcgacatcgcggtgctgaggctcaaaacaccaattacattccggatgaacgtggctccagcttgtctgcccgagcgggactgggctgagtcgacactaatgacacagaaaacgggcatcgtgtcaggcttcgggcgcactcacgaaaagggtcgacagagtactaggttaaagatgctcgaggttccatatgtcgaccgaaactcttgtaaattgagctcatccttcatcatcacgcagaacatgttctgcgctggatatgacaccaagcaggaggatgcttgtcagggggatagcggtggaccccatgtgacaaggttcaaggacacgtacttcgttacgggaattgtgagttggggcgagggatgcgcaagaaagggcaagtacggcatctatacgaaggtaactgccttcctgaaatggatcgaccgctcaatgaaaactcgaggcctacccaaagcaaaaagccacgccccagaggtgatcacatcctctccactgaag

SEQ ID NO: 9298 - DNA, 1464 bp, synthetic construct
  misc_feature 1..1464: note = source = /note="Description of Artificial Sequence: Synthetic coding sequence"
  source 1..1464: mol_type = other DNA
atgggccggcccctgcatttagtcttgttgagtgcctctctggctgggcttctcctgttgggagagtctctgttcatcagacgtgaacaggcaaacaacatccttgccagagtgacacgagccaatagcttcctcgaagaaatgaagaagggacacctggaacgcgagtgtatggaggagacctgctcctatgaagaagccagagaggtcttcgaagactctgacaaaactaacgagttctggaacaagtacaaggacggagaccaatgcgaaacatccccctgccagaatcagggaaaatgtaaagatggcctgggggagtacacatgtacatgcctggagggctttgagggaaaaaattgtgagctgtttactcggaaactttgtagcctggataacggagactgcgatcagttttgtcatgaagagcagaatagcgtggtgtgttcgtgtgcacgcggctacacactcgccgacaatggcaaggcgtgtatcccaaccggcccatatccttgtgggaagcagacgttagaaaggagaaaacggtccgtggcccaagctactagctccagcggggaggccccggattctattacttggaaaccttacgacgctgccgatctagatccaacagaaaatccctttgacctcttggatttcaaccaaactcagcccgagcggggcgataataacctcactagaattgtgggcggacaggagtgtaaagacggcgagtgtccgtggcaggccttgttgatcaacgaagagaacgagggtttttgtgggggtactatcctcagcgagttctatatcttgaccgcagcccactgtctgtaccaagctaagagattcaaagtgagagtaggcgatagaaacactgaacaggaggaaggaggggaggccgtacacgaggttgaggtggtgattaagcacaaccggttcaccaaagagacatatgatttcgatattgcagtattacgcttgaagaccccaatcacttttaggatgaacgtggctcctgcctgtttaccagagagggactgggcagaatccactctgatgacgcagaagaccggtatagtttcagggttcggcaggacccatgaaaaaggacggcaatccactcgattgaagatgttggaggttccctatgttgataggaactcttgtaagctatcctcgagttttatcatcactcaaaatatgttctgtgccgggtacgacactaagcaggaagatgcttgccagggggattctgggggaccccatgtgaccagattcaaagatacgtatttcgtgacggggatcgtgagctggggcgaaggctgcgcccgtaagggtaagtatgggatctatactaaggtgacggccttcctaaaatggatagatcggagtatgaagactaggggcctcccgaaagcaaaatcgcacgctccagaggtgatcacaagttccccactgaaa

SEQ ID NO: 9299 - DNA, 1464 bp, synthetic construct
  misc_feature 1..1464: note = source = /note="Description of Artificial Sequence: Synthetic coding sequence"
  source 1..1464: mol_type = other DNA
atgggtcgacccctgcatctcgttcttttgagtgcatctctggctggcctgctgctgctgggcgagagcctgtttatccggagggaacaagcaaataacattctcgcccgagtcactagggccaatagctttctggaggaaatgaagaagggacaccttgagcgcgaatgtatggaagaaacgtgtagctacgaagaggcaagagaggtgttcgaggactccgacaaaaccaatgagttctggaataagtacaaggatggcgaccagtgtgagactagcccatgccagaatcagggtaaatgcaaagatggattgggggagtacacgtgcacctgcttggaaggctttgagggcaagaactgcgagctgtttacccgcaagctctgctccctcgacaacggggattgcgaccaattttgccatgaggaacagaactccgttgtttgcagctgcgcaaggggctatacactcgcggataacggtaaggcctgcatcccaaccggaccctacccctgcggtaagcaaacattggagagacgtaagcgctcagtggcccaggctacctcctcgagtggggaggctccagactccattacgtggaagccatacgatgcggccgacctggacccaacagagaacccattcgatctcttggacttcaaccaaacccagccagaacgtggagataataacctgacaagaatcgtgggcgggcaggagtgtaaggacggcgagtgcccgtggcaagctttgttgataaacgaggaaaacgagggattctgcggtggtaccatcttgagtgagttctacatcctgacggccgcccattgtctctatcaggctaagcgattcaaagtccgcgtaggcgatcggaacacagagcaagaagagggcggcgaagctgtccacgaggtggaggtcgtcatcaaacataacaggttcacgaaggagacttatgacttcgatatagctgtcctacgactgaagacacccataacctttaggatgaatgtggctcccgcttgtcttcctgagagagattgggctgagtcgaccttgatgacccagaaaaccggaattgtgtctggattcgggagaactcacgagaaaggccgacagagcactagactgaaaatgttggaggttccttatgtggaccgtaattcttgcaaacttagcagctcattcattatcactcaaaatatgttctgtgccgggtatgacacaaagcaggaggatgcctgtcagggggattccggcgggccacacgttactaggtttaaggacacctacttcgttactggcatagtatcttggggcgagggatgcgccaggaaggggaaatatggaatttatacaaaagtcaccgcctttttgaaatggatcgatcgatcaatgaagacacgggggctgcccaaggccaagtcccacgcacccgaagtgatcacaagtagtcccctcaaa

SEQ ID NO: 9300 - DNA, 1464 bp, synthetic construct
  misc_feature 1..1464: note = source = /note="Description of Artificial Sequence: Synthetic coding sequence"
  source 1..1464: mol_type = other DNA
atgggtagaccacttcacttagtactattgtccgcaagtctcgcaggcctattgcttcttggtgaatcattgttcatcaggcgggaacaggcaaacaatattctcgctcgggtgactagggctaactcctttttggaagagatgaagaagggtcatttggaaagagaatgcatggaggaaacctgctcctatgaggaggcaagagaagtgttcgaagatagcgataagaccaatgagttctggaacaagtataaggacggggatcaatgtgagacaagtccttgccaaaaccagggcaagtgtaaggatggcctcggggagtacacttgcacttgtttggagggcttcgagggtaaaaattgtgaattattcactaggaaactttgctctttggataacggcgactgtgatcaattctgccatgaagaacagaactcagtggtttgttcctgcgcccgcggttacaccctcgccgataacggaaaggcgtgcatccccactggtccatacccttgcggaaagcagacgttggagcgcagaaagcgttctgttgcgcaagcgaccagctcatccggcgaagccccagattctatcacttggaagccgtacgatgctgcggatctagatccgacagaaaaccctttcgacttgttggattttaaccaaacacaaccggagcgaggagacaataatctaacgcgtatcgtcggggggcaagagtgtaaagacggagaatgcccctggcaagctctattaattaacgaagagaacgaagggttctgcggtggcaccatactttccgaattttacatcctcactgccgcacattgcctttatcaggctaagagatttaaagttcgcgtgggggatcgtaataccgaacaagaagaaggaggagaggcagtccatgaggtagaggttgtgatcaaacataatcgtttcacgaaggaaacatatgattttgatatcgcagttttgagattgaagactcctatcacgtttaggatgaatgtcgcaccagcctgcctgcccgagcgtgattgggctgagtctactttaatgacccagaaaacgggcattgtaagcggatttggtcgtacccatgagaagggacgccaatccaccagacttaagatgcttgaggttccctatgtggataggaatagttgcaagctttcgtcttcatttatcatcactcagaacatgttctgtgcagggtacgatactaagcaggaagacgcatgtcagggcgatagtggaggcccgcatgtcaccaggttcaaagatacgtattttgtgacgggcatagtgtcttggggagaaggttgtgctagaaaaggcaagtatgggatttataccaaggtaactgcatttttgaagtggatagaccgctcaatgaagactaggggacttcctaaagccaaaagtcatgctcctgaggttatcacgtccagccctcttaag

SEQ ID NO: 9301 - DNA, 1464 bp, synthetic construct
  misc_feature 1..1464: note = source = /note="Description of Artificial Sequence: Synthetic coding sequence"
  source 1..1464: mol_type = other DNA
atgggacgtccactgcatctggtgctcttgagcgcatcgttggcaggattgctcctcctgggtgaatccttgtttatcagaagagagcaagcgaacaacattctcgcgcgcgtgacccgcgctaattcgtttctggaggagatgaagaaaggacaccttgaaagagaatgtatggaagagacttgcagctacgaggaagcaagagaggtctttgaagattcagataaaactaatgaattttggaacaaatacaaggacggtgatcaatgcgagacttccccttgtcagaaccaggggaaatgtaaggatgggctcggagagtacacctgcacttgcctcgagggctttgaaggcaaaaactgcgaactgttcactagaaagctgtgttcactcgacaacggcgattgtgatcagttctgtcatgaggaacagaactccgtcgtctgctcatgtgcaaggggatatacccttgcggacaatggtaaggcgtgtatccctaccggaccctacccatgtggtaaacagactttggagagaaggaagagatccgtggctcaggcaacctcgtcctcgggagaagcgcctgattcaatcacctggaaaccctacgatgcagcagatcttgatccaaccgagaacccctttgacctgctggactttaaccaaacccaaccagaaagaggggacaataaccttaccagaatagtcggaggacaagagtgtaaggacggagaatgtccttggcaagcactccttatcaacgaggagaacgaaggcttctgtggaggtactattctgagcgaattctacatcctcaccgctgcccattgtctctaccaggcaaagcggtttaaagtcagagtcggggacagaaatactgaacaggaagaaggtggcgaggcagtgcatgaagtcgaagtggtgattaagcataatcggtttacgaaggagacgtacgattttgacattgcagtccttcggctcaagactccaataacctttcggatgaatgtggcaccagcatgcctgcccgaacgcgattgggctgagtccactctcatgacccagaaaactggaatcgtgtccggtttcggaaggacccatgagaaaggccggcaatccactagacttaagatgcttgaggtgccttacgtggatcggaactcttgcaagctctcgtcgtccttcatcataactcagaatatgttttgtgcaggatacgatactaagcaggaggacgcctgccagggagattcgggcgggccacatgtgacccgctttaaggatacttactttgtgaccggtattgtgtcatggggagaaggatgtgcacgcaaggggaaatacgggatctataccaaggtcactgcttttctgaaatggattgatcgctcgatgaaaaccaggggtctgccaaaggcaaagtcgcacgcacccgaagtgatcacgtcaagcccactgaag

SEQ ID NO: 9302 - DNA, 1464 bp, synthetic construct
  misc_feature 1..1464: note = source = /note="Description of Artificial Sequence: Synthetic coding sequence"
  source 1..1464: mol_type = other DNA
atgggccgtcccctacatttagttctgctctccgcgtccttggctggtctgctcctgctgggagagagcctctttatccgacgagaacaggccaacaacatcctagcccgtgtcactagggctaactccttcctggaagaaatgaagaagggccacctcgagcgagagtgcatggaggagacctgttcgtacgaagaggcccgcgaagtcttcgaagattcggacaagaccaacgagttctggaacaagtacaaggacggcgaccaatgcgagacctccccgtgtcaaaatcagggcaagtgtaaggatggcctgggtgagtatacctgcacttgtctggagggctttgaaggcaagaattgcgaacttttcacccgtaagctgtgcagcctggacaacggcgactgcgatcagttctgccacgaggaacagaactccgtcgtctgtagttgcgcccgcggctatacactggccgataacggtaaggcctgcatccccacgggaccgtacccgtgcggcaagcagaccctggagcgccgcaagcgcagcgtggcacaggccacgtccagctccggcgaggctcccgacagcatcacctggaagccctacgacgccgccgatctggaccctactgagaacccgttcgacctcctcgatttcaaccagacccaacctgagcggggcgacaacaaccttacccgcatcgttggcggacaggagtgcaaggacggggaatgcccttggcaagccctcctcatcaacgaagagaacgagggcttctgcggaggtactatcctcagcgaattttacatcttgacggcagcccactgtctctaccaagccaagcgtttcaaggtccgggtcggtgatcgaaataccgagcaagaggagggtggcgaggccgttcacgaagtggaagtagttatcaagcacaaccgctttaccaaggagacctacgattttgacatcgccgtcctcaggctcaagacccctatcacctttcgtatgaacgttgcccctgcttgtctgcctgaacgcgattgggccgagtccactctgatgacccaaaagacaggcattgtctcggggttcggacgaacccacgaaaagggccgccagtccactcgcttgaagatgctcgaagtcccctacgtcgaccgcaactcttgcaaattgagcagttccttcatcatcacgcagaacatgttttgtgccggctacgacaccaagcaggaagacgcgtgtcagggtgacagtggaggaccacacgtaacccgattcaaggatacctatttcgtgactggaatcgtctcctggggggagggttgtgcccgaaaaggcaagtacggtatctacacgaaggtgactgctttcctcaagtggattgataggtccatgaagactcgcggtctgcctaaggccaaatctcacgcgccggaggtgatcacatcctcgcctcttaaa

SEQ ID NO: 9303 - DNA, 1464 bp, synthetic construct
  misc_feature 1..1464: note = source = /note="Description of Artificial Sequence: Synthetic coding sequence"
  source 1..1464: mol_type = other DNA
atgggacgtccattgcacctggttctcctgagtgcatccctcgcaggcctgctgctccttggcgaatccctctttatcagacgcgaacaggctaataatatactggctagggtgacaagagcgaatagttttttggaagagatgaaaaaagggcatctggaacgcgagtgtatggaagagacgtgtagctatgaagaagctagagaagtttttgaagacagcgataagacgaacgagttctggaacaaatacaaggacggagatcagtgtgagacatcgccgtgtcaaaaccaggggaaatgcaaagacggtttgggggagtacacgtgcacgtgtttggaaggatttgaaggtaaaaactgcgaattgttcacaaggaagttgtgctctcttgacaatggcgattgtgatcagttttgtcatgaagaacagaattcggttgtttgttcctgcgctagaggctacactcttgcggataatgggaaggcttgcattcctacgggcccatatccgtgcgggaaacaaacgctagaaaggaggaaaagatcggtggcgcaggcaacatctagttcaggagaagcgccggactcaatcacatggaaaccctatgacgcggccgacctagacccaacagaaaatccctttgacctgttggattttaatcaaacgcaacctgaacgcggagataataatttaacaagaattgtgggtggtcaggagtgcaaagatggcgaatgcccgtggcaggccttactgatcaatgaggaaaatgaaggattttgcgggggaactattttgtccgagttttatatcttaactgctgcgcactgtctttatcaagctaagagatttaaagtccgggtcggagatcgaaatacagaacaagaagaaggtggcgaagccgttcatgaagtggaagtcgttatcaagcacaatcgcttcacaaaagaaacatatgactttgatattgcagtcttacgtcttaaaacgccgataacatttcgtatgaatgtcgcgcctgcttgcctccctgaacgggattgggcagagtcgacgcttatgacacagaagacaggaatcgtttctggcttcggacggactcatgaaaaaggccgtcaatctacgcgactaaaaatgttagaggttccatatgtggatcggaattcttgcaaacttagttcatcttttattatcacacagaacatgttttgcgcgggctatgatacaaagcaagaggatgcttgccagggagatagtgggggacctcatgtgacccgttttaaagacacttattttgtgacaggaattgtcagctggggtgagggctgcgcacgaaagggaaagtatggcatttacacaaaggtcacggctttcttgaaatggatcgatcgctccatgaagacaagaggcttgccaaaggctaaatcccatgcacctgaagtgattacaagcagcccattaaaa

SEQ ID NO: 9304 - DNA, 1464 bp, synthetic construct
  misc_feature 1..1464: note = source = /note="Description of Artificial Sequence: Synthetic coding sequence"
  source 1..1464: mol_type = other DNA
atgggccgccccctccatttggttcttctttcagccagccttgccggattattgttactgggcgagtcattgttcatacgccgagagcaggccaacaacatcctcgctagagttactcgggcaaatagcttcctcgaagagatgaagaaggggcatctggagagagaatgcatggaggagacatgctcctacgaagaggccagggaagtcttcgaagactctgacaagacaaatgagttctggaacaaatataaagatggagaccagtgtgagacaagtccctgccagaaccagggtaagtgcaaagacggactgggagagtacacgtgtacttgtttggagggatttgagggcaaaaactgtgagctgtttaccagaaaactgtgttcacttgataacggagattgtgaccagttctgccacgaggagcagaactctgtggtgtgcagctgcgcgagaggttacaccctcgctgataacgggaaggcctgtattccgacaggcccctacccttgcggcaagcaaacccttgagcgtaggaagaggtcagtggctcaggcaactagttcttccggcgaagctccggacagcattacctggaaaccatacgacgctgcagacctggaccctaccgaaaaccctttcgacctgttggactttaaccaaacacagcccgagcggggcgataataaccttaccagaatcgtaggagggcaggaatgtaaagatggcgaatgtccttggcaggctctgctgatcaatgaggaaaatgaggggttctgcggggggaccatattgtctgagttttacatccttactgctgcccactgcctttatcaggccaaaagattcaaggtgagggttggggaccggaataccgaacaggaagagggaggtgaagcagtgcacgaggtagaagtggtcattaagcataacaggttcaccaaagaaacatatgacttcgatatcgctgtgcttcgccttaaaacaccgatcacgttcaggatgaatgtggccccagcctgtttgcctgagcgagactgggcagagtccacactcatgacacagaagaccggtatcgtttccgggtttgggaggacccacgagaagggtcggcagtctacgcgactcaaaatgttggaggtgccctacgtggatcggaatagttgtaagctgtcaagcagcttcattatcacgcagaacatgttctgcgctgggtacgatactaaacaggaggacgcctgccagggagatagtggaggaccacacgtgactcgattcaaggacacatactttgtgaccggaatcgtcagctggggtgagggatgtgcccggaaaggaaagtatggcatttatacgaaggtcactgcattcctcaaatggatcgaccgctctatgaaaacccgggggttgccgaaggccaaatctcacgccccggaagtgatcacgagtagccccttaaag

SEQ ID NO: 9305 - DNA, 1464 bp, synthetic construct
  misc_feature 1..1464: note = source = /note="Description of Artificial Sequence: Synthetic coding sequence"
  source 1..1464: mol_type = other DNA
atgggacgccctttgcatctggtgcttctcagcgcctcactggcaggcctgttgctgctgggcgagtcccttttcatccggagagagcaggcaaacaacattctcgcacgggtgacccgagccaatagctttcttgaggagatgaagaaggggcacctggagagagagtgtatggaagagacgtgttcgtacgaagaggcgagggaggtgtttgaggattcagataagaccaacgaattttggaataagtacaaggacggggatcaatgtgagacttcaccatgtcagaaccaggggaagtgtaaggatggcctcggtgaatacacctgtacttgcctggaagggtttgagggtaagaactgcgagctttttaccagaaagctgtgctctctggacaacggagattgtgatcagttttgccatgaagaacaaaattccgtggtctgttcctgtgcaagaggttatacccttgcggataatggcaaggcttgcatacctactggtccgtacccgtgcggaaagcaaacgttggagcgtcgcaagcgtagcgtggcgcaagcgacgtcctccagcggcgaagcacctgattcaataacgtggaagccgtacgatgcagccgatcttgatcctacggaaaacccttttgacctgttggatttcaaccaaacgcaacccgaaagaggggataacaacctgactcgcatcgtcggaggtcaggaatgtaaagatggagagtgcccatggcaggctcttctcatcaatgaagaaaatgagggattttgcggtggaactatacttagcgaattctacattcttactgcagcccattgtctctaccaggcaaaacgtttcaaagtccgtgtgggagatcgcaacaccgaacaagaagaaggaggtgaagcagttcatgaagtggaagtcgtcattaagcacaataggttcaccaaagagacgtacgattttgatatcgctgtgttgcgattgaaaacccccattacttttcgcatgaacgtggcaccagcatgtctccctgagagggactgggcagagtcgacccttatgacgcagaaaactggtatcgtgtcaggatttggacgcactcatgaaaaagggagacagtccactcggctgaagatgcttgaggtcccgtacgttgacaggaactcgtgcaagctctcttcgtcgttcataatcacccagaatatgttctgcgcaggttacgacaccaagcaagaggatgcatgtcaaggcgactcgggtgggccccacgtaacgaggttcaaagatacctacttcgtgactggaatcgtgagttggggtgaaggttgcgcacggaagggaaagtatggaatttacaccaaggtcaccgcatttcttaaatggattgatcgttccatgaaaacgcggggacttcctaaagcaaagtcccatgcccctgaggtgattactagctccccccttaag

SEQ ID NO: 9306 - DNA, 1464 bp, synthetic construct
  misc_feature 1..1464: note = source = /note="Description of Artificial Sequence: Synthetic coding sequence"
  source 1..1464: mol_type = other DNA
atgggacgccctctgcacttggtactcctgtcagccagtctagctggactgctactcctgggggaatctctgtttatacggcgcgagcaggccaataacatactcgcacgcgtcacaagagcaaattcatttcttgaagaaatgaaaaaaggacacctcgaacgagaatgcatggaagaaacatgttcgtatgaggaagcccgcgaagtgttcgaagactcggataaaactaacgaattctggaataaatataaagatggagatcagtgcgaaacgtccccttgtcagaaccagggaaaatgtaaagatgggctcggggagtatacttgtacttgtctagaagggtttgaaggaaaaaactgtgaactgttcactcggaaactatgttctctggataatggggactgcgatcagttctgccatgaagagcagaactcagtggtctgttcatgcgctagggggtatacactggccgataacgggaaagcttgtatacctactggaccctatccttgcggaaaacagactctagaaaggaggaagcgttctgttgcccaggccactagttcttctggagaggcccccgactccatcacatggaaaccctacgatgccgctgatttagatcccacagaaaacccattcgatctcctggatttcaaccagacacagcctgaacggggagataacaatttaactagaattgtaggggggcaggaatgtaaagatggggaatgtccttggcaggctcttctaattaacgaagaaaacgagggattctgcggagggactatcctgtccgaattttatatcctgactgctgcccactgtctgtaccaagctaaacgctttaaggtgcgggtaggggataggaacactgaacaggaagaagggggagaggctgttcacgaagtagaagtggtaattaagcataaccgctttactaaggaaacatatgatttcgacatcgccgttctgcggcttaaaactcctataactttcaggatgaacgtggcacccgcttgtctacctgaaagggattgggcagaatccactttaatgactcagaaaactggaatagtgtccggatttggaagaacacatgaaaaaggacggcagtctactagactgaaaatgctcgaagtcccctatgtggatcgcaactcatgcaaactatcatcaagtttcataataactcaaaatatgttctgtgcaggatacgatactaaacaggaagatgcctgtcagggggactctggggggccacacgtgactcggtttaaagatacatattttgtaacaggaatagtttcatggggagaagggtgtgccaggaaaggaaagtatggaatttatacaaaagtcacagcctttttgaaatggatcgataggtccatgaaaacaaggggattacccaaagccaaatcccacgcccctgaggtaatcactagttcccctctcaaa

SEQ ID NO: 9307 - DNA, 1464 bp, synthetic construct
  misc_feature 1..1464: note = source = /note="Description of Artificial Sequence: Synthetic coding sequence"
  source 1..1464: mol_type = other DNA
atgggtagacccctgcacctggtgctgctctccgcgtcgctggccggcctcctgctgctcggggagtcgctgtttattcgccgcgaacaggcgaataacatcttggcccgcgttactagagctaactccttccttgaagaaatgaagaaggggcacctggaacgggagtgtatggaggagacgtgcagctacgaagaagcccgcgaagtgttcgaggacagcgataagaccaacgaattctggaacaagtacaaggacggcgaccaatgcgaaacttctccttgtcagaaccaaggtaaatgtaaggacgggctcggggaatacacctgcacctgccttgaagggttcgaaggcaagaattgcgagctttttactcgcaagttgtgctcgctggataatggcgattgtgaccaattctgccatgaggagcagaactccgttgtctgcagctgcgccagaggctacacgctggcagataatggaaaggcttgcatcccaactgggccatatccgtgcggaaagcagacgctcgaaagaagaaagagatcagtggcgcaagctacttctagcagcggagaggcgcccgactccatcacctggaagccatacgacgcggccgacctggatccgaccgaaaacccattcgacctccttgacttcaaccagactcagcctgaaagaggagataacaatctgactcgcatcgtgggaggacaggaatgcaaagatggtgaatgtccatggcaggccctcctgatcaatgaggagaacgagggattctgtggaggtaccatcctcagcgagttttacattttgaccgcggctcactgcctttaccaagccaaacgcttcaaggtgagggtgggggatcgcaacactgaacaggaagagggaggagaagccgtgcatgaggtcgaggtcgtgatcaaacataacaggttcacgaaggaaacgtacgatttcgacatcgccgtgctccggctgaaaactcctatcacttttcgcatgaatgttgcccctgcctgtttgcctgaaagagactgggcagagtccacgttgatgactcagaaaacgggaatcgtgtcgggattcggcaggacccacgagaagggacggcagtccactagactcaagatgctggaggtgccatacgtggaccgcaactcctgcaaactgagctcatcgtttatcattacccaaaacatgttctgtgccggatacgataccaagcaagaggacgcatgccagggagactcgggaggacctcacgtcaccaggttcaaggacacttactttgtgaccggaattgtctcgtggggagaaggatgcgccaggaaaggcaaatacggaatctacaccaaagtgactgcattcctgaagtggatagaccggtcaatgaaaacgcggggcctgcctaaggcgaagtcgcatgccccagaagtgatcacctcatcgccgctcaag

SEQ ID NO: 9308 - DNA, 1464 bp, synthetic construct
  misc_feature 1..1464: note = source = /note="Description of Artificial Sequence: Synthetic coding sequence"
  source 1..1464: mol_type = other DNA
atgggtagacctctgcacctggtgctgctttccgcgtccctggcagggcttctgcttctgggcgagagccttttcataagaagagagcaggcaaacaacattttggcgagagttacgagggctaattcgttccttgaagagatgaagaaaggtcacttggaacgggaatgtatggaagaaacttgttcatacgaagaagcgagggaggtgtttgaggattccgataagactaacgagttctggaacaagtacaaggacggggatcaatgtgaaaccagcccctgtcaaaatcaagggaaatgtaaggatggtttgggagagtacacttgtacttgtctcgaaggctttgaagggaagaactgtgaacttttcacccggaagctgtgctcccttgataacggtgattgtgatcagttctgtcacgaagaacaaaacagcgtggtgtgttcgtgtgcaagggggtacacccttgcagacaatggaaaagcatgtattccaaccggaccgtacccatgcggaaagcagaccctcgaaagaagaaaaaggagcgtggcacaagccactagctcatctggtgaagcaccggatagcattacttggaagccttacgatgctgcagatctggatcccactgagaacccctttgatctcctggatttcaaccagactcaacctgaaagaggtgataacaacctcacccggattgtcggagggcaagaatgtaaggacggtgaatgtccgtggcaggcacttttgattaacgaggagaacgaaggattctgcggtggcactattctgtccgagttttacattcttacggccgcgcattgtctttaccaagcaaaacgctttaaggtccgcgtgggcgacagaaacactgaacaggaggagggcggcgaggcggtccacgaggtggaagtggtgattaaacataaccggtttaccaaagaaacctatgatttcgatatcgcagtgctgagacttaaaactccaataaccttccggatgaacgtggcaccagcctgtttgccagaacgggactgggcagagtcgaccctgatgacccaaaagacggggattgtgtcgggatttggtcggactcatgaaaagggacggcaatcgactcgactgaagatgcttgaagtcccctacgtcgatagaaactcgtgcaagctctcctcgtcgtttatcattacgcagaacatgttttgcgccgggtacgatactaagcaggaggacgcttgtcaaggggactcggggggccctcatgtcactcgtttcaaggacacctattttgtcacgggtatagtctcatggggagaaggctgcgcacgaaagggcaagtacggaatctacaccaaggtgactgccttccttaaatggattgatcgttccatgaaaacgcggggactgccaaaagcgaaaagccacgcacctgaagtgataacctcctcaccacttaaa

SEQ ID NO: 9309 - DNA, 1464 bp, synthetic construct
  misc_feature 1..1464: note = source = /note="Description of Artificial Sequence: Synthetic coding sequence"
  source 1..1464: mol_type = other DNA
atggggaggcctctccatcttgtcctgctttccgcctcgctcgccggcctgcttctgcttggagagagcctatttattcgcagagaacaagcgaacaatatactggccagagtcacacgggccaacagtttcttggaggagatgaaaaagggtcacctggaaagggaatgtatggaagaaacctgcagctacgaggaagctcgggaggtgttcgaagattcggataagactaacgaattctggaataaatacaaggacggcgaccagtgtgagactagcccatgtcagaatcaagggaaatgcaaagacggcctgggtgagtatacatgtacttgtctggagggatttgaaggaaaaaattgcgaactttttactcggaaactttgcagtctggacaacggggactgtgaccagttttgtcatgaggagcagaactccgtagtctgctcttgcgcccgtggatatactctagcagacaacggtaaagcctgtattccaaccggcccatacccgtgtgggaaacagacactggaaagacgcaagcgctctgtggcacaggccacatccagttcgggagaagcaccagactccatcacctggaaaccttacgatgccgccgacctcgatcctacagagaaccctttcgatctactggatttcaatcagactcaacctgagcgtggggacaataacctgacacgaatcgttggcggtcaggaatgtaaagatggcgagtgtccgtggcaggccctgctgattaacgaggagaacgaggggttctgcggggggacaattctatcggagttctacattctgacagcagcacactgcctgtaccaagccaagaggttcaaggtaagggtgggcgatcgaaatactgagcaagaggaagggggcgaggcagttcacgaagtagaggtagtcataaaacacaacaggttcacaaaagagacctacgactttgatatcgccgtgcttaggcttaagacacccataacattccgcatgaatgttgccccagcctgcctccctgagcgagattgggccgagagtaccctcatgacacagaagactggaatcgtcagtgggtttgggcgtacacatgagaaggggaggcagtcgacacgcctgaaaatgctggaagtaccttatgtggacagaaactcatgcaaactgagctctagttttatcataacccagaacatgttctgcgccgggtacgatactaagcaggaagatgcctgccagggagatagcggcggcccacacgtgacacgattcaaggacacctatttcgtcactggaattgtatcatggggagagggctgcgcccggaaagggaagtacgggatttatactaaagtgacagcatttcttaaatggatcgatcgctccatgaagacacggggccttccgaaagcaaaaagtcatgcgcccgaagtgataacctccagtccactgaag

SEQ ID NO: 9310 - DNA, 1464 bp, synthetic construct
  misc_feature 1..1464: note = source = /note="Description of Artificial Sequence: Synthetic coding sequence"
  source 1..1464: mol_type = other DNA
atgggccgaccgctgcatcttgtgctactctccgcctctcttgcagggcttctgttgctcggtgagtcgcttttcattcgccgagagcaagcgaataatattttagcacgcgttactagggctaattcgtttctggaggagatgaagaagggtcatctggaacgtgaatgcatggaagagacctgttcttatgaggaggcccgtgaggttttcgaggattccgataagacaaacgaattctggaataagtacaaggatggtgaccagtgcgagacatccccctgccagaatcagggtaaatgtaaggatggattgggtgagtacacgtgcacctgtctggagggattcgaaggcaaaaattgtgaactgttcacaaggaaactctgttcactggacaacggcgattgcgaccaattctgtcatgaggagcagaatagtgtcgtctgtagttgtgcccgcggctacaccctcgcggacaacggcaaagcttgcatccccaccggtccctacccgtgcggtaagcagacacttgagcgccgaaagcgatctgtggcgcaggcaacctcatcaagcggagaagcacctgactcaatcacttggaagccttacgacgcagccgacttggaccctactgaaaacccatttgacttactggattttaaccaaacacagcccgagagaggcgacaataatctaacacgaatagtgggcggtcaggagtgtaaggatggagaatgcccatggcaggcactgctcattaacgaggaaaatgaggggttctgcggcgggacaattctgtctgaattctatattctaacagctgcccactgtctttatcaggcgaaaagattcaaagttcgcgtcggagatcgcaacacggaacaggaggaaggtggagaggcagtgcatgaggtcgaggtggtgataaaacataaccggttcaccaaggaaacctacgactttgatatagcagttttgcgcttaaagacacccatcacctttcgcatgaacgtggcaccagcctgtctgcctgaacgcgactgggctgagagcacattgatgacgcaaaaaacaggtattgtgagcggtttcggacgcacccatgagaagggacgccagtccacccgactgaagatgctggaggtgccctatgtcgatcggaactcatgcaaattgtcctcatcgtttatcattacacagaacatgttttgcgctggctacgacactaagcaggaggacgcatgtcagggggactccggcggacctcatgtaacgagattcaaagacacctattttgttacggggatcgtaagctggggggagggttgcgcacggaagggaaagtacggcatttataccaaagtgacagccttcctgaagtggatcgaccggtcaatgaaaacacggggcctaccaaaggccaagtcacatgctcccgaggttataacctcaagcccattgaag

SEQ ID NO: 9311 - DNA, 1464 bp, synthetic construct
  misc_feature 1..1464: note = source = /note="Description of Artificial Sequence: Synthetic coding sequence"
  source 1..1464: mol_type = other DNA
atgggtagacctctgcacctcgtgctgctctcagcctccctggccggacttctccttttgggagaaagcctctttattcggcgagagcaggctaacaacatcctggcccgggtgaccagagcaaactcgttcctggaagaaatgaaaaagggacacctggaacgcgagtgcatggaggaaacttgttcctatgaagaagcgcgggaagtgttcgaagattcggataagactaatgaattctggaacaagtacaaggatggagatcaatgcgagacttcgccctgtcagaatcaggggaagtgcaaggacggactgggagaatacacgtgcacctgcctggaggggttcgaagggaagaactgtgagctgttcactcgcaaactttgttcgctggacaacggagactgtgaccaattttgccatgaagaacaaaactccgtggtgtgctcatgcgcacgcggctacaccctggcggacaacggaaaggcgtgcatcccgactggcccttacccgtgcggcaagcagactctggaacgccggaagagatccgtggcccaagccacttcctcgtcgggagaggcaccagactcaatcacttggaagccgtacgacgcagcggacctcgatccgactgaaaacccgttcgatctcttggatttcaatcagacgcagccggagcggggcgacaataacctgactcggatcgtgggaggacaggaatgtaaagacggtgaatgcccatggcaggcactgctgatcaatgaggagaatgagggattttgtgggggaacgatcctgtccgagttctacatcctgaccgccgcacattgcctgtatcaagccaagcggttcaaggtgcgggtgggggaccgcaacaccgaacaggaagaaggaggcgaagcagtgcatgaagtcgaggtggtgatcaagcataaccgcttcaccaaggaaacctacgacttcgatatcgcggtgctgcggctgaaaactcctattacctttcggatgaatgtcgcccctgcatgtctccctgagagagactgggcagaatcgaccctcatgactcaaaagaccggaatcgtgtcgggtttcggtcggactcatgagaaaggtaggcaatctaccagactgaagatgctcgaggtcccgtacgtggatcggaactcatgtaagttgtcatcgagcttcatcattacccaaaacatgttctgcgcaggctacgatactaagcaggaagatgcttgccaaggggactctggcggaccgcacgtgacccggtttaaagacacttacttcgtcactggaatcgtgtcatggggggaggggtgcgcgcgcaaggggaaatacggaatctacactaaggtcactgcattcctgaagtggatcgaccggtccatgaaaactcgcggcctccctaaggccaagagccacgccccggaagtgataacgtcgagcccacttaag

SEQ ID NO: 9312 - DNA, 1464 bp, synthetic construct
  misc_feature 1..1464: note = source = /note="Description of Artificial Sequence: Synthetic coding sequence"
  source 1..1464: mol_type = other DNA
atgggcaggccactccacctggtcctgctgagcgctagcctcgcgggcctgttgctgttgggagaaagcctgttcattcgcagggagcaggctaacaatatcctggcccgtgttacccgagccaattcttttctggaagagatgaaaaaaggtcacctggaacgcgagtgcatggaagagacttgcagttacgaagaagctcgcgaggtcttcgaagactcagacaaaactaatgagttctggaataaatataaagacggtgaccagtgtgaaacttcaccatgtcaaaatcagggaaagtgcaaggatggcctcggagagtacacctgcacatgtctggagggttttgagggcaagaactgtgagctattcacgcgtaagttgtgctccctggataatggagattgcgatcagttctgccacgaggagcagaactccgtggtgtgtagctgcgcgcgcggttacaccctggcagacaatggcaaggcatgtatcccgaccggtccttatccgtgcggtaagcaaaccctggagagaaggaaaagaagcgtcgcacaagctactagctcctccggagaggctccagattccatcacctggaagccttatgatgcagccgatctggatccaactgaaaatccattcgaccttttggattttaatcagacccagcccgaacgtggcgataataacctcacccgcatcgttggcggccaggaatgtaaggatggcgagtgtccatggcaggcgctgttaattaacgaagagaacgaagggttttgcggcggtacaatactctcggagttttatattctgacagcagctcactgcctttaccaggccaaacgctttaaagtgcgcgtcggtgaccgcaataccgagcaggaggagggcggtgaggccgtccatgaggtggaggtcgttattaaacacaacaggttcaccaaggaaacatacgatttcgacattgctgtactgcgcctgaaaacgccgatcacgtttcgcatgaacgtggctccggcatgtctgcctgaacgcgactgggctgaatccaccctgatgacccagaagaccggcattgtgagcggtttcggacggacacacgagaaaggccgtcagagcacccggctgaagatgcttgaggtgccgtacgtcgaccgcaatagctgtaagctctcttcatcctttattatcacccagaatatgttttgcgcaggctacgacacgaagcaggaagatgcgtgccagggagattctgggggcccacacgttaccaggttcaaggacacatactttgtgacgggaatcgtttcttggggggagggatgcgcaaggaagggtaaatacggtatatatacgaaggtgacagcatttctaaaatggatcgaccgcagcatgaagacccgcgggctcccgaaggcaaagtcccacgcaccagaagttataacgtctagcccgctgaag

SEQ ID NO: 9313 - DNA, 1464 bp, synthetic construct
  misc_feature 1..1464: note = source = /note="Description of Artificial Sequence: Synthetic coding sequence"
  source 1..1464: mol_type = other DNA
atggggcgaccattgcacctggtcctgctcagtgccagcctggccggtctgctactcttaggagagtccttattcatccggcgagagcaagcaaacaacatcctagccagggttacgagggcaaacagcttcttggaggagatgaaaaaaggccaccttgagcgtgagtgcatggaagaaacgtgctcatacgaggaagcacgggaagtgtttgaggatagcgacaaaactaacgagttctggaataagtataaagatggagaccaatgcgagacaagtccgtgtcaaaatcaaggcaaatgcaaggacggcctgggagagtacacttgcacctgtctggagggattcgaaggaaaaaactgtgaactgtttacaaggaagctgtgtagtttggacaatggagattgcgatcaattctgccatgaagagcaaaatagcgtggtgtgtagctgcgctaggggatatacactggctgacaatggtaaagcttgcattccaaccggcccatatccctgcggcaagcagacgctggagcgcaggaagagaagcgtggctcaggccacttcttcttcaggggaggcccccgattccatcacttggaagccttacgacgcagccgatctcgacccaactgaaaatccttttgatctgcttgatttcaatcagacccagcctgagcggggcgataacaatcttacccgtattgtcggaggtcaagagtgtaaggatggcgagtgcccctggcaagctttgttaatcaatgaagaaaacgagggattctgtggggggacaattcttagcgagttctacattcttaccgccgcacattgcctgtatcaggcaaagagatttaaagtaagggtgggtgataggaacacggagcaggaagagggaggtgaagccgtccatgaggtcgaggtggtgattaaacacaacagattcaccaaggagacctacgacttcgacattgcagtcctgaggctcaaaacccctatcactttccgcatgaacgtagcaccggcctgtttaccagaacgggattgggcagaatctacactcatgacgcaaaagaccggaattgtcagtgggttcggaagaacccacgaaaaaggaaggcagtccacacggctgaaaatgttggaggtgccttacgtcgatcgaaacagctgtaaactgagctctagctttatcatcacacagaatatgttttgtgctggatatgacaccaagcaggaggacgcgtgtcagggagactcagggggccctcatgtaaccaggttcaaggatacttatttcgtgacaggaatcgtgagctggggggagggttgtgcccggaaggggaagtacggtatttacacaaaagtgacggccttcttgaagtggattgaccggagtatgaaaacgagaggcctcccaaaagctaagagtcacgctccggaagtgattaccagctcgccgctgaaa

SEQ ID NO: 9314 - DNA, 1464 bp, synthetic construct
  misc_feature 1..1464: note = source = /note="Description of Artificial Sequence: Synthetic coding sequence"
  source 1..1464: mol_type = other DNA
atgggacggccactgcatcttgtcctactatctgcctcgctcgctggtctgctgctcctcggggaatccttgttcatccgccgtgaacaggccaacaatatacttgcgcgagtcacaagggctaatagcttcctggaagagatgaagaaaggccatctggagagggaatgcatggaagagacttgtagctacgaggaggcccgtgaggtttttgaggacagtgacaagacgaatgaattctggaataagtacaaggatggtgaccaatgtgaaacatctccatgtcagaaccaaggtaagtgcaaggacggtctaggcgagtatacatgtacttgccttgagggctttgaaggaaagaattgcgagctgtttactcgtaaactgtgctctctggacaatggcgactgcgatcaattttgtcatgaggagcagaactccgtcgtgtgttcgtgtgcccggggttatacattggcagacaacggcaaagcctgcatccctacggggccatacccatgtggtaaacagacgttggagcgacgcaagcgaagtgttgcacaggcaacctcgtcctctggcgaggccccagactctataacctggaaaccatatgacgcggctgacttagatccaactgaaaacccattcgatctactggatttcaaccagacgcaaccggaacgaggagataacaatctgaccagaatcgtgggtggacaggaatgcaaggacggggagtgtccctggcaagcgcttctaataaacgaagagaacgagggcttctgcggaggaacgatcttgtcggagttttacatcttaacggctgctcattgtctttatcaggccaagcgattcaaagttcgcgttggggaccgtaacacagaacaagaagaaggcggcgaggcagtccatgaagtggaggtcgtcattaagcataaccggtttacgaaagagacatatgattttgacatagctgttttgcggcttaaaaccccaataacattccgaatgaacgtggctcctgcatgtctgccagaacgggactgggcagaatcaacactgatgacccaaaagaccggcattgtgtccggattcggacgtacacacgagaaaggcagacaaagtactcgtttgaagatgctggaggtaccttatgtcgaccgcaattcgtgtaaactatcttcgtccttcattattacccagaacatgttctgcgccggatacgacacaaagcaggaagatgcgtgccaaggcgacagtggggggccgcacgtgacaaggtttaaggatacgtactttgtcacgggtatcgtctcgtggggggaggggtgcgcgaggaaaggcaaatacgggatctatacgaaggtgactgccttcctaaagtggatcgatcgttctatgaagacgcgcggacttcctaaagcgaagagccatgctccggaagtcataacatcatctccactcaag

SEQ ID NO: 9315 - DNA, 1464 bp, synthetic construct
  misc_feature 1..1464: note = source = /note="Description of Artificial Sequence: Synthetic coding sequence"
  source 1..1464: mol_type = other DNA
atggggcgccccttgcatctggtcctgctgtctgcgtcccttgccggcctgcttttgcttggcgaaagtttgtttattaggagagagcaggccaataacatactggctcgggtcactcgggcaaactcgtttctggaggaaatgaagaaaggacatctcgagcgggaatgtatggaagagacttgctcctatgaggaggcaagggaggtatttgaggattcagataaaacaaatgagttctggaacaaatacaaggacggtgaccagtgtgagacctcaccatgtcagaatcaaggcaagtgtaaagacggactgggagagtacacttgtacctgtttggaaggatttgaaggaaaaaattgtgagttatttactcgcaagctctgtagcctagacaatggggactgcgatcagttctgtcacgaagaacagaattccgtagtgtgctcttgtgcgaggggctatacacttgccgacaacggaaaagcctgtatcccgacggggccctatccctgcgggaaacagactctcgaacgccgcaaacgctccgtggcacaggccacatcaagttctggcgaagcccccgactcaatcacttggaaaccctacgacgctgcagatctagatcccactgagaaccctttcgatctgctggatttcaaccaaacacaacctgagaggggagataataacctcactcgaatagtgggcggtcaggagtgcaaggacggcgagtgtccatggcaggctctgctgatcaacgaggagaacgagggtttttgcggcgggaccattctctcagagttctatattttgacagcggctcactgcctgtaccaggcgaaaaggttcaaggttcgcgttggggacagaaacacagaacaggaagaaggaggggaagctgtgcacgaggtcgaggtcgtcataaagcacaacaggtttacaaaagaaacctacgacttcgacattgcagtgctaaggctgaaaaccccaatcaccttccgcatgaatgtggctcctgcctgtctcccagaacgcgattgggccgagagtacgttaatgactcagaagacaggcatcgtgtccggtttcggcaggacacacgagaagggccgccagagcaccaggctgaaaatgctggaagtgccatacgttgatcgcaactcttgcaagctgagttccagcttcatcataactcaaaatatgttttgtgccggatacgatactaaacaggaagatgcctgccagggggatagcggaggtcctcacgtgactcgattcaaagacacctacttcgtcacgggcatcgtctcctggggagagggctgcgccaggaaagggaagtacgggatctacactaaggtgaccgcgttcctcaaatggatcgataggtccatgaaaacacgtggacttcctaaagctaagtcacacgcaccagaggtgataacgtcctcccctctcaaa

SEQ ID NO: 9316 - DNA, 1464 bp, synthetic construct
  misc_feature 1..1464: note = source = /note="Description of Artificial Sequence: Synthetic coding sequence"
  source 1..1464: mol_type = other DNA
atgggaaggcccctgcatctggtcctcctttccgcgtcgcttgctggattgctgctgcttggcgaatcgcttttcatcagaagagagcaggcaaacaatatacttgccagggttaccagggccaactcgtttctggaggagatgaaaaaaggccatttggagagagagtgtatggaggaaacttgttcctacgaagaagcacgggaagtgtttgaggattcagacaagaccaatgagttttggaacaagtacaaagatggagatcaatgtgagacttctccttgtcaaaatcagggtaaatgcaaggacggattgggtgaatacacttgcacttgtcttgaggggtttgaaggcaaaaactgtgaactctttactcgcaagctgtgtagcttggataatggagactgtgaccaattttgtcatgaggaacaaaactcggtcgtgtgctcatgtgcaagagggtacacccttgcggacaatggcaaggcatgtattccgactggaccatacccatgtggaaaacagacgctggaacggcggaaaagaagcgtggctcaagcgacttcatcctcgggtgaagcaccggattccatcacttggaaaccatatgacgccgccgatcttgatcctactgagaatccatttgacctgctggactttaaccaaacccaacccgaaagaggcgacaacaatctgactagaatcgtgggtggacaagaatgtaaggatggcgaatgcccttggcaggcgttgttgataaacgaggagaacgaaggcttttgtggggggaccattctgtcagaattctacattctgaccgcagctcactgcctctatcaggccaagcgcttcaaggtgcgggtgggtgatcggaacaccgaacaagaggaaggtggagaagcagtccacgaagtcgaggtcgtcataaagcataaccggttcaccaaggaaacctacgatttcgatatcgcagttcttagacttaagacccccattaccttccgtatgaacgtggcacctgcctgcctgccagaacgggactgggcggaaagcaccctgatgactcaaaagactgggatagtgtctggttttggtcgaactcatgaaaaaggtcggcagtccacgcggctcaaaatgctggaagtgccatacgtggatcgcaattcgtgcaaactttcatctagcttcataatcactcaaaacatgttctgcgcgggatacgatactaagcaggaagatgcatgccaaggggattccggaggaccgcatgtcactagatttaaggatacctacttcgtgacgggcattgtgtcatggggtgaagggtgtgcacgaaagggaaagtacgggatctacaccaaggtgaccgcatttctgaaatggattgaccgctccatgaaaaccaggggtttgcctaaggcaaagtcgcacgcgcctgaggtcattacctcgtcgcctcttaag

SEQ ID NO: 9317 - DNA, 1464 bp, synthetic construct
  misc_feature 1..1464: note = source = /note="Description of Artificial Sequence: Synthetic coding sequence"
  source 1..1464: mol_type = other DNA
atgggccgcccgcttcacttggtcctgctgtcagcctccttggcaggactgctgctgctgggcgagagcctgtttatcagaagagaacaggccaataacatccttgcacgggtgactcgggcgaacagtttcctggaagagatgaagaagggacacctcgaacgcgagtgcatggaggaaacctgtagttacgaagaagcccgggaagtctttgaggactcagataagactaatgagttctggaacaaatacaaggatggagatcaatgcgaaacttcgccgtgccaaaatcagggaaaatgcaaagatggattgggtgagtacacctgcacctgcctcgaaggatttgagggaaagaattgtgagttgttcactcgcaagctctgctcattggacaatggtgactgcgaccagttctgtcacgaagaacagaacagcgtggtctgctcatgcgcccgcggatacaccctggccgacaatggcaaggcttgcattccaactggcccttacccttgcggaaagcaaaccctcgaacgccgtaaacgctccgtcgcccaggctacctcatcatcgggcgaggcgcccgattccattacttggaagccgtacgacgccgcagatctggacccaaccgagaacccgttcgacctcctggacttcaaccagacccagccggaaaggggagacaacaatctgactcgaatcgtaggaggacaggaatgtaaggacggagaatgcccatggcaggctctgctcatcaacgaagaaaacgaagggttctgcggggggaccatcctctcggagttctatatcctgacggcggcccattgcctgtaccaagcaaaacggtttaaagttcgcgtgggcgaccgcaacactgaacaagaagaaggcggggaggcggtgcacgaagtggaggtggtgatcaagcacaaccggttcaccaaggaaacctacgatttcgatatcgccgtgctgcgcctgaaaactccgatcaccttcagaatgaacgttgctcccgcgtgcctgccagaacgggactgggcagagtcgacccttatgacgcaaaaaactggaatcgtttcaggattcggacgcactcacgagaagggcagacaatccacccgcctgaagatgctcgaagtcccttacgtggatcgcaattcgtgcaaactgtcgtcctcattcatcatcactcagaatatgttctgtgcgggatacgataccaagcaggaggacgcctgtcaaggagattcaggaggaccgcacgtcacccgcttcaaggatacctactttgtgaccgggatcgtgtcctggggcgagggatgtgcgaggaaggggaaatacggcatctacacgaaggtcaccgcattcctcaaatggatcgaccgcagcatgaaaacccgcggcctgccaaaggccaaatcgcacgcaccagaagtcatcacctcttcgccacttaag

SEQ ID NO: 9318 - DNA, 1464 bp, synthetic construct
  misc_feature 1..1464: note = source = /note="Description of Artificial Sequence: Synthetic coding sequence"
  source 1..1464: mol_type = other DNA
atgggacgacctcttcatttggtgctgctgagcgccagccttgctggactcctgctgctgggcgaatcgctgttcatcaggagagagcaggcaaacaacatcctggcaagagtcactagagcgaactcatttctggaagagatgaagaaaggacatcttgagcgtgaatgcatggaggaaacctgttcgtacgaagaagcaagagaagtgttcgaagattccgataagaccaatgagttttggaacaagtacaaggatggtgaccagtgcgagacgtccccttgccaaaaccaagggaagtgtaaggacggcctgggggaatatacctgtacctgtctggagggattcgaaggtaagaactgtgaactttttactcgtaagctgtgttcactggataacggtgattgtgaccagttctgccacgaggagcagaattcggtggtctgttcgtgcgcgcgtggctacaccctggcagacaatggaaaagcctgcattccgactggcccttacccctgtgggaagcaaactctggaacgacgtaagaggtctgtggcgcaagccacctcgtcgtccggagaagcaccagattcgattacttggaagccatacgatgcggccgatcttgatccgaccgagaacccttttgaccttctggatttcaaccaaacccagccggagagaggagacaataaccttactcgaatcgtgggtggtcaagagtgtaaagacggcgaatgcccttggcaggcacttttgattaacgaagaaaacgaaggcttttgtggtggcaccatactttcggaattctacatcctcacggcggcacactgtctttaccaggcaaagagatttaaggttcgcgtcggcgatcgtaacacggagcaagaagagggaggggaggcagtccacgaagtggaagtggtgatcaaacataatcggtttaccaaggagacttacgattttgatattgcagtgttgcgccttaagacccctattacgtttcgcatgaacgtcgcgcctgcgtgtctgccggaacgcgattgggcagaaagcactctcatgacccaaaaaaccgggattgtgtcaggttttggacggacccacgaaaaagggcgacaaagcacgcgcctgaaaatgcttgaggtgccatacgtggacagaaactcttgcaagctctcgagctccttcatcataactcagaacatgttttgtgcaggttacgatactaagcaggaagatgcatgccaaggcgactccggcggacctcatgtgactagatttaaggacacctacttcgtgaccggaattgtcagctggggcgagggttgtgcaagaaaaggaaaatacggaatatacaccaaggtaaccgcatttcttaagtggattgaccgctcgatgaaaacgcgtggactccccaaggcgaagtcacacgcacctgaagtcataacctcgtcgcctctgaag

SEQ ID NO: 9319 - DNA, 1464 bp, synthetic construct
  misc_feature 1..1464: note = source = /note="Description of Artificial Sequence: Synthetic coding sequence"
  source 1..1464: mol_type = other DNA
atgggccgaccgctccatctggtcctgctgtccgcctcgcttgccggactgctcctgttgggagagtccctcttcatccggcgcgagcaggccaataacattctcgcgagagtgactcgcgcgaactcattcctggaagaaatgaagaagggacatttggagagagaatgtatggaagagacttgctcgtacgaagaggctcgcgaagtgtttgaggattcggacaagaccaatgaattctggaacaaatacaaggatggcgaccagtgcgaaacgtcgccgtgccagaatcagggcaaatgcaaggatggactcggggagtacacctgcacttgcctggaaggattcgaaggaaaaaactgtgaactgttcacccggaaactgtgctcccttgacaatggggattgtgaccaattttgccatgaagaacagaattcggtggtgtgtagctgcgcacgcggatacaccctggcagacaacggaaaggcctgcattcctactgggccttacccgtgcggaaagcagactctcgaacggcggaagagatcggtggcacaggcgacttcgtcgagcggagaagccccggattccatcacctggaaaccgtacgatgccgcggacctggacccaacggaaaacccgttcgacctgttggacttcaaccaaactcagcctgaaagaggtgacaacaacctcacccggattgtgggaggtcaggagtgtaaggatggagaatgcccatggcaagcactcctgatcaacgaggagaatgagggcttctgcggcggcactatcctgtctgaattctacatccttactgccgcgcattgcctctaccaagccaagcgcttcaaggtgcgcgttggagatcggaacactgagcaggaggagggcggagaagctgttcacgaagtggaggtcgtgattaagcacaatcggttcactaaggagacttacgatttcgacatcgcagtcctgaggctgaaaaccccaatcaccttccggatgaacgttgccccggcctgtctgccagaacgcgactgggccgaatccaccctcatgacccaaaaaactggtatcgtctccggatttggacggacccacgaaaagggtaggcaatccactcggctgaagatgctggaagttccttacgtggatagaaactcctgcaagctgagctcctcattcatcattactcaaaacatgttctgtgcgggatacgacactaagcaggaagatgcttgccaaggggattccggcggcccgcacgtgaccagattcaaggacacctacttcgtgactggcatcgtcagctggggcgagggctgcgcgcggaagggcaagtacggcatttacaccaaggtcaccgcgtttctcaagtggatcgatagatcaatgaaaaccagaggactgcctaaggccaaatcgcatgctccagaagtgataacttccagcccactgaag

SEQ ID NO: 9320 - DNA, 1464 bp, synthetic construct; identical to SEQ ID NO: 9278
  misc_feature 1..1464: note = source = /note="Description of Artificial Sequence: Synthetic coding sequence"
  source 1..1464: mol_type = other DNA

SEQ ID NO: 9321 - DNA, 1464 bp, synthetic construct
  misc_feature 1..1464: note = source = /note="Description of Artificial Sequence: Synthetic coding sequence"
  source 1..1464: mol_type = other DNA
atgggtagaccgcttcatctggtgctcctgtccgcctccctggcgggactgctgctcctgggcgaatcgctgtttatccggcgcgagcaggctaacaatatcctggctagggtcacccgggccaactcattcctggaggagatgaaaaagggccacctcgaacgggagtgcatggaagagacttgctcgtacgaggaagctcgggaagtctttgaggactcagacaaaaccaacgaattctggaacaaatacaaggatggagatcaatgtgaaacttccccatgccagaatcaaggaaagtgtaaggacgggctgggagaatacacttgcacgtgtctggagggcttcgagggcaagaattgcgaactgttcacccggaagctgtgttcgctggataatggcgattgcgatcaattctgtcacgaagagcaaaactcagtggtgtgttcctgcgcgcgcggatacaccctcgctgataacgggaaggcgtgcattccgactggaccgtacccttgcggaaagcagaccctggaacgcaggaagcgctcagtggcacaggcgactagttcatcgggtgaagccccagattccatcacctggaagccttacgatgcggcggacctggacccaactgaaaacccattcgatctcctcgactttaatcaaactcaaccggagcgcggagacaacaacctcaccagaatcgtgggcggacaggaatgtaaggacggagagtgcccatggcaggcgctgcttatcaatgaagaaaatgaaggtttttgcggcgggaccatcctgtccgagttttacatcctgaccgcggcccactgtctctaccaggccaaacgctttaaggtgagagtgggggatcggaacactgaacaggaagagggcggtgaggcagtgcatgaagtggaggtcgtgatcaagcacaacaggttcactaaagaaacctacgatttcgacatcgctgtcctccgcctgaaaacgccaatcacgttcaggatgaacgtggcccctgcctgcctcccagagcgcgactgggccgaatcaactctcatgactcagaaaaccggaatcgtctcgggattcggccggacccatgaaaagggtagacaatctactaggcttaagatgctggaggtgccctacgtggatcgcaactcttgtaaactgtccagctcgtttatcattactcagaatatgttttgcgctggatacgataccaagcaggaggacgcctgccaaggagattccggaggcccacacgtcaccagattcaaggacacttatttcgtgactggaatagtctcatggggcgagggctgcgccaggaaggggaaatacggaatctacaccaaggtgaccgccttcctgaagtggatcgataggtccatgaaaactcggggactgcctaaggcgaagtcacacgcaccggaagtgatcacctcaagcccgctgaag

SEQ ID NO: 9322 - DNA, 1464 bp, synthetic construct
  misc_feature 1..1464: note = source = /note="Description of Artificial Sequence: Synthetic coding sequence"
  source 1..1464: mol_type = other DNA
atggggcgccccctccacctcgtcctactgagcgcgagcctggctgggctgctgctcctcggggaatccctgtttatcagaagagagcaagcaaacaacatcctggctcgggtgactcgggcaaactcatttctagaggaaatgaagaaaggacatctggagcgtgaatgtatggaagaaacctgtagttacgaagaggcgagagaagttttcgaagattcagataaaactaacgagttttggaacaagtataaggacggtgatcagtgcgagacatccccatgtcagaaccagggcaaatgtaaagatggtcttggtgaatatacctgcacatgtctggaaggattcgagggaaagaattgcgaactgtttactcggaaactctgctcattggataacggagactgcgaccagttttgccacgaagaacaaaactccgtcgtgtgttcttgcgccaggggctacactctggcggataatggaaaggcctgtatccctacaggaccgtacccctgtggtaaacagacacttgagcggcgaaagaggtctgttgctcaagccacatctagctcaggggaggctcctgactccatcacgtggaaaccctatgacgcagccgatctcgacccgaccgagaatcccttcgatctgcttgattttaaccagactcaaccagagcggggcgacaacaacctcactcgaatcgtgggagggcaggagtgcaaggacggcgagtgcccttggcaggccctcctcattaatgaggagaatgagggattctgtggcggcacaatacttagtgagttttacatcctcacagctgcccactgcctgtaccaggcaaagcgatttaaggttcgcgtgggcgacaggaacactgaacaggaggaaggaggagaggctgtccacgaagtggaagtcgtgatcaaacacaaccgcttcactaaagaaacttatgactttgatatcgccgtcctaaggttgaagactcccataacctttcgcatgaatgtggccccggcttgcctgccagagcgtgattgggccgagtcaaccctcatgacacaaaaaacaggtattgtgtcgggtttcggacggactcatgagaagggacgtcaatcaaccagactgaaaatgttggaagtcccatacgtggacaggaatagctgcaagcttagtagtagcttcattataacccagaacatgttttgtgccggatacgataccaagcaagaggatgcatgccagggagacagtgggggcccccatgtgacacgcttcaaggacacatatttcgtgaccggaatcgtgtcctggggggagggatgcgccagaaagggcaagtacgggatttacactaaggtcactgcctttctgaagtggatagaccgcagtatgaagaccagaggcttgccaaaggccaaaagccatgcaccggaagtgatcaccagttcgccccttaag

SEQ ID NO: 9323 - DNA, 1464 bp, synthetic construct
  misc_feature 1..1464: note = source = /note="Description of Artificial Sequence: Synthetic coding sequence"
  source 1..1464: mol_type = other DNA
atggggcgcccactgcacctggtccttttgtccgcctccctggccggactcctgctgttgggcgagagcctgttcatcagacgcgaacaagccaacaacatccttgcacgggtgactagagcaaattcgttcctcgaagaaatgaaaaaaggacatttggaacgcgaatgtatggaggagacttgttcatacgaggaagctcgggaggtgttcgaagatagcgacaagaccaacgagttctggaacaagtataaggatggagatcaatgcgaaacctcgccgtgtcagaatcagggcaagtgtaaggatggactgggagagtacacttgcacgtgcctcgagggattcgagggaaaaaactgcgaactgttcactcgcaagctgtgctctcttgacaacggagattgtgaccaattttgccatgaagagcaaaactcagtggtgtgctcgtgcgcgagaggatataccctggcagataatggaaaggcctgcatcccgaccggtccttacccatgtggcaagcagactttggaacgcagaaagcggagcgtggcccaggcaacctcgtcttcgggagaagcaccggattccatcacctggaagccatacgatgctgccgatctggaccccactgagaacccatttgaccttctggacttcaatcagacccagccggagagaggagacaacaacctcactcggatcgtgggcggacaggagtgtaaggacggcgaatgcccctggcaggccctgcttatcaatgaggaaaatgaaggattctgcggaggaactattctgagcgagttctacatcctgaccgccgctcactgcctttaccaagctaaacggtttaaggtgcgcgttggggaccgcaataccgaacaggaggaaggaggcgaggctgtgcatgaagttgaggtcgtgatcaaacataaccggttcactaaagaaacctacgacttcgatatcgcggtacttagacttaagactccgatcactttcagaatgaacgtggccccagcatgccttcctgaaagggactgggctgagagcaccctcatgacccaaaaaactggtatagtgtcggggttcggacgcacccacgagaaaggacggcagtcaactcgactgaagatgctcgaagtgccctacgtggaccggaactcctgcaagctctccagctcattcatcattacccagaatatgttctgtgctggttacgacaccaagcaggaggacgcttgtcaaggagactcgggaggaccccatgtgaccagattcaaggacacctactttgttactggcattgtctcgtggggcgaaggatgtgcccgcaaaggtaaatacggtatctacaccaaggtcaccgcctttctgaagtggatcgatcggtcaatgaagactcgggggctgccaaaggccaagagccatgcccctgaagtcatcacgagcagtccgttgaag

SEQ ID NO: 9324 - DNA, 1464 bp, synthetic construct
  misc_feature 1..1464: note = source = /note="Description of Artificial Sequence: Synthetic coding sequence"
  source 1..1464: mol_type = other DNA
atggggcgtccactgcaccttgtactgctgagcgcctcccttgcaggactcttgttgctgggagaatccttgttcatcaggagggaacaggccaataatatcctggctagggttactagagctaatagctttctggaggagatgaaaaaaggacacctcgagagggagtgtatggaggagacctgcagctatgaggaggcaagggaagtcttcgaagactcagacaaaacaaacgaattttggaacaaatataaagacggagaccagtgtgaaacatctccctgtcaaaaccaaggaaaatgcaaggacgggttaggagagtacacctgcacctgccttgagggcttcgaaggaaaaaactgcgaactgtttaccagaaaactgtgttcccttgataacggtgattgcgatcagttctgccacgaggagcaaaatagcgtggtgtgcagctgtgctcggggctacacattggcggataacggaaaggcatgcataccaaccggtccatacccttgcgggaaacagactctcgaacgtcgaaaaagaagtgttgcacaagccactagtagctcaggcgaagcacctgatagtatcacctggaaaccctatgatgctgccgatcttgatcccacagaaaacccatttgacctcctggactttaaccagacacagccagagagaggtgacaataatctgactaggatcgtgggcggacaggagtgtaaagacggagaatgtccatggcaggccctcctcattaacgaggagaacgaaggattttgtgggggtacaattcttagcgaattttatatcctgaccgcagcgcactgtctgtatcaggcgaaaaggtttaaggtacgcgtgggcgacaggaacactgaacaagaagaaggaggcgaagctgtgcacgaagttgaggtcgtcatcaaacataacagatttacgaaggagacatatgatttcgacatcgcagttctacgcctgaagacaccaattaccttcagaatgaacgttgccccagcctgtttaccagagagagattgggccgagagcactctcatgacacagaaaacagggatagtgagcgggtttggaaggactcatgaaaaaggcagacagagcaccaggctgaaaatgcttgaagtcccttacgtcgaccgcaactcttgcaaactgtcatctagctttattatcacccagaacatgttctgcgcaggctatgataccaagcaagaggacgcatgtcagggagatagtgggggtcctcatgtcacaagattcaaggatacctacttcgttacaggaatagtgtcctggggagaagggtgcgcaaggaagggcaagtacggcatttacactaaagtgactgctttcttaaagtggatcgacagaagcatgaagaccagaggactgcctaaagccaaaagccacgcgccagaggttatcacaagctctcccttaaag

SEQ ID NO: 9325 - DNA, 1464 bp, synthetic construct
  misc_feature 1..1464: note = source = /note="Description of Artificial Sequence: Synthetic coding sequence"
  source 1..1464: mol_type = other DNA
atgggaaggcccctgcatcttgttctgctgagcgcctcgctcgccggcctccttctcctaggggagagtctcttcattcggcgggagcaggcaaacaacattctggcacgagtcacccgggctaacagcttcctggaagagatgaagaagggccatctggagcgcgagtgcatggaggagacctgctcttatgaggaggcacgggaagtgtttgaagattcagacaaaacaaatgagttctggaataaatacaaagatggcgatcagtgcgagacgtctccatgtcagaaccaaggaaaatgcaaggatgggttgggggagtatacctgcacgtgtctagaggggttcgagggcaagaattgtgaactatttacccgaaaactgtgcagcctcgataacggggactgtgaccagttctgccatgaggagcagaattctgtggtttgctcttgcgccagagggtatactcttgcagacaatgggaaggcttgtatccccacgggaccttacccgtgcgggaaacagacactggaacgacggaagcggtcggtggcacaagccacgagcagctccggggaagcaccagactctataacctggaagccgtacgatgctgccgacctggaccccacagagaaccccttcgacttgctggactttaaccagacacagcctgaacggggcgataataaccttacaaggatcgttggaggacaggaatgtaaagatggtgaatgcccctggcaggctctgctgattaacgaagaaaatgagggcttttgtgggggaaccatcttgtctgaattctacattttaaccgcagcgcattgtctgtatcaggcgaaaagattcaaagtgagagtaggcgataggaataccgaacaggaagaggggggcgaagccgtgcacgaggttgaggttgtcatcaagcacaataggtttacgaaagagacatatgattttgacattgccgtcttaagactaaaaaccccaattactttcagaatgaatgtggcgcctgcgtgcctgccagagagggattgggccgaatcaactctaatgacccagaaaacagggattgtcagcggtttcggccggactcacgaaaaaggacggcagagcacaagactcaagatgctcgaggtcccctatgtggaccgaaactcttgcaagctaagttcgtcgttcatcattacccagaatatgttttgcgctggttatgatacaaagcaagaagatgcatgccaaggtgatagcggtggcccacacgtcacgcgcttcaaagatacctattttgtgacagggattgtgtcctggggtgaaggatgcgcccgcaagggaaaatacgggatttatactaaggtgactgccttcttgaaatggatcgacaggtctatgaagacaagaggcttacctaaggccaagagccatgccccagaagtcatcacttcatcccccttgaag

SEQ ID NO: 9326 - DNA, 1464 bp, synthetic construct
  misc_feature 1..1464: note = source = /note="Description of Artificial Sequence: Synthetic coding sequence"
  source 1..1464: mol_type = other DNA
atgggcaggcctcttcacctcgttctgcttagcgcttctctagccggattgctgctgctcggcgaatcattattcattcgccgagagcaggctaataacatcctcgctcgggtcacccgcgccaactcattccttgaggagatgaagaaggggcatttagagcgcgagtgcatggaagagacgtgcagctacgaagaggcccgcgaggtgttcgaggactcggataaaacgaacgaattttggaacaagtacaaggacggagatcagtgcgagacttccccttgccagaatcaggggaagtgcaaggacggactgggtgagtatacctgtacctgtttggagggcttcgaagggaagaattgcgaattattcacaaggaaattgtgttcattagacaatggagactgtgaccagttctgccacgaggagcaaaactcggtcgtctgctcctgcgcaagggggtacacgctcgccgataatggtaaagcctgtatccctacggggccctatccatgcggaaaacagaccctggagcgccgaaagagatccgtggcccaggccacatcctctagcggggaggctccagactcaatcacctggaaaccctatgacgcggcagatctggatcctacagagaatccctttgacctcctggactttaaccagactcaaccagaaaggggcgataataaccttacgcgcatcgtgggcggccaggagtgcaaggatggggaatgtccgtggcaggcccttctgattaatgaggaaaatgagggattctgtggcggaactatcctgtccgagttctatatcttgactgccgctcattgcctatatcaggcaaagcggttcaaggtgcgcgtgggcgacaggaatactgagcaggaagaaggaggagaggctgtgcacgaagtggaggtggtcattaagcacaacaggtttacaaaagagacgtatgacttcgatattgctgtgcttcgcttaaagactccaattacttttcgtatgaacgtcgcgcctgcctgcctccctgaacgagactgggccgaatccacgctgatgactcagaagaccggcatcgtgagcggattcgggcgcacccatgaaaagggcagacagtccacaagactgaaaatgctggaagtcccctacgttgaccgaaattcctgcaagctgtcatcttcttttatcattacccagaacatgttttgcgccggctatgacaccaagcaggaggacgcttgccaaggcgattccgggggccctcatgtcacccgcttcaaagatacctacttcgtgaccggcatcgttagctggggagagggttgcgctagaaagggtaagtacggcatctatactaaggtgaccgccttcctgaaatggatcgaccgtagtatgaaaacccggggcctgccaaaagctaaaagtcatgcacccgaggtcattacgagttcaccgctgaag

SEQ ID NO: 9327 - DNA, 1464 bp, synthetic construct
  misc_feature 1..1464: note = source = /note="Description of Artificial Sequence: Synthetic coding sequence"
  source 1..1464: mol_type = other DNA
atgggaaggccccttcacctcgtgctcctgtccgcatcgctggcagggcttctgcttctgggagagtccctgttcatccgaagagaacaagcaaacaacattctcgcacgggtgacgcgtgcaaactcattcctcgaagaaatgaagaagggacatctcgaacgcgagtgcatggaggagacttgttcgtatgaagaagcacgggaagtctttgaagatagcgacaaaaccaatgagttttggaacaagtacaaggatggtgatcaatgtgagacgtccccgtgtcaaaatcaaggaaagtgtaaggacggattgggagaatacacctgtacttgtctcgagggatttgaaggtaagaactgcgaactcttcacgaggaaactctgttcccttgataacggagactgtgatcagttctgtcacgaggagcagaactcggtggtgtgttcgtgcgcccgaggctacaccctggccgataatggaaaggcatgcatcccaactggcccatatccgtgcggcaagcagactcttgaacgccggaaacgctccgtcgcacaggcaactagctcctccggcgaagctccagattcgatcacctggaagccatacgacgcagcagacctggatcctaccgaaaacccttttgatcttttggactttaatcagactcaaccagaacgcggcgataacaatctgaccagaatagtcggaggtcaagaatgcaaagacggggaatgtccttggcaggcactgttgataaacgaagaaaatgaaggcttctgtggcggaactatactgagcgaattctacattctgaccgcagcacattgcttgtaccaagcgaagagatttaaggtgcgtgtgggagatcggaatactgagcaggaagaagggggagaagcggtgcatgaagtggaagtggtgattaagcataaccggtttactaaggaaacctacgatttcgacattgcagtcctgagactcaaaacccctatcacgttccggatgaacgtggctccagcatgtctcccggagagagactgggcagaatcgacccttatgacccaaaaaactggtatcgtgtcgggttttggtcggactcatgaaaagggacgtcaatcaacccggctgaagatgctggaagtgccatacgtggatcgcaacagctgtaagctgtcgtccagcttcatcattacccagaacatgttttgcgcaggatacgacaccaagcaggaagatgcatgtcagggggacagcggaggaccccatgtcactcggtttaaggatacttacttcgtcaccggcattgtgagctggggcgaggggtgcgcaaggaagggtaagtacggtatttacactaaggtaaccgcattccttaaatggatagataggtcaatgaaaactcgcgggctgcctaaagcaaagagccatgctcctgaagtgattactagctcaccattgaag

SEQ ID NO: 9328 - DNA, 1464 bp, synthetic construct
  misc_feature 1..1464: note = source = /note="Description of Artificial Sequence: Synthetic coding sequence"
  source 1..1464: mol_type = other DNA
atggggcggcctctgcatctcgtgctgttaagtgcaagtttggccggacttctcctcctgggggagtccttattcattaggcgtgagcaggcgaacaatatcttagcccgggtcaccagggccaactcattcctagaggagatgaagaagggacatctggagcgggaatgtatggaggagacatgctcctatgaagaggcccgcgaagtgtttgaggatagcgacaagaccaacgaattctggaacaaatataaggatggagatcagtgtgagactagtccatgtcagaatcagggtaagtgtaaagacggactcggcgagtatacctgtacctgcttggagggttttgagggaaaaaattgcgagctgttcactcgtaagttgtgctctctggataacggcgactgtgatcagttttgccatgaggagcagaacagcgtggtgtgctcctgtgctaggggttacactctggccgataatggaaaggcctgtattcctactgggccctacccttgcggcaagcagacgctggagagacggaagaggagcgtcgcccaagcaacctcttcttcaggggaggctcccgacagcatcacttggaagccttacgatgcagccgacttggaccctaccgaaaacccattcgatctcctagattttaaccagacccagccggaacggggcgataataatctgactcggatcgttggcgggcaggagtgtaaggacggggaatgtccctggcaggcgcttttaatcaacgaagaaaacgaaggattctgcggcggcactatcctctctgaattctacatcctcaccgctgctcattgcctctatcaggccaagcgcttcaaggtccgggttggcgaccgaaatactgagcaggaggaagggggcgaagccgtgcatgaggtggaagtcgtcattaagcacaaccgtttcacaaaagagacctacgactttgatatcgctgtgcttagacttaagacccctatcacgttccggatgaacgtcgcccccgcctgcttgccggagagggactgggccgagtccaccctcatgacacagaagacaggaattgtctctggcttcgggaggactcacgaaaaagggaggcagtccactagactcaaaatgttagaggtcccgtacgtcgatcgtaactcctgcaaactgtccagcagctttattattacccagaatatgttctgtgcaggctacgacaccaaacaggaggatgcttgtcagggagattctgggggcccacacgttaccaggttcaaagacacctatttcgtaaccggcatcgtgagttggggagaaggctgcgcccgtaagggcaagtacgggatatacactaaagtgaccgcattcctaaagtggattgataggagcatgaaaaccagaggcttgcccaaagcaaagtcccacgccccggaagtcataaccagcagccctctgaaa

SEQ ID NO: 9329 - DNA, 1464 bp, synthetic construct
  misc_feature 1..1464: note = source = /note="Description of Artificial Sequence: Synthetic coding sequence"
  source 1..1464: mol_type = other DNA
atgggcagacccctgcatctcgtattgctgtccgcttcccttgcgggccttctcctcctgggggagtccctgtttataaggagagagcaggccaacaacatcctcgccagagtgactagagcaaactccttcctggaagaaatgaaaaaaggacacctcgagagagagtgcatggaagagacctgcagttatgaagaagcacgcgaggtcttcgaggactctgataagaccaacgagttttggaacaaatacaaagacggcgatcagtgtgagacgagtccctgtcagaaccaaggcaagtgcaaggacggcctcggagaatacacgtgcacctgccttgaggggttcgaggggaaaaattgcgaactgttcactcgcaagctgtgttcactggataacggagattgcgaccagttctgtcatgaagagcagaattccgtggtatgtagctgtgcacggggatataccctggccgataacggaaaagcatgcattccaaccggcccctatccctgcgggaagcagactctggagcgacggaaaagatcagtggcccaggctactagcagcagcggggaagctcccgatagtattacgtggaaaccatatgacgctgcggaccttgaccccactgaaaatccctttgatctcctggatttcaatcaaacccaaccagagaggggggacaacaacctcacgcgaattgtgggcgggcaggaatgtaaagacggtgagtgcccgtggcaggcactgcttataaatgaggaaaacgaaggcttctgtggtggaacgatactgtccgagttttatattctgactgctgcccattgtctgtatcaagccaagcgattcaaagttcgcgtcggcgacagaaatacagagcaagaagaagggggagaggctgtgcacgaagtagaagtcgttattaaacataaccggtttaccaaggaaacttacgatttcgacatcgctgtcctgagactgaaaacacctatcaccttccgcatgaacgtagccccagcatgtcttcccgaacgcgattgggccgagtccacattgatgactcagaaaaccggcatcgtaagcggcttcgggaggacccatgagaagggtcggcagtccactcgccttaagatgctggaagttccctatgtcgaccgaaattcatgtaaactgagcagcagctttattataacccagaatatgttctgcgcaggctatgatactaaacaggaggatgcttgccagggggactctggtggtcctcatgttacacgctttaaggacacctatttcgtaaccgggatcgtctcatggggagaaggctgcgcccgcaaaggaaagtacggaatttacaccaaggtgacggcttttttgaaatggatcgatcgctcaatgaaaacaaggggactcccaaaagccaagtcccatgcccctgaggtgattacctcaagtcccctgaaa

SEQ ID NO: 9330 - DNA, 1464 bp, synthetic construct
  misc_feature 1..1464: note = source = /note="Description of Artificial Sequence: Synthetic coding sequence"
  source 1..1464: mol_type = other DNA
atgggcaggccattacacctggttctcttaagtgcttcattagctggactcctcttgctcggagagtcactatttattcgacgggagcaggcaaataacattctggcccgagtgacccgagccaactcattccttgaggagatgaagaagggccaccttgaaagggaatgcatggaagaaacttgttcatatgaggaggcacgcgaggtgttcgaggactctgacaaaaccaatgagttctggaacaaatataaggacggggaccagtgcgagacaagcccctgccaaaaccagggaaaatgcaaagatgggctcggcgagtacacctgtacgtgcctggaggggtttgagggaaagaactgcgagttgttcactcgtaaattgtgtagcctcgataatggtgactgtgatcagttttgccacgaggagcaaaactcggtggtttgctcgtgcgcgcgcggctatactctggccgacaatggcaaggcctgcattccaaccggtccgtatccctgcggaaagcagaccctggagcgtagaaagagaagtgtggctcaagctaccagttcgtcaggggaggcacctgactccatcacatggaagccttacgacgccgccgacctggatcctactgagaatccgttcgacttactggattttaaccagacccagcctgagagaggtgacaataacctgacgaggattgtgggcgggcaagaatgtaaggatggcgagtgtccttggcaagctctgctgatcaatgaggagaatgagggattctgtggaggaaccatcctttcggagttttatatattgaccgctgctcactgtctctatcaggccaaaaggtttaaagtgcgcgtgggagacagaaataccgagcaggaggagggcggggaggccgtacacgaggtggaggtagtgataaagcacaacagatttacaaaagagacctatgacttcgatatcgcagtgctgaggcttaagacacccatcacgtttcgcatgaatgtggcccctgcatgtctgcccgaaagggactgggccgagtccactttgatgacccagaaaactggcatcgtaagcgggttcgggcggacccacgagaagggtcgccagagcacaaggctaaaaatgctggaagtgccatatgtagacagaaactcttgtaagctgtcatcttcattcatcatcactcagaatatgttctgcgctggctacgacaccaagcaggaagacgcctgccagggcgatagcgggggccctcacgtgactcgattcaaggacacttactttgtgactggaatcgtgagttggggagaagggtgtgcgcgcaagggcaagtacggaatctatacgaaagtgacggcgtttttaaaatggattgaccgctcgatgaagacacggggactccctaaagccaaaagccatgcccccgaagttattaccagctcacctctgaaa

SEQ ID NO: 9331 - DNA, 1464 bp, synthetic construct
  misc_feature 1..1464: note = source = /note="Description of Artificial Sequence: Synthetic coding sequence"
  source 1..1464: mol_type = other DNA
atggggaggccactccaccttgtactccttagtgcaagtctggccggactgcttctcctgggggaatccctcttcatacgccgcgaacaggcaaacaacattttggcccgggtgacccgcgccaactccttccttgaggaaatgaaaaaaggtcatttggaacgggaatgcatggaagagacttgttcttacgaggaggctagggaagtgtttgaggacagcgacaagaccaatgagttctggaataagtataaggatggggatcagtgcgaaacgagcccctgtcaaaatcagggtaaatgtaaggacggcctcggtgagtatacctgtacatgtctcgaaggatttgaaggaaagaattgcgaattgttcacccggaagttgtgctcccttgacaacggtgattgtgaccagttctgccacgaagaacaaaactctgtggtgtgttcatgcgctagagggtacacactcgccgataatgggaaggcatgcatcccaactggtccttacccctgtggaaagcaaacgctggagcggcggaagagaagtgttgcccaggccacgagtagtagcggggaggccccagatagcataacttggaaaccctacgatgcagccgacctggatccgaccgaaaacccatttgacctgttggacttcaaccagacccagcccgagcggggcgataataacctgacacggatcgtcggcggccaggagtgtaaggacggcgaatgcccgtggcaggcgctgttgattaacgaagagaacgagggcttttgtggcgggaccattctgtccgaattttacattcttacggcagcacactgtttgtatcaggctaagaggttcaaagtgcgcgtgggagacagaaacaccgagcaggaagaaggtggagaggcggttcacgaagtggaggttgtcattaagcacaatcggttcaccaaggaaacctatgacttcgacattgctgttctgagactcaaaaccccaatcaccttccgcatgaacgtggctcctgcctgtctgcccgaacgcgattgggctgaatctaccctgatgacccagaaaacaggaatagtgtccggcttcggtagaacccacgagaagggccgacaatctacccgcctgaagatgctggaagtaccgtacgtggacaggaatagctgcaaattgtcctctagcttcatcatcacccagaatatgttctgtgcggggtatgacacgaaacaagaagacgcctgtcagggcgatagtggtgggccccacgttacgaggttcaaggatacatatttcgtaacaggcatagtgtcttggggagagggctgtgcccgcaagggaaaatatggcatctacaccaaagtcactgcgttcctgaaatggatagataggtcaatgaagaccagaggactccctaaggccaagtctcacgcaccagaagttatcaccagcagtcccttgaaa

SEQ ID NO: 9332 - DNA, 1464 bp, synthetic construct
  misc_feature 1..1464: note = source = /note="Description of Artificial Sequence: Synthetic coding sequence"
  source 1..1464: mol_type = other DNA
atgggaaggcccttgcaccttgtcttgctgagcgccagtctggcaggactcctgctgctcggcgaaagtctttttattaggcgggaacaggccaataatatactagctcgggtgacaagggccaattccttcctagaagagatgaaaaaggggcacctggaacgggagtgcatggaagagacatgctcttatgaagaagctcgcgaagtgtttgaggactccgataagacaaacgaattctggaacaagtacaaggatggcgaccagtgtgaaacttccccatgtcagaaccagggcaagtgcaaagacgggctcggggagtatacgtgtacatgcctcgaggggttcgaggggaaaaattgcgagctgtttacacgcaaactgtgctctttagataatggagattgtgaccagttttgtcatgaagagcagaacagcgtcgtatgctcttgcgcacgcggttacaccctggccgataatggcaaagcatgcattcccacagggccctatccatgtggaaaacaaaccctcgagcgccgtaagcgcagcgtggcgcaggcgacgagctcaagcggtgaggcaccggatagtatcacttggaaaccttacgacgcggctgacttggaccccacagagaatcccttcgatctcctggattttaaccagacgcagccagaaagaggggataataatctcacccgcatcgtgggtgggcaggaatgcaaagatggcgaatgcccctggcaggctctccttataaacgaggaaaatgaaggcttttgcggcggcactatactgagcgaattttatattttgactgccgctcactgcttataccaggccaagcgatttaaggtccgagtgggggatagaaatacggagcaggaagaggggggggaagctgtccatgaagtggaggttgtcatcaagcataaccgatttactaaggaaacctacgatttcgatatcgctgtattgagactgaagacaccgatcaccttcaggatgaacgtggccccagcatgtttgccagagagggactgggctgagtctacactgatgactcaaaaaacaggcatagtgtctggcttcggcagaacccacgagaagggccgccaatccacgcggctgaagatgctggaggtcccttatgtagaccgcaactcctgtaaactaagtagtagctttatcatcacccagaacatgttctgcgccggctatgataccaaacaagaggatgcctgtcagggcgatagtgggggcccacacgtcaccagattcaaggatacatacttcgtgacgggcatagtgtcctggggggagggatgcgctcgtaaaggaaaatatggcatctatacgaaggttacagctttcctgaagtggatcgatcggtcaatgaagacacgtggcctaccaaaagctaagagccatgcaccggaagtgattacttctagcccactcaag

SEQ ID NO: 9333 - DNA, 1464 bp, synthetic construct
  misc_feature 1..1464: note = source = /note="Description of Artificial Sequence: Synthetic coding sequence"
  source 1..1464: mol_type = other DNA
atgggccggccactgcatctcgtgctcctgtctgcgtcccttgcaggactgttgctcctgggggaaagcctctttatcaggcgcgaacaggcaaataacatcctggcacgcgtgactagagctaacagctttctcgaagaaatgaagaagggccacctcgagcgcgagtgcatggaggaaacctgtagctatgaggaagctagagaggtgtttgaggactctgacaaaactaacgagttctggaataaatacaaagacggtgatcaatgtgaaacctccccctgtcaaaaccagggcaaatgcaaagatggactcggagaatacacttgcacctgcctggaggggttcgagggaaaaaactgcgaattgtttactagaaaactgtgctcactcgacaatggcgattgcgaccagttttgccatgaggaacagaacagcgttgtctgcagttgcgccagagggtataccttggcagacaacggaaaagcctgcatccctaccggaccctacccatgtggaaagcagaccctggagcggcggaagcgatcagtcgcccaggctacatctagcagcggtgaagcccccgattccatcacgtggaagccgtacgatgccgcagacctggaccctacagagaacccttttgacctgctcgacttcaatcaaacccagcctgagcgcggcgataacaaccttacccgtattgttggcgggcaggagtgtaaagatggtgaatgcccatggcaagcattgctcatcaatgaagagaacgaagggttctgcggcggcaccattcttagtgaattttatatcctgaccgccgcccattgtctgtatcaggctaagcgatttaaagttcgggtgggcgacaggaacacagagcaagaggaggggggcgaagccgttcatgaggtggaggtggtgatcaagcataacaggttcactaaggagacctatgattttgatattgctgttcttagactgaaaacaccaatcacctttaggatgaacgtggccccagcatgcctgcccgaacgggattgggctgagtctacactcatgacccagaaaacagggatcgtgtccggctttggccggactcatgaaaaaggaagacagagcacaagactcaaaatgcttgaggtcccctacgtggatcgcaactcatgcaagctgagcagttccttcatcatcacccagaacatgttttgcgccggctatgacacgaaacaggaggacgcgtgccagggggacagcggaggccctcacgttacaaggtttaaagatacttactttgtgacaggcatagtgtcttggggcgagggctgtgctagaaagggaaaatatggcatatataccaaagttacagcatttttaaaatggatcgacagatctatgaagacaaggggcctgccaaaggctaaatcacatgcacccgaggtgatcactagctcaccattgaag

SEQ ID NO: 9334 - DNA, 1464 bp, synthetic construct
  misc_feature 1..1464: note = source = /note="Description of Artificial Sequence: Synthetic coding sequence"
  source 1..1464: mol_type = other DNA
atgggcaggccgctccacctcgtgttgctgtccgcaagtcttgcgggcctgctactcctgggcgagtcactcttcattcgtagggaacaggctaacaatattctggctcgagtgaccagggctaatagtttcttggaagagatgaagaagggacatcttgaaagagagtgtatggaggagacctgttcgtacgaagaagccagggaagtttttgaggacagcgataagacaaacgaattctggaacaagtacaaagacggggaccagtgcgagacaagtccttgtcagaatcaggggaagtgtaaagacgggttgggagaatatacatgcacatgtctggagggatttgaggggaaaaactgtgaactgttcaccaggaaactctgctctctggacaacggcgattgcgaccagttctgtcacgaggagcagaattcggtggtgtgctcatgcgccagaggctacaccctggcggacaacggtaaagcctgcattcccactgggccttatccctgtggtaaacagactcttgagagaagaaagcgctcagttgcacaggcaacttcatcatccggagaggctcccgacagtattacgtggaagccttatgatgctgctgatctggatcccacagagaatccctttgacttgctggatttcaaccagactcagcctgaacggggggataataatctcactagaatagtgggaggccaggagtgtaaggacggagagtgcccctggcaggcccttctcataaacgaggagaacgaaggattctgcggtggcacaatcctgagcgaattttacatcctgaccgcagcacactgcctgtatcaggcaaaacgatttaaggttagagttggtgaccggaatacggagcaggaggaagggggtgaggccgttcatgaggttgaggtggtcatcaaacacaatcggtttacaaaggagacctatgatttcgatatcgccgtcctgagactcaaaactcctataactttcaggatgaacgtggctccagcctgtttgcccgaacgggattgggccgagtccacactgatgacacagaaaaccggtatcgtgagcgggttcgggcggactcacgaaaagggacggcagtctacgcgactgaagatgttagaggttccatatgtagatcgtaattcttgcaagttaagttctagcttcatcatcacacagaacatgttctgcgcgggatatgatactaagcaggaagatgcttgtcaaggggatagcggaggtcctcatgtgacacggttcaaagatacgtatttcgtcaccggcattgtctcttggggagaaggttgcgcaagaaaaggcaaatatgggatctataccaaagttactgccttcctgaagtggattgaccgcagcatgaaaaccaggggtctgccaaaggcaaaatctcacgcccccgaggtgattacctcaagcccgctaaaa

SEQ ID NO: 9335 - DNA, 1464 bp, synthetic construct
  misc_feature 1..1464: note = source = /note="Description of Artificial Sequence: Synthetic coding sequence"
  source 1..1464: mol_type = other DNA
atggggaggcccttgcatctggtactcttgtcagcgtcattggctggactcctgctgcttggagaaagcctcttcatacgtagagagcaggccaacaatatcctggctcgcgttacccgtgcaaacagcttccttgaggagatgaaaaaaggacacctagagcgggagtgtatggaagaaacttgcagttatgaagaagccagggaagtgttcgaggattcagataagactaatgagttttggaacaagtataaagatggtgaccaatgtgaaacaagcccttgccagaaccaggggaaatgcaaagacggtctgggcgagtacacatgtacatgcctcgagggtttcgagggaaaaaattgcgaattgttcaccagaaagctttgcagtctcgacaacggagactgtgaccagttctgtcatgaggaacaaaattcggtagtctgttcttgcgcacggggctacacactggccgataatgggaaagcgtgcatcccaaccggaccctacccctgtgggaagcagacattagagagacgcaaaagatcagtggctcaagccactagctcctcaggcgaggcaccagactccataacctggaagccttacgacgccgcagacctggatcccacggaaaatcccttcgatcttctggatttcaatcagacccaacccgagcgaggcgataacaatctgacaaggatcgtgggtggccaggaatgtaaggacggagagtgcccatggcaggccctgctgattaacgaggagaacgaaggattttgcggaggaacaatccttagcgagttctatattttaacggctgcccactgtctgtaccaggcaaagcgcttcaaggtcagagttggagaccggaatacagagcaggaggagggaggggaggctgtccatgaagtagaagtcgtgatcaagcataatagattcacaaaggaaacttatgacttcgacatagctgtcttgcgccttaaaacccctatcacattccgcatgaacgtcgctccagcgtgcctcccggaacgggactgggcggagtccacactaatgacacagaagactggcattgtctctggattcggaaggacacatgaaaaaggtcgccagtctacccgcctgaagatgctggaagtgccatatgtcgaccgcaacagctgtaaattgtccagctcttttataatcacacagaacatgttttgtgccggctatgacaccaagcaggaggatgcctgccagggcgacagtggggggcctcatgtgaccaggtttaaagacacatacttcgttactggaattgtatcttggggggaggggtgcgctcggaaaggcaaatacggcatttacaccaaagtcacggccttcctgaagtggattgacagaagcatgaaaacccgtgggctgcctaaagccaagtcacacgcacccgaggtgattactagctctccgttaaaa

SEQ ID NO: 9336 - DNA, 1464 bp, synthetic construct
  misc_feature 1..1464: note = source = /note="Description of Artificial Sequence: Synthetic coding sequence"
  source 1..1464: mol_type = other DNA
atgggcagacctctacacttagtgctgctcagcgcgtctctggctggcttactattgctcggtgagagcttgtttatcaggcgggaacaggcaaacaatatcctggccagggtgactcgggccaacagtttcctggaggagatgaaaaaggggcatctggaaagagaatgcatggaagagacatgcagttatgaggaagctagggaagtgttcgaagatagcgacaaaaccaatgagttctggaataaatacaaagatggggaccagtgcgaaacctctccatgccagaaccaggggaaatgtaaggacggtctgggggagtatacatgtacgtgcctcgaggggtttgagggcaaaaattgtgaattgtttacccgcaagctctgtagccttgacaatggcgactgcgatcagttctgccacgaggagcagaatagcgtggtctgcagctgcgcccggggatacaccttggcagataatggcaaggcctgtatccccaccgggccttatccttgtgggaagcagaccctggaacgtaggaagcggtcagtggcccaggccacgagcagcagcggcgaagctcctgactccattacctggaaaccatacgacgccgctgatttagatccaaccgaaaatccattcgacctgctggatttcaatcagacccaaccagaacgtggcgacaacaacctcacacgaattgtagggggacaggagtgcaaggatggagagtgcccatggcaggcgctcttaattaacgaggagaacgagggattctgtgggggcacgatactgtcggagttctatattctgaccgctgcgcactgcctgtaccaggccaagcgcttcaaggttcgggtgggggataggaataccgagcaagaggagggtggtgaagcagtgcacgaggtggaggttgtaataaagcacaaccggtttactaaagagacctatgactttgatattgcagtcctgcggctaaagacaccaatcacctttcgaatgaatgtcgcccccgcttgcctccctgagagagattgggccgaaagtaccttaatgacacagaaaaccggaattgtgtcaggctttggtcgtacgcatgaaaagggtcgtcagtcaaccagattgaagatgctggaagtgccgtatgttgaccgcaatagctgtaaattgtccagctcattcataatcacgcagaacatgttctgcgccggctacgataccaaacaggaggacgcgtgccaaggagacagcgggggcccccatgtcaccagattcaaagacacctactttgtcactggaatcgtttcttggggggaagggtgcgcgcgtaaggggaaatatggaatctacaccaaggttacagcgtttctgaagtggatagacagatcaatgaagacccgtgggctgcctaaagccaagagccatgcccctgaagtcattacgagcagcccattgaaa

SEQ ID NO: 9337 - DNA, 1464 bp, synthetic construct
  misc_feature 1..1464: note = source = /note="Description of Artificial Sequence: Synthetic coding sequence"
  source 1..1464: mol_type = other DNA
atgggccgcccactgcacctggtgctgctcagcgcaagccttgcaggactgttactgttaggtgagtctctttttatccggagggagcaggctaataacatcctggcacgagtaacccgggctaacagctttctggaggagatgaagaaaggacacttggaacgggagtgcatggaagagacttgctcttacgaagaggcacgggaagtttttgaagactctgacaagaccaacgagttctggaataaatacaaagacggagaccaatgcgaaacaagcccctgtcagaaccaggggaaatgcaaagatggacttggcgagtacacatgcacctgcctcgaaggttttgagggaaagaattgtgagctatttactaggaaactttgctctctcgacaatggcgattgcgatcagttttgccacgaggagcagaattcagtggtctgcagctgtgcccgcggctataccctggccgataacgggaaggcttgtatacccacgggcccctacccttgtggtaagcagacactggagcggcggaagagatctgttgcccaagcgacatcttcttccggagaagcacccgacagcatcacatggaagccatatgatgctgcagatctggaccccacggaaaatccgtttgacttgctggatttcaaccagacacagcctgaacggggcgacaataatctgacccgcatagtggggggccaggaatgcaaggatggggaatgcccatggcaggcactattaataaatgaggaaaacgaagggttttgcggagggaccatcttgtctgagttttatattctgaccgctgcacactgtttataccaggcaaaacgctttaaggtgcgggtgggcgacaggaacaccgaacaggaggagggcggagaggcagtgcatgaagtcgaggtcgtgatcaaacacaatcggtttacaaaggagacttatgacttcgacattgctgtcctgcggctcaagactcctatcacgttccgaatgaatgtcgccccagcctgtttaccggagcgggattgggcagagtccaccctcatgactcagaaaaccggcattgtgagcggtttcgggagaacccacgaaaagggaagacaatcaaccaggctgaagatgctcgaagtgccatacgtcgaccgaaactcatgcaagctctctagtagcttcataataacccagaacatgttttgtgctggctacgataccaaacaagaagatgcctgtcagggcgattcaggtggtccgcacgttactcgctttaaagacacttattttgtcacaggcatagtgagctggggggaaggctgcgcacggaagggcaaatacggtatctatacaaaggtgaccgcctttttgaaatggatcgaccgctctatgaagacgcggggcctacccaaggccaaatcccacgcccctgaagtgattacctccagtcctctcaag

SEQ ID NO: 9338 - DNA, 1464 bp, synthetic construct
  misc_feature 1..1464: note = source = /note="Description of Artificial Sequence: Synthetic coding sequence"
  source 1..1464: mol_type = other DNA
atggggagacccctgcatcttgtccttctgagcgcctctttagctggcctgttattgttaggtgaatcactgtttatacggcgtgaacaggcaaacaatattttagctcgggtaacccgtgcaaacagctttcttgaagaaatgaaaaagggccatctggaacgcgaatgcatggaagagacatgctcgtatgaagaagcccgtgaagttttcgaggatagcgataaaactaatgaattctggaacaaatataaagatggtgatcagtgcgagacaagcccgtgccaaaatcaagggaaatgcaaggatgggctgggcgaatatacctgcacatgtctcgaaggcttcgaaggaaaaaattgtgagttattcacaagaaagctctgtagcttggataatggtgattgtgatcaattttgtcacgaagaacagaattcagtcgtatgttcctgtgcccgtggatatacgctggcggataacggtaaagcttgtattccgactggtccttatccttgcggaaaacagacactggaacggcgaaagcgctcggtggcccaggctacctcatcatcaggggaagctccggatagcatcacttggaaaccttatgacgcggccgacttagacccgacggagaatcctttcgacttgctggactttaaccagacacaacctgaaagaggggacaacaacttgacacggatcgtcggcggacaagaatgtaaggatggcgaatgcccttggcaagcgcttctgatcaatgaagaaaatgaagggttttgcgggggaacaatattgtcagaattctatatactgacagcggcgcattgcttgtatcaagcaaaacgcttcaaagtgcgtgtgggtgaccgcaacacggagcaggaggaaggcggtgaggcagttcatgaagtggaggtcgtcattaaacacaatcggtttacgaaagaaacgtatgatttcgatattgctgtgcttcgccttaaaactccaattacatttcggatgaacgtagcccctgcgtgtttaccagaacgagactgggctgagtcaactttgatgacacaaaaaaccggaatcgtatccggatttggacgtacccatgaaaaaggccgacaatctacccgcctcaagatgcttgaggtgccgtatgttgatcgcaactcatgtaagttatctagctcttttatcatcacacaaaatatgttttgtgctggctacgatactaaacaagaagatgcttgccaaggcgatagcgggggtcctcacgttactcgtttcaaagatacatattttgttacaggtatcgtgagttggggggaaggatgcgcgagaaaaggcaaatatggcatttatactaaagtcaccgcgtttttaaaatggattgatcgaagtatgaaaacgagaggtcttccgaaggctaaaagtcacgccccggaagtaatcacatccagtccactgaaa

SEQ ID NO: 9339 - DNA, 1464 bp, synthetic construct
  misc_feature 1..1464: note = source = /note="Description of Artificial Sequence: Synthetic coding sequence"
  source 1..1464: mol_type = other DNA
atgggcaggcccctccatctggtgctcctgtcagccagcctggctggtttgcttctccttggcgaaagcctgttcattaggagggaacaggccaacaatatacttgcacgtgtgacccgcgccaactccttcctggaagagatgaagaaaggacacctggaacgcgagtgcatggaagaaacatgctcctacgaggaagcccgcgaagtctttgaagatagtgacaaaacaaacgagttttggaacaagtacaaggacggagaccagtgcgagaccagtccttgtcagaaccaaggaaagtgtaaggacggactcggagagtacacctgcacttgtctggagggtttcgagggtaagaactgtgagctgtttacacgtaagctctgcagcctggacaacggcgactgtgaccagttctgccacgaagagcaaaactccgtggtttgctcttgtgcaaggggttacacattggccgacaacggtaaagcatgcattcctactggaccttacccatgcggcaaacagaccctcgagcgcaggaaaagaagtgtggctcaagccactagcagcagtggcgaggcccctgacagtatcacttggaagccctacgatgctgctgatttggacccaaccgaaaaccctttcgatctgctcgatttcaaccagacacaacctgaaaggggtgataacaatcttacacgtatcgttggaggtcaggagtgcaaggatggtgaatgtccctggcaagctctgctgataaatgaagaaaacgagggtttttgcggaggtactatcctgtcagagttctacatccttactgctgctcattgcctctaccaagctaagcgtttcaaggtcagagtcggagaccgcaacactgagcaggaagagggaggagaggccgtgcacgaggtcgaggtcgtgatcaaacacaaccgctttacaaaggaaacatacgactttgatattgcagttctgaggctgaagacaccaatcacattcagaatgaatgttgctcccgcttgcttgcctgagcgcgactgggctgagtctactctgatgactcagaaaactggcatcgtctcaggtttcggtaggacccacgaaaagggtaggcaaagtacaagacttaagatgctggaggtaccctacgtggacagaaactcatgtaagctctcatcctcatttattatcactcagaacatgttctgcgccggttacgacaccaaacaggaggacgcttgtcagggcgactctggtggtccccatgtcacacgtttcaaggatacctattttgtgacaggcattgtgtcctggggtgagggctgcgctcgtaagggcaagtacggcatctataccaaggtcactgcttttctcaagtggatcgaccgttctatgaagacaaggggccttcctaaagccaaaagccacgctccagaggtcattacctcctctcctcttaag

SEQ ID NO: 9340 - DNA, 1464 bp, synthetic construct
  misc_feature 1..1464: note = source = /note="Description of Artificial Sequence: Synthetic coding sequence"
  source 1..1464: mol_type = other DNA
atgggccggcctctgcacctggtcctcctgtccgcatcccttgctggcctactgctactgggggagagcttatttataagacgagagcaagctaataacattctcgcaagggtcacaagggccaactcttttctggaagaaatgaagaaaggacacctggaaagggaatgcatggaagagacttgtagctatgaggaggcacgcgaggtgtttgaagacagcgataagaccaacgaattttggaacaaatataaggacggcgaccagtgcgagacaagtccttgtcaaaaccaaggcaagtgcaaagatggacttggagagtacacatgtacttgtctggagggattcgaaggaaagaattgcgagttgttcacacgcaaactgtgctctcttgataatggggattgcgatcaattctgtcacgaggaacagaatagtgtcgtgtgctcttgcgctcgtgggtataccttggctgataatgggaaggcttgcatcccaaccggaccttacccctgcgggaaacagaccttggagcgccgcaagcggtccgtcgcacaggcgacttcttcctcgggcgaggctccggacagtattacttggaagccctacgacgctgcagacctcgacccaacggaaaacccattcgacctgctggactttaatcagacgcagccggaaaggggggataataacctgaccaggattgtaggcggccaggagtgtaaagatggggagtgcccatggcaagcgttactgattaacgaagaaaatgaaggattttgtggcggaacgatactgtcggaattctacatacttacggcagcccattgtctttaccaggctaagcggttcaaggtgagggtcggggaccgaaacacggagcaagaagaaggtggggaggctgtccatgaggttgaggttgttatcaagcacaatagatttacaaaagagacatatgattttgatatcgcggtgctgagacttaaaacgcccattacgttccgaatgaatgtggctccagcatgcctgccggaacgggattgggccgagtcgacgctgatgactcaaaagacagggattgtcagtggattcggccgcacccacgagaaaggccgccagtctaccagactgaaaatgttggaggtgccttacgtagatcgcaacagctgtaagctcagctccagttttattatcacgcagaacatgttctgcgccggctacgataccaagcaggaggacgcttgtcagggagactctggaggacctcacgtgacacgtttcaaggacacctattttgtgactggaatcgtgtcctggggagaggggtgcgccagaaaagggaagtacggaatctataccaaggttaccgcctttctcaagtggatcgatagaagcatgaaaacaaggggactacccaaggccaaatctcatgcacctgaggtgatcacgtcctcacctctcaag

SEQ ID NO: 9341 - DNA, 1464 bp, synthetic construct
  misc_feature 1..1464: note = source = /note="Description of Artificial Sequence: Synthetic coding sequence"
  source 1..1464: mol_type = other DNA
atgggcaggcctctgcacctcgtattgctgagcgcgagtctagcgggtttgcttctcctgggcgagagcttgtttattcggagggagcaggcgaataatatcctcgccagggtaaccagagctaactcatttctcgaggaaatgaagaaggggcatcttgagcgcgaatgtatggaggaaacctgcagttatgaagaagctcgagaagtatttgaagattccgacaagacaaacgaattctggaacaagtataaagatggcgatcaatgtgagacttctccttgtcaaaaccaagggaaatgtaaggatggtctgggcgagtacacttgtacatgcctggagggtttcgaaggcaaaaactgcgagttattcacccggaaattatgctccttagacaatggggactgcgatcagttctgccacgaggagcagaattctgtggtgtgtagctgcgctcgtgggtacacactcgcagataacggcaaggcttgtatcccaacgggcccttatccatgcggcaagcagacgttggagcgccggaaacgtagcgtcgcccaagctacctcatcgagtggggaggccccggatagcatcacctggaagccctacgatgctgcggacttggaccctacagaaaaccccttcgatctgcttgactttaaccagacccagcccgagagaggtgacaacaacttgacgcgcatcgtggggggccaggagtgtaaggacggagaatgcccttggcaagccttactgattaacgaagaaaacgagggtttttgtggggggactatcttgagcgagttctatattctcacagccgcccactgtctgtaccaggcgaaacgcttcaaggtgcgggtgggggaccgcaatacggaacaggaggaagggggggaggctgtccacgaagtggaggtcgtgataaaacataacagattcactaaggagacatacgattttgatattgccgtactgcggctcaagactcctataaccttccgaatgaatgtggccccggcctgtcttcctgagagggactgggccgaaagtacactcatgacgcagaagactggcatcgtgtccggcttcggccggacccacgagaaggggcgccaaagcacccgcctcaagatgctcgaggtaccctacgtggacaggaactcttgtaaactgtcaagcagctttataatcacccagaatatgttttgtgccggatatgatacgaaacaggaagacgcatgtcagggggatagtggtggtcctcacgtgactcgctttaaggacacatatttcgtgacgggcatcgtgagctggggggaggggtgtgctaggaaagggaagtatggcatctacaccaaggtgacagcattcttgaaatggatagaccgctcaatgaagacccgggggttgcctaaagcaaaatctcacgccccagaagtgatcacgtcaagtccgcttaaa

SEQ ID NO: 9342 - DNA, 1464 bp, synthetic construct
  misc_feature 1..1464: note = source = /note="Description of Artificial Sequence: Synthetic coding sequence"
  source 1..1464: mol_type = other DNA
atgggacgacctctccatctagtgctgctctcagccagtctcgccggtctcctccttctgggggagagtctattcattcgcagggaacaggccaacaacattctggctcgcgttacacgggcaaattcattcctcgaagagatgaaaaaagggcacctggaaagagagtgcatggaagagacctgtagttacgaggaggccagggaagtgttcgaggacagcgacaagactaatgagttctggaacaagtataaagatggcgatcagtgcgagacctctccctgccagaaccagggcaaatgcaaagacgggctgggggagtacacatgcacttgcctggagggctttgaggggaagaactgcgagttatttactaggaagctatgttccctggataacggcgactgtgaccagttttgtcatgaggaacagaattcagtggtctgctcatgtgccagaggctatacattagctgataacggcaaagcttgcataccaactggcccctatccatgcggcaaacagaccctcgaacgtcggaagagatctgtggcacaggccacaagctcttccggcgaagcccctgacagcataacctggaagccctacgacgccgctgacctggatcctaccgagaatccctttgacctcttggattttaatcaaactcagcccgagcgcggggacaacaaccttaccaggattgtcgggggacaggaatgtaaggacggcgaatgtccctggcaggccctactgataaatgaggagaatgaagggttctgcgggggcaccatcctgtccgagttttacattctcacagctgcccactgtctttatcaagccaagaggttcaaggtaagggtgggggacaggaataccgagcaggaggagggcggtgaagccgtccatgaggtcgaagttgtgattaaacacaaccggtttaccaaagaaacttacgattttgatatcgccgttctgcgtctgaagacccctatcaccttccggatgaacgtggctcccgcctgcctccccgaacgggactgggctgagagcactctgatgactcagaagaccggcatcgtgagcggcttcggccggactcacgagaagggcagacagagtaccaggctaaagatgttagaagtgccttacgttgaccgcaactcctgtaaactctcctctagttttataatcacacagaatatgttctgtgctggctatgacaccaagcaggaagacgcctgccagggcgactctggcggccctcacgtgacccggttcaaggacacctacttcgttactgggatcgtgtcctggggagaagggtgcgccagaaaaggcaagtatgggatttacacaaaggtgacagcctttctgaagtggattgaccgctccatgaaaacaagaggtttgcctaaagccaaatcacacgcacccgaggtgattacttcaagccctctaaag

SEQ ID NO: 9343 - DNA, 1464 bp, synthetic construct
  misc_feature 1..1464: note = source = /note="Description of Artificial Sequence: Synthetic coding sequence"
  source 1..1464: mol_type = other DNA
atgggtaggccccttcacctggtgctgctgtccgcctctctggccggactgctgctgctaggagaaagcctgttcattcggcgcgagcaggctaacaacatcctggcccgggtcacaagagctaatagttttctggaggagatgaaaaaaggacacttggagcgagaatgcatggaggaaacctgtagttacgaggaggccagggaagtcttcgaggactctgataaaacgaacgagttctggaacaagtacaaggatggcgatcagtgcgaaacttctccatgtcagaaccaggggaaatgtaaggatgggttgggcgaatatacctgtacgtgcctcgaaggattcgagggaaaaaattgcgaactgttcacccggaagctttgtagtctggataacggcgactgcgaccagttttgccacgaagagcagaactcagtggtgtgctcatgcgctagaggctatacgctggcagacaatggaaaggcctgtatacccaccggtccctacccatgcggtaagcagacgctcgagaggagaaaaaggagcgtggcacaggccacttcttcatcgggtgaagcccccgacagtatcacctggaaaccatatgacgcggcagatctggaccctacagaaaacccattcgatctgttggacttcaaccaaacacagcccgagcgcggagacaataacctgacacggattgttgggggccaggagtgtaaggacggggagtgcccatggcaggctcttcttatcaatgaggaaaacgaagggttctgtggcggcaccattctgagcgagttctatatcttaacggcagctcattgcctctaccaagctaagcgcttcaaggtgcgggtaggcgataggaatacggagcaggaggaaggcggggaggccgtacatgaagtggaggtcgtcattaagcacaatagattcacaaaagagacctatgatttcgacattgcggttttgagactaaagacacccattacgttcagaatgaacgtcgcccctgcttgtttgccagaacgcgattgggcagaatctacactgatgacgcagaaaacaggcattgtcagtggctttgggagaacgcacgagaagggacgccagtccacacggctcaaaatgctcgaagtgccctacgtggaccggaattcctgcaaactgtccagtagctttatcatcactcaaaacatgttctgtgctggttacgacacgaagcaggaggacgcctgccagggagactccggagggcctcacgtgacaaggttcaaagatacatactttgtaactggtatcgtctcctggggggaagggtgcgcacgcaaaggcaagtacggcatttacacgaaagtgacagctttcctgaaatggatagacaggtccatgaagacccgcggtctccccaaggccaagtcacacgcacctgaggtgatcacgtctagccccctgaaa

SEQ ID NO: 9344 - DNA, 1464 bp, synthetic construct
  misc_feature 1..1464: note = source = /note="Description of Artificial Sequence: Synthetic coding sequence"
  source 1..1464: mol_type = other DNA
atggggaggccattgcatctggtcctgctaagcgcaagcctcgccgggctgctcttgctgggtgagagcctatttatcaggagggaacaggcgaataatatcctggcccgtgtcacacgagccaacagtttcttagaggagatgaagaaagggcatctggaacgggaatgcatggaagagacatgtagttatgaggaggctcgggaggtgttcgaggactctgataagaccaacgaattttggaataagtacaaagacggtgatcagtgcgagactagcccgtgccagaatcaggggaaatgcaaagacggcctgggcgagtacacctgtacttgtttggaagggttcgaagggaaaaactgcgagctatttactcgcaagctgtgcagtttagataatggcgactgtgatcagttctgtcatgaggagcaaaactctgtggtgtgcagttgcgctcgcgggtacacattggcagataacgggaaagcctgtatccctaccggcccatatccttgcggaaaacagactctcgagcgacggaagaggtctgtggctcaggccacttcatcttcgggagaagcccccgactcaatcacctggaagccctacgacgcagccgacctggatcctacagagaatcctttcgatttactggatttcaatcaaacacagccagagagaggagacaacaatctaaccaggatcgtgggcgggcaggaatgtaaggatggggaatgcccttggcaagcgcttttaattaacgaggagaatgagggattctgcggtggtacaatactgtccgagttttatatcctcaccgcagcacattgtctgtaccaggccaaacgtttcaaagtaagagtcggagaccgcaacaccgaacaggaagagggaggtgaggccgtgcatgaagtggaagtggtgataaagcataatcggttcaccaaggaaacttacgactttgacatcgcagttttaagattgaagactcccatcacttttcgcatgaatgtcgcccctgcctgcctgccggagcgggactgggccgagtccacgctgatgacccaaaaaacggggatcgtctccggttttgggaggacccacgagaaaggtcggcagagtacacgtctgaaaatgctggaggtcccctacgtggacaggaattcctgtaagttgtccagttctttcattatcacacagaatatgttctgtgcagggtacgataccaagcaagaggacgcctgccagggcgactctggagggcctcatgtgacacgattcaaagacacttactttgttacgggcatcgtgagttggggagagggctgcgctcggaagggaaaatatgggatttatactaaagttactgctttcctgaagtggattgacaggtccatgaaaaccagaggacttccaaaggctaagagccatgctcctgaagtgatcacttcttctccactgaaa

SEQ ID NO: 9345 - DNA, 1464 bp, synthetic construct
  misc_feature 1..1464: note = source = /note="Description of Artificial Sequence: Synthetic coding sequence"
  source 1..1464: mol_type = other DNA
atgggtagaccgctacaccttgttcttctgtccgcctccttggccggcctgcttctgctcggggagtctctgtttatccgtagggaacaggctaacaatatcctggctcgggtcacacgcgccaattcttttttagaggagatgaagaaaggtcacctggagagagagtgtatggaggagacctgcagctacgaggaagcaagagaggtgttcgaggattccgacaaaactaacgagttctggaataagtataaagatggcgatcagtgtgaaacatcaccatgccagaaccaagggaaatgtaaagacggactgggagagtacacttgcacctgccttgaaggcttcgagggcaaaaattgcgagctgtttacccgcaagctgtgctctctggacaacggggactgcgaccagttctgtcatgaagaacagaattctgtggtctgtagctgtgcacgaggttatacactggccgacaatggaaaggcgtgcatcccaactggaccttacccctgcggaaaacagacgttggaaagaaggaaaagaagcgtggcacaggctacgtcaagctctggcgaggctcctgacagcatcacctggaagccttacgacgcagccgacttagaccctaccgaaaacccattcgatctcctcgactttaaccagacccagcccgagcgcggcgacaacaacctgactcggatcgtcggtgggcaggagtgtaaggacggggagtgtccctggcaggcactgcttattaacgaggaaaatgaggggttctgtggaggcacaatacttagtgagttctatatcctgaccgctgcgcactgcctgtaccaggctaagcgatttaaggtgcgggttggtgaccggaacacggaacaagaggagggaggagaggcggttcacgaggtggaggtggtgatcaaacataatagatttactaaagaaacttatgacttcgatatagccgtgctgaggctgaagactccaattacattccgcatgaacgtcgcacccgcatgcttgccagagcgcgactgggcagagagtacgttaatgacccagaaaacaggaatcgtttctggatttgggcgaacccacgagaagggacggcagagcacccggctgaaaatgctagaggtgccatatgtcgatagaaactcctgcaaattgagtagttcatttattatcacacagaacatgttctgcgcggggtacgatactaaacaggaagacgcctgccagggagacagtggaggaccccacgtaaccaggttcaaggatacgtacttcgtgacaggcattgtgagttggggggaagggtgtgctagaaagggcaaatacggcatatacactaaggtgacagccttcttaaaatggattgatcgctctatgaaaacacgaggcctgcctaaagctaagagccatgcaccagaggtaatcacttcctccccgttgaag

SEQ ID NO: 9346 - DNA, 1464 bp, synthetic construct
  misc_feature 1..1464: note = source = /note="Description of Artificial Sequence: Synthetic coding sequence"
  source 1..1464: mol_type = other DNA
atgggcaggccgctgcatctagtgctgctgagtgctagcctggctggtctgctcctgctgggggagtccctgtttattaggcgcgaacaggcgaataatatactggctcgcgtcacccgtgccaatagctttctcgaagaaatgaagaaaggccacttggaacgggaatgtatggaagagacgtgctcttatgaggaggcaagagaagttttcgaggattccgacaagacaaatgaattctggaacaaatacaaggacggtgatcagtgcgagactagcccttgccagaaccagggcaagtgtaaggatggtctcggcgaatatacctgtacctgcttagagggctttgagggtaagaattgtgagctgtttactcggaaactgtgttctctggacaacggtgactgtgatcaattttgccacgaggaacagaacagcgtggtttgttcatgcgcaagaggttacacccttgctgataacggcaaagcgtgtatcccgactggcccgtatccttgcggtaaacagaccctcgaacgccgcaagcggtccgtcgcgcaagcaacgtcttcctccggcgaggcgcccgattccattacgtggaagccgtatgatgccgcggacctggatccaaccgaaaatccgttcgacctgctggacttcaatcagacccagccagagcgcggcgataacaatctgacgcggatcgtgggcggacaagaatgcaaggatggtgagtgtccttggcaggctcttctgattaatgaagaaaacgagggcttttgcggtggcacgattctgtccgagttttacatcttgactgctgcacactgtttgtaccaagctaagcgttttaaggttcgggttggcgatcgcaatacggagcaagaagagggcggtgaggcggtccatgaggtagaagttgttatcaaacacaaccgctttaccaaggaaacctacgacttcgacatcgcagtcttacgcctgaagactcctattacatttcgcatgaacgtggcgccggcatgtctgccggaacgcgactgggcggagtcaaccctgatgacccagaaaaccggcatcgtctctggcttcgggcggacccacgaaaaaggtcgccaaagcactcgcctgaaaatgctggaggtgccatacgtcgatcgcaacagctgcaaactgagctcttctttcataatcactcagaacatgttttgcgcgggttacgatacgaaacaggaggacgcctgccaaggtgatagcggcgggccacatgtcacccggttcaaagacacttatttcgttaccggtattgttagctggggtgagggatgcgcgcgtaagggtaaatacggtatttatactaaggtaaccgccttcctgaagtggatagaccgaagtatgaaaacccggggtctgccgaaagcgaagagccatgcaccagaagttatcaccagctcgcctctgaag

SEQ ID NO: 9347 - DNA, 1464 bp, synthetic construct
  misc_feature 1..1464: note = source = /note="Description of Artificial Sequence: Synthetic coding sequence"
  source 1..1464: mol_type = other DNA
atgggcaggcctttacatctggtgctcttgagtgcaagcctggctggactgctcctgttaggcgaatcccttttcatccgaagggagcaagctaacaacatcctggcacgggtgacaagagccaactcattcctcgaggaaatgaagaaagggcatctggaaagagagtgcatggaagagacatgctcatatgaggaggctcgcgaggtgttcgaagattccgacaaaaccaacgagttctggaacaaatacaaggacggcgatcagtgcgagaccagtccctgccaaaatcagggtaagtgcaaagacggcttgggcgagtatacttgcacctgcctggaaggcttcgaaggcaagaattgcgaactcttcacaagaaaactttgttccttggataacggcgattgtgaccagttttgccatgaggaacagaacagcgtagtgtgctcctgtgcccgcggatatacactcgcagataacgggaaggcatgcatccccactggtccctatccttgcggaaagcaaaccttggaaaggcggaaacgtagcgtggcccaggcaacgtcttcatcgggtgaagcccccgactcgatcacatggaagccttacgatgccgccgacctggatccaacagaaaacccttttgatctgctcgattttaaccagacccagccagaacggggagataacaatctgacacgcatcgttggggggcaagagtgtaaggatggggaatgcccttggcaggctctcctgatcaacgaagaaaacgaggggttttgcggggggacgatcttaagtgagttttatatcttgaccgcggctcattgtctttatcaagctaagaggttcaaggtgcgggttggggacagaaatactgagcaggaagagggaggagaagccgtgcacgaagtcgaggttgttatcaaacacaaccgcttcaccaaggagacctacgattttgacatagccgttcttcgtctcaaaacacctataacattccgtatgaacgtcgctcctgcttgcctaccagagagggactgggcggagtctactctaatgacccagaagaccggcatcgttagcggattcgggcggacccatgaaaaagggagacaaagcacgcgcctgaaaatgcttgaagttccctacgtggaccggaacagctgcaaactctccagcagtttcatcattactcagaacatgttttgcgcaggctacgacaccaaacaagaggacgcctgtcagggagatagcggaggaccccacgtcacacgcttcaaggatacctacttcgtcaccggcatagtgagctggggggagggttgtgcacgaaaagggaaatacgggatctatactaaagttacagccttcctgaagtggattgatagatctatgaaaaccagaggcctgcccaaggctaaaagccatgctcccgaagtcatcaccagcagccctttgaag

SEQ ID NO: 9348 - DNA, 1464 bp, synthetic construct
  misc_feature 1..1464: note = source = /note="Description of Artificial Sequence: Synthetic coding sequence"
  source 1..1464: mol_type = other DNA
atgggacgacctctgcaccttgtgctgctgagcgcaagcctggccggcctgctcctgctgggtgaatctctgttcataagacgagaacaggctaacaacattcttgccagagttactagagccaactcatttctggaggaaatgaagaaaggacacctggaaagggagtgtatggaggaaacctgctcttatgaggaagcgagggaagtgtttgaggatagtgataagacgaatgagttctggaacaagtacaaggatggagatcaatgcgagacttccccctgtcagaatcaggggaagtgcaaggatgggctgggcgagtacacctgcacatgtcttgaaggctttgaggggaaaaattgcgaattgtttaccagaaagctgtgctctcttgataatggagattgtgatcagttctgccatgaagaacagaactccgtcgtgtgctcttgcgctcgcgggtatacacttgcagataatggaaaggcctgcatcccaactggaccatacccatgcggtaagcagactcttgagcggcgaaaaaggtctgtggcccaggcaactagtagtagtggcgaggcccctgattcaatcacttggaaaccttacgacgctgcagatctcgacccaactgaaaacccattcgaccttttggattttaatcaaacgcaaccggaaagaggcgacaacaacctaacccgcatagttgggggacaggaatgtaaagacggcgaatgcccctggcaggctcttttgattaacgaggaaaacgaggggttttgcggcggaaccatcttgagcgaattctacattctgacagccgcacattgtctgtatcaggccaaaaggttcaaggtaagggtgggcgacagaaacacagaacaggaggaaggtggagaagcggtgcacgaagtcgaagtcgttatcaagcataatcgatttaccaaggagacttacgacttcgacatcgcggtgctcagactgaaaacccccattacttttaggatgaatgtagcgcctgcatgtcttccagagcgagactgggcggagtccaccctgatgacgcagaagaccggcatcgtctcgggcttcgggagaacccacgagaaggggagacagtctacacgactgaagatgctcgaggtcccttatgtggacagaaacagttgcaaattgtcctcttcatttatcattacacagaatatgttttgcgctggttacgatacaaagcaggaagacgcctgtcagggcgacagcggcggaccccatgtgacgaggtttaaggatacctacttcgttacaggaatagtgagttggggagaaggctgcgccagaaaaggtaaatatggaatctacaccaaagtgactgcctttttgaagtggatagacaggagtatgaagactagaggcctacctaaagcaaagtcgcacgctccagaggtgatcaccagttcacctttgaag

SEQ ID NO: 9349 - DNA, 1464 bp, synthetic construct
  misc_feature 1..1464: note = source = /note="Description of Artificial Sequence: Synthetic coding sequence"
  source 1..1464: mol_type = other DNA
atggggcgacccctccaccttgtgctgctcagtgcctcactcgccggcctgctcctcctgggagagagcctcttcatcagacgcgagcaggctaacaacattctcgcccgtgtcacgcgggccaatagttttctcgaggagatgaaaaaaggccatttggagcgtgagtgcatggaagagacctgctcttacgaggaagcccgtgaggtcttcgaagattcggataagactaacgaattctggaataagtataaggacggcgatcagtgtgaaacatcgccttgccaaaatcagggtaagtgcaaggatggcctcggcgagtatacctgcacctgcctggaaggattcgagggtaagaactgtgagctcttcacccgaaagttgtgcagcttggataacggtgattgcgaccagttttgtcacgaggagcagaacagtgtcgtgtgttcttgtgctcggggttacacgcttgccgacaacggtaaggcttgtatcccgaccggcccatacccttgcggtaagcagacgttggagcgtcgcaagcgttctgtcgcccaggccactagtagttcaggtgaagctcccgattcaatcacgtggaagccgtacgatgctgccgacctggaccccactgaaaaccccttcgatctgctggacttcaaccagactcagcccgagcgtggcgacaataacttgacccgtatcgtggggggccaggagtgcaaggatggggaatgcccgtggcaggctctgctgatcaacgaggagaatgagggcttctgcggtggaaccatcctgagcgaattctacatccttaccgcggctcactgtctttaccaagctaagcgttttaaggtcagagtcggcgaccgaaataccgagcaggaggaggggggtgaggccgtgcacgaggttgaggtggtcatcaaacataaccgttttactaaagaaacctatgactttgacattgccgtgctacgtctcaaaactccaattacctttcggatgaacgtggcccccgcctgtcttccggagcgcgattgggccgaatccacgctcatgactcagaaaaccggcatcgtctctggtttcggccgcacccacgagaagggtcgccaatccacccgcctcaagatgctggaggtgccgtacgttgaccggaactcctgtaagttgagctcttcgtttattatcacccagaacatgttctgcgcaggctacgatacgaagcaggaagatgcttgtcagggcgattctggcggtcctcatgtgaccaggttcaaggatacttacttcgtcaccggtatcgtcagctggggagaaggctgcgctcgtaaaggcaagtatgggatctatactaaggttacggcttttttgaagtggatcgaccggagcatgaagacacgtggtctaccgaaggctaaatcgcatgcccccgaggttatcacctcctcgccgctgaag

SEQ ID NO: 9350 - DNA, 1464 bp, synthetic construct
  misc_feature 1..1464: note = source = /note="Description of Artificial Sequence: Synthetic coding sequence"
  source 1..1464: mol_type = other DNA
atgggcagaccactccatctcgttttgctctccgccagtctagccggtctgcttctgcttggcgagagtctcttcattcggcgggagcaggccaacaatattttggccagggtgacaagagccaatagctttcttgaagagatgaagaagggacacttggagcgggaatgtatggaagagacgtgttcttatgaggaggcaagggaagtgttcgaggactctgacaagactaacgagttctggaacaaatacaaggacggggatcagtgtgaaacctcaccttgtcagaaccaggggaagtgcaaggatggcctgggcgaatatacctgtacgtgcttggaggggttcgaaggtaaaaattgtgaactgttcacaaggaagctatgcagcctggataacggcgactgtgatcagttttgccatgaggagcagaacagtgtcgtgtgcagttgtgcacgaggttatacgttagccgacaacggtaaagcttgtatccccaccggtccatacccttgtggcaaacagaccctagagcggcggaaaaggtctgtggcccaggcaacatcgagcagtggggaggctcccgacagcattacgtggaagccttatgatgctgccgatctggatcccaccgaaaacccatttgacctgcttgactttaatcaaacacagccagaaaggggcgataacaacctaacccggattgtgggagggcaggaatgtaaggacggagagtgtccatggcaagcgctgctcattaatgaagaaaatgagggattttgcggagggactattctatctgaattttacatcctgactgctgcccactgcctctaccaggcgaaacggttcaaagtgcgagtgggcgaccggaataccgagcaggaagaagggggcgaggccgtccatgaagtggaggtggtcattaaacataaccgattcactaaagagacctacgacttcgatatcgctgttctgaggctgaagacaccaattacattccgcatgaatgtggcacctgcgtgccttcctgaacgggactgggcagaatccactctgatgacccagaagaccgggattgtaagcggctttggcagaactcatgaaaagggcaggcagagcactcgtctgaaaatgttggaagtgccatatgtggaccggaactcatgtaaactctcgtcttcattcattatcacacagaatatgttttgtgccggatatgataccaagcaggaggatgcatgtcagggcgattctggtggccctcatgtaacccggtttaaagacacgtacttcgttacgggcatcgtgtcttggggcgaggggtgtgccaggaaagggaagtacggtatatataccaaggtcaccgcatttcttaagtggattgatcgctctatgaagacccggggcctcccaaaggcaaaaagccacgcccccgaggtcattacatcaagccccctgaag

SEQ ID NO: 9351 - DNA, 1464 bp, synthetic construct
  misc_feature 1..1464: note = source = /note="Description of Artificial Sequence: Synthetic coding sequence"
  source 1..1464: mol_type = other DNA
atgggtcgaccgctacatctagttctactatcggcgtcgttagcgggtttactactattaggtgaatcgctatttatacgtcgtgaacaagcgaataatatactagcgcgagttacgcgagcgaattcgtttttagaagaaatgaaaaaaggtcatttagaacgagaatgtatggaagaaacgtgttcgtatgaagaagcgcgtgaagtatttgaagattcggataaaacgaatgaattttggaataaatataaagatggtgatcaatgtgaaacgtcgccgtgtcaaaatcaaggtaaatgtaaagatggtttaggtgaatatacgtgtacgtgtttagaaggttttgaaggtaaaaattgtgaactatttacgcgaaaattatgttcgctagataatggtgattgtgatcaattttgtcatgaagaacaaaattcggtagtatgttcgtgtgcgcgtggttatacgttagcggataatggtaaagcgtgtataccgacgggtccgtatccgtgtggtaaacaaacgctagaacgacgaaaacgttcggttgcgcaagcgacgtcgtcgtcgggtgaagcgccggattcgataacgtggaaaccgtatgatgcggcggatttagatccgacggaaaatccgtttgatctattagattttaatcaaacgcaaccggaacgaggtgataataatttaacgcgtatagtaggtggtcaagaatgtaaagatggtgaatgtccgtggcaagcgttattaataaatgaagaaaatgaaggtttttgtggtggtacgatactatcggaattttatatactaacggcggcgcattgtctatatcaagcgaaacgttttaaagtacgtgtaggtgatcgtaatacggaacaagaagaaggtggtgaagcggttcatgaagtagaagtagtaataaaacataatcgttttacgaaagaaacgtatgattttgatatagcggtattacgactaaaaacgccgataacgtttcgaatgaatgttgcgccggcgtgtttaccggaacgtgattgggcggaatcgacgttaatgacgcaaaaaacgggtatagtatcgggttttggtcgtacgcatgaaaaaggtcgtcaatcgacgcgtttaaaaatgctagaagttccgtatgtagatcgtaattcgtgtaaactatcgtcgtcgtttataataacgcaaaatatgttttgtgcgggttatgatacgaaacaagaagatgcgtgtcaaggtgattcgggtggtccgcatgtaacgcgttttaaagatacgtattttgttacgggtatagtatcgtggggtgaaggttgtgcgcgaaaaggtaaatatggtatatatacgaaagttacggcgtttttaaaatggatagatcgatcgatgaaaacgcgtggtttaccgaaagcgaaatcgcatgcgccggaagttataacgtcgtcgccgctaaaa

SEQ ID NO: 9352 - DNA, 1464 bp, synthetic construct
  misc_feature 1..1464: note = source = /note="Description of Artificial Sequence: Synthetic coding sequence"
  source 1..1464: mol_type = other DNA
atggggcgacctctacaccttgtgctccttagcgccagcctcgctggtctgctgttgttgggcgagagtctcttcattcgtagggagcaggccaacaatatactggctcgggtcactcgcgccaacagctttctggaggagatgaaaaagggtcacctcgaacgagaatgtatggaagagacgtgttcatacgaggaagcgcgtgaagtgtttgaggatagcgataagaccaacgagttctggaataagtacaaggatggcgaccagtgcgagacctccccttgtcagaaccaaggcaagtgtaaagatgggctgggtgagtacacgtgcacatgtctggaaggtttcgaaggcaaaaattgcgaactgtttactaggaaactgtgttccttagataacggcgactgtgaccagttctgccacgaggaacagaactccgtcgtgtgttcctgtgcgcgagggtacacgctcgccgataatggcaaggcttgcatccccactggcccttatccctgtgggaagcaaactctggaacgaagaaagagatcggtcgctcaggccaccagctcttctggcgaagcacccgacagtatcacctggaagccttatgatgccgccgatttggaccccactgagaatccctttgatttgttggatttcaatcagacacagcccgagagaggagataataacctgactcggattgtgggtgggcaggagtgtaaggacggcgaatgcccgtggcaggcccttctgattaacgaagagaatgaaggtttctgtggaggaactattctgtcagaattttacattctcactgccgctcactgcctttaccaggctaagagatttaaagtgcgggtgggcgaccgcaacactgaacaggaggagggaggggaggcagtacacgaagtcgaggtggttattaaacacaatcgattcactaaagagacatatgactttgatattgccgtcctgcggctcaagacgcccattacattcaggatgaacgttgccccagcatgcttgcccgaaagggactgggccgagagtacactgatgacccaaaagacaggtatagttagcgggttcggacgaacccacgagaaaggtcggcagtccacccggcttaagatgctggaagttccctacgtggaccgtaactcatgtaaattgtcaagttcttttatcatcacccaaaatatgttttgcgccggttatgataccaagcaggaagacgcctgccagggtgattccggaggcccccatgtgaccagattcaaagatacgtactttgtaactgggatagtgagctggggcgaagggtgcgcccgcaagggcaaatatggaatttacaccaaggttacggctttccttaagtggatcgataggtctatgaaaactagaggactgccaaaggctaaaagccatgcgccagaagtgattacatcgagtcccctgaag

SEQ ID NO: 9353 - DNA, 1464 bp, synthetic construct
  misc_feature 1..1464: note = source = /note="Description of Artificial Sequence: Synthetic coding sequence"
  source 1..1464: mol_type = other DNA
atgggcaggcccctgcacctagtcctgctgagcgcttcactcgccgggctgcttctcctcggggagagtctgttcatcaggagggaacaggccaataatatactggcaagggtcaccagagctaacagttttcttgaagagatgaaaaagggccatctggagcgagaatgtatggaggagacgtgtagttacgaggaggctcgggaggtcttcgaggactccgataaaactaacgagttctggaacaagtataaagatggtgaccagtgtgagacatctccctgccagaatcagggcaaatgcaaagacggactaggtgaatatacatgtacctgtcttgaaggatttgagggaaagaattgtgaacttttcacgcgcaaactgtgctccctggacaacggcgattgcgaccaattctgtcacgaggaacagaatagcgtggtgtgctcatgcgcacgggggtacaccctggccgataacggaaaggcctgcatccccaccgggccttacccatgcgggaagcaaaccctggagaggcgaaaacgttccgtcgcccaggcgaccagctcttccggtgaagccccagactcaataacgtggaaaccatatgatgccgccgacctggaccctacagagaacccctttgacctgctcgattttaaccagacacagcctgagcggggggataacaatctgaccagaatagtggggggacaggagtgcaaagatggcgaatgcccctggcaggccctgttgataaacgaagagaatgagggcttttgtggcggaactatactctctgagttttacatactaaccgcggctcactgcctctatcaggctaagagattcaaagtcagagtaggggacagaaatactgagcaggaggagggcggggaggcagtgcacgaggtagaggtggtcatcaaacataatcggttcacaaaggagacctacgacttcgacatcgctgtgctgcggttaaaaacaccaatcacgttccggatgaatgtcgcccctgcttgcctcccggagcgggactgggccgaaagcacactcatgacgcaaaagacaggcattgtgtccggattcgggagaacccatgaaaaaggtcgtcagtcaacaaggctaaaaatgttggaagtgccttatgtcgataggaactcctgtaaactttcaagctctttcatcatcacgcagaacatgttctgtgccggctacgataccaagcaggaagacgcttgccaaggggactctggggggccacacgtgacccggttcaaggacacctacttcgtgacaggcatcgtgtcctggggggaaggctgtgcccggaaaggcaaatatggcatatacacaaaggtgaccgcttttctaaagtggatcgatcggtcaatgaagactcgcggactacccaaagccaagtctcatgctcctgaagtgatcacttcttcacctctgaaa

SEQ ID NO: 9354 - DNA, 1464 bp, synthetic construct
  misc_feature 1..1464: note = source = /note="Description of Artificial Sequence: Synthetic coding sequence"
  source 1..1464: mol_type = other DNA
atgggtcggccactgcacctcgtgctgctctcggcgtctctggcggggctcttgctgctgggggagtcactgttcatccggcgcgaacaggcaaataatatcctcgcccgggtgacccgggccaactcgtttctcgaggagatgaaaaaaggtcacctggagagagaatgcatggaggagacttgcagctacgaagaagcccgcgaggtctttgaggactcagacaagaccaacgagttctggaacaaatacaaggacggcgatcaatgcgaaacctccccatgtcagaaccagggcaaatgtaaggacggactgggtgaatacacttgcacttgtctcgaggggttcgaaggaaagaattgcgaattgttcactcgaaaactgtgctcgcttgataatggggattgcgatcaattctgccatgaggagcagaactcagtggtgtgttcgtgcgccagaggatacactttggccgataacggaaaggcctgtatcccgactggaccatacccttgcggcaagcagactctggaacggcgcaagcgctcggtcgctcaggctacctcgtcctccggagaagccccggacagcatcacctggaagccatacgatgcggccgatctcgacccgactgagaaccctttcgacctgctggacttcaaccagacccaacctgaacgtggagacaacaatctcactaggattgtcggaggtcaagaatgtaaagacggagagtgcccctggcaggccctgctgatcaatgaggagaatgagggtttttgcggaggcactatcctctccgaattctatattctgaccgcagcacactgcctgtaccaagcgaagagattcaaggtgcgggtgggagatcgcaacactgagcaggaagaaggaggcgaagcagtgcacgaagtcgaagtggtcatcaagcataacagattcactaaggaaacctatgacttcgatatcgccgtgctgcgccttaagaccccgatcacttttaggatgaacgtcgcccccgcttgcctcccggaaagagattgggcggagtccacgctcatgacgcagaaaaccggaatcgtgtccggcttcggccgcacccacgaaaaagggcgccagtcgactaggctgaagatgctggaagttccatacgtggaccgcaatagctgcaaactgagctcatcgtttattattacccagaacatgttttgcgcgggatacgataccaagcaagaggacgcttgccaaggagactctggcggaccgcatgttacgaggttcaaggacacctacttcgtgactggtatcgtgtcctggggggaaggatgtgcacggaagggaaagtacggcatctacaccaaggtcaccgcgttccttaagtggatcgacagatccatgaaaacgcggggacttcccaaggcaaagagccatgctccggaagtgatcaccagctcaccgttgaag

SEQ ID NO: 9355 - DNA, 1464 bp, synthetic construct
  misc_feature 1..1464: note = source = /note="Description of Artificial Sequence: Synthetic coding sequence"
  source 1..1464: mol_type = other DNA
atgggtcgaccccttcatttggtgcttctgagcgctagcttggccggcttgttgctcttgggcgaatccttatttatacggcgcgagcaggctaataacatactcgctcgggtgacccgcgccaattcgttcttggaggaaatgaaaaaggggcacctcgaacgggaatgcatggaagagacctgctcgtacgaagaggcaagggaagtgttcgaggacagtgataagaccaacgagttctggaacaaatataaagatggtgatcaatgcgagaccagtccttgtcaaaaccagggaaaatgtaaggatgggctgggcgaatatacctgtacttgtctcgagggctttgaaggtaaaaactgcgagctgtttactcgtaagctctgttccctagacaatggagattgcgaccaattttgtcacgaagagcagaatagcgttgtgtgttcatgcgcccgagggtacaccctggccgacaatgggaaggcttgtatccccacgggcccttatccctgcggaaaacagacacttgagagacggaaacggagtgtagcccaggcaacctccagctcaggggaagcacccgattccataacgtggaaaccttacgacgcagccgacttggacccaaccgaaaacccgtttgatctgctggattttaatcaaacccagcccgaacgcggtgataacaacttgacgcgaatagtgggcggccaggaatgtaaggacggggagtgtccatggcaggccctccttataaacgaagagaacgagggcttttgcgggggtacgatcctgtcggaattttatatcctgacagccgctcattgtttgtatcaagctaaacgctttaaggtgagagtcggggataggaacaccgaacaggaggagggcggcgaggccgtgcacgaggtagaagttgtgattaagcacaaccggtttacaaaggagacatacgactttgatatcgccgtccttaggctcaagacgcccattacatttcggatgaacgtcgcgcctgcgtgcctacctgaaagggactgggctgagagcactttgatgacgcagaaaactggaattgtgagcggctttgggaggactcacgagaaaggaagacagtcgactaggctaaaaatgctcgaggtaccatacgtggataggaactcatgtaagttatcctcttctttcataattacccagaatatgttttgcgctggctacgacaccaaacaggaagatgcttgtcaaggagactctggaggaccccacgttacacgttttaaggacacttatttcgtaaccggaattgtgtcctggggcgaaggctgtgctaggaaaggcaagtacggaatctatactaaggtcacggcattcctgaaatggattgaccgatccatgaaaactcgcggcctgcctaaggccaagtctcacgcacccgaggtcattactagttcccctctgaag

SEQ ID NO: 9356 - DNA, 1464 bp, synthetic construct
  misc_feature 1..1464: note = source = /note="Description of Artificial Sequence: Synthetic coding sequence"
  source 1..1464: mol_type = other DNA
atgggtcgacctctacaccttgtacttctttctgcttcattggcaggtcttttgttgcttggtgaatctctttttattagaagagaacaggctaacaacatccttgcacgcgtcacacgagccaattcctttttggaagagatgaagaagggccacttagagagggaatgtatggaggaaacttgcagttacgaagaagcacgagaagtgtttgaagattcagataagactaatgaattctggaacaagtataaagatggagatcagtgtgagactagtccctgtcaaaaccaaggaaagtgcaaagacggtcttggcgaatatacgtgcacttgtcttgagggcttcgaggggaagaattgtgagttgtttaccaggaagctctgctctctcgataatggggactgtgatcagttctgccatgaagagcaaaattctgtggtgtgcagttgtgcaaggggttatacacttgctgacaatggaaaagcatgcatccccactgggccttacccctgtgggaagcagacgttggaaagacgaaagcgctcagtcgctcaagccacctcctcttccggtgaggctcctgatagtattacctggaaaccttatgatgccgccgatctagatccaactgaaaatccgttcgatttgcttgatttcaatcagactcagcctgagagaggggataacaatcttacacgtatcgtaggtggacaagaatgtaaggatggagagtgcccctggcaggccctgcttattaatgaagagaatgaagggttctgcggtggtacaatcttgtcagagttctacatcctcaccgcagcccattgtctctatcaggcaaagaggttcaaggtgcgggtgggggatagaaataccgagcaggaggagggaggcgaggctgtacatgaagttgaagtggtaatcaaacataacaggtttactaaagagacctacgattttgatatcgccgtgctcagattgaagacaccaatcacgttccgtatgaatgtggctccagcatgccttcctgagagagattgggccgaaagtacgctcatgacccaaaagacgggcatagttagcggttttgggcgaacacatgagaaaggacgacagagtacccggttgaaaatgcttgaagtaccctatgtggatcgaaattcctgcaagctgtcatcaagctttattataacacagaacatgttctgcgccggttatgatactaagcaagaggatgcttgtcaaggggatagcggtggaccacacgtcactcgcttcaaggatacatatttcgtaacaggcattgtgtcttggggggaaggttgcgcgagaaaaggaaaatatggtatttacacaaaggttaccgcttttctcaaatggatcgataggtcaatgaagacaagagggttaccaaaggcaaagtctcatgctccagaggtgataacttcctcccctctaaaa

SEQ ID NO: 9357 - DNA, 1464 bp, synthetic construct
  misc_feature 1..1464: note = source = /note="Description of Artificial Sequence: Synthetic coding sequence"
  source 1..1464: mol_type = other DNA
atgggacgtccacttcatctcgttctcctgagtgcgagtctggctgggctgttgcttcttggcgaaagccttttcatacggcgagaacaggcaaacaacattctggcacgggtgacacgggccaatagttttttagaggaaatgaagaaaggccatctagagagggaatgtatggaggaaacctgctcttacgaagaagcgcgcgaggtatttgaggactccgacaagactaacgaattctggaataagtacaaagatggggatcagtgtgagacctccccctgtcagaatcaagggaaatgcaaagatggattaggagagtacacttgtacgtgtctggagggatttgagggcaaaaactgcgagctcttcaccaggaaattatgcagtctggataacggggattgtgaccagttttgtcatgaggagcagaatagcgtggtctgctcttgcgcgcgcggatacacactggccgacaatggaaaggcttgtattcctaccggtccctacccatgtggcaaacagaccctggagaggaggaaaagatcagtcgcccaggctacaagctcatctggtgaggcgccagattccataacttggaagccctatgacgcagccgacctggaccctacagaaaacccctttgacctgctggacttcaaccagacgcagcccgagcggggggacaacaacctgacgcgtattgtgggaggacaggaatgtaaggatggcgaatgcccatggcaagccttgctcattaatgaggagaatgaagggttctgtggcggaactattctgagcgagttctacatcctgaccgcggcacattgtctttatcaggctaagcgctttaaagtcagggtcggggacaggaataccgagcaggaggaagggggggaggctgtgcacgaggttgaagttgtcataaaacataacaggttcaccaaggagacctatgactttgacatcgccgtgctgcggctgaaaactcccataacctttagaatgaacgttgcgcccgcatgtctgcccgaaagggattgggccgagtccactctgatgacacagaagaccggcatcgtgtcaggcttcggacgtacccatgaaaaaggcaggcagagcactagactcaaaatgttggaggtgccatacgtcgatcggaattcctgcaaactgagttcatccttcatcataacacagaacatgttttgcgcaggttatgacaccaaacaagaggacgcatgccagggtgattctggggggcctcatgtaacccggtttaaggatacctactttgtcacaggtattgtgtcgtggggcgagggatgtgctcggaagggaaagtacggcatttacaccaaggtgactgccttcctgaagtggatcgacagatctatgaagacaaggggactccccaaggcaaaaagtcatgcccctgaggtgatcactagtagcccgctgaag

SEQ ID NO: 9358 - DNA, 1464 bp, synthetic construct
  misc_feature 1..1464: note = source = /note="Description of Artificial Sequence: Synthetic coding sequence"
  source 1..1464: mol_type = other DNA
atgggccgccccctccacctggtccttttgagcgcctccttggctggtctgctcttgttgggtgaaagccttttcatcaggcgcgaacaggcgaacaacatcctggctagagtcacacgcgcgaactccttcctggaggaaatgaagaagggccatctggagagagagtgcatggaggagacctgttcatatgaggaggccagggaagtgttcgaagactccgacaaaacaaatgagttctggaataagtataaggatggagatcagtgtgaaacctctccgtgtcagaaccagggaaaatgtaaggatggactgggcgagtacacctgcacttgcttggagggctttgagggtaagaattgcgaactctttacgagaaagctctgctccctggataacggagactgtgatcagttttgccacgaagagcagaacagcgtggtatgttcctgtgctagaggatacactttggcagacaatggaaaagcttgtatacccaccggtccctatccctgcggcaagcagacgttggagaggcgcaaaaggtctgtggcgcaagctaccagctctagtggtgaggccccagactctatcacgtggaagccatacgacgctgccgatctggaccctacagagaacccttttgatctgttggacttcaaccaaactcagcctgagaggggagataacaacttgactaggatcgtcggcggccaagaatgcaaggatggcgagtgtccctggcaggccctcttgattaacgaagagaacgagggcttctgcggcggaacaatcttgtctgaattctacattctgacggctgcgcactgcctgtaccaggccaagcgctttaaggtaagggtgggcgatagaaataccgaacaggaggagggtggcgaagcggtgcacgaggttgaggtggtaattaaacacaaccgcttcactaaggagacttacgatttcgacatcgcagtccttcgcctcaagacaccaatcacctttagaatgaatgtggcccccgcttgcctgccggagagagattgggcagagtcaacccttatgactcaaaagacgggtatcgtatctggttttggccgcactcacgagaaaggaaggcagtccacaagacttaagatgcttgaggtgccctacgttgacaggaactcttgcaagctgtcttcttcatttatcatcactcagaacatgttttgcgccggttacgacactaagcaagaagatgcctgccagggcgacagcggaggaccccatgttactcgcttcaaagatacatattttgtgactggaattgtaagctggggcgaaggatgcgctaggaagggtaagtacggtatctatacaaaggtcacggctttcctgaagtggattgacaggagcatgaagaccaggggccttcctaaggcgaagtctcatgcgccagaggtgattacatctagcccactcaag

SEQ ID NO: 9359 - DNA, 1464 bp, synthetic construct
  misc_feature 1..1464: note = source = /note="Description of Artificial Sequence: Synthetic coding sequence"
  source 1..1464: mol_type = other DNA
atgggtcgccctctgcacctagtgctgctcagcgccagcctggccggcctgcttctgcttggcgagagcttgttcatccggcgagagcaggctaataatattttagctcgagttaccagagctaattctttcttggaggaaatgaaaaaaggacatttggaaagggagtgcatggaggagacttgcagttatgaggaggcccgcgaagtgttcgaagactcagacaaaaccaacgagttttggaataaatacaaggatggggaccagtgcgaaacctcaccgtgtcagaaccagggcaagtgtaaggacggccttggtgaatatacatgcacatgtctggaagggttcgaaggcaagaattgcgaactgtttacacggaaactgtgtagcctagataatggagactgtgaccagttttgtcacgaggagcagaatagtgtggtctgttcctgcgcacggggctacacactggccgataatggcaaagcatgtatccctacgggtccatacccgtgcggcaaacagaccctagagagacgaaagaggagtgtggctcaggctacatcctccagcggggaagcccctgattctatcacttggaaaccctacgacgcggcagacttagaccccactgagaaccctttcgatctgctggatttcaaccagactcaacctgagcgaggtgacaacaatctgaccagaatcgtaggcggacaggagtgtaaagatggcgaatgtccatggcaggccctattgatcaacgaagaaaatgaggggttctgcgggggcaccatcttgtctgaattctacatcctgacagccgcacactgcctgtatcaagccaaaaggtttaaagttagagtgggagatcgcaacactgaacaggaagaaggcggagaagctgttcacgaagtggaggtcgtcataaagcacaatcggttcacgaaagagacttacgacttcgatattgccgttttacgtcttaaaacccctataacttttagaatgaatgtagctcccgcttgcctgccagaaagggattgggctgaaagcacgctcatgacccagaagacaggcatcgtctcgggttttggcagaacacacgaaaaaggaaggcagtctacacggctgaagatgctggaggtgccttacgtggatcgaaactcatgcaagctttccagctccttcatcatcacccagaatatgttttgcgccggatacgacaccaagcaggaggatgcctgccagggggattctggtgggccccatgtcacccggttcaaagatacctacttcgtgactggcattgtgtcctggggagaaggctgcgctagaaagggtaagtacggtatctatactaaggtcaccgctttcttaaagtggatagatcggtcgatgaaaaccagagggttacctaaggctaagtctcacgctccagaggtaataacttccagccctctgaaa

SEQ ID NO: 9360 - DNA, 1464 bp, synthetic construct
  misc_feature 1..1464: note = source = /note="Description of Artificial Sequence: Synthetic coding sequence"
  source 1..1464: mol_type = other DNA
atgggcagacctcttcacctggtcctcctgtccgcctcccttgcagggctgctgctactaggggagtcacttttcatcagaagggaacaagcaaacaacattctggcaagagtgacaagggctaactcttttctggaggagatgaagaaggggcacctggagagagaatgcatggaggaaacttgtagttacgaggaagcaagagaggtctttgaggattcagataaaacaaacgaattctggaacaagtacaaagatggcgaccagtgtgagacctcgccctgccagaatcagggtaagtgtaaagacgggctcggcgagtatacttgcacatgcctagagggcttcgaaggtaagaactgcgaactctttaccaggaagctgtgtagcctggataatggcgactgtgaccagttctgccacgaggaacagaattcagtggtttgcagctgcgcaaggggctatactctcgctgacaatggcaaagcatgcatccccacgggaccatatccgtgtgggaaacagacgctcgaacgccgcaagagatccgtggcccaggctacctctagctctggtgaagcccccgactccattacctggaagccatatgacgccgccgacctggatcctaccgaaaacccttttgatttgcttgactttaatcagacacagccagagaggggcgacaataatttgacccgcattgtgggaggacaagagtgcaaggatggtgaatgcccttggcaagctttgctgatcaatgaagagaacgaaggattctgtggagggacaattctcagcgagttctatatcctcactgcggctcactgtctgtatcaggctaagcggttcaaggtcagggtaggagacagaaataccgagcaggaagaaggcggcgaggctgtccatgaagtggaggttgtgatcaagcacaacagattcaccaaagagacctacgattttgatatcgcagtcctgcgtctgaaaacgccaataacattccgcatgaatgtggccccagcctgcttgcctgagcgagattgggccgagagcaccctcatgacacagaaaacagggattgtttcaggcttcggtcgcactcacgagaagggcaggcagagcacccggctgaaaatgcttgaagtgccttatgtggatcggaactcttgtaagctgtctagctcatttatcatcacacaaaatatgttttgcgcgggatatgacacgaagcaagaggacgcctgtcagggagattcggggggacctcacgtgaccagatttaaagatacatactttgttaccggaatcgtttcttggggagagggctgcgccaggaaggggaagtacggaatctatacaaaagtgaccgcctttctgaaatggattgacagatccatgaagaccagagggttgccaaaagctaaatcacacgccccggaagtgatcacaagcagtccactgaaa

SEQ ID NO: 9361 - DNA, 1464 bp, synthetic construct
  misc_feature 1..1464: note = source = /note="Description of Artificial Sequence: Synthetic coding sequence"
  source 1..1464: mol_type = other DNA
atgggcaggcccttgcacctcgtgcttctgagcgctagcttggctgggctgctccttctgggtgaaagcctgtttattcgaagagagcaagctaacaacattctcgcaagagtgacccgggccaactctttcctggaggagatgaaaaaaggccatcttgagcgggagtgtatggaggagacgtgcagctacgaagaagccagagaggtgttcgaggattctgataaaaccaatgaattctggaacaagtataaggacggggaccagtgtgagacttccccctgtcagaaccagggtaaatgcaaagacgggctcggggagtacacctgtacctgcctggagggctttgaaggtaagaattgtgagttgttcaccagaaagctatgttcccttgataacggcgactgcgaccagttttgccatgaggaacagaatagcgtggtctgttcctgcgccaggggctacaccctcgccgacaacggaaaggcatgcatcccaaccggtccatacccttgcggaaaacagacgctggagcgacggaaacggtctgtggcccaggccacaagcagctccggggaggctcccgattccattacttggaagccttatgatgctgcagaccttgatcccacagaaaatccattcgaccttctggattttaaccagactcaaccagagcgtggggacaacaacctgacaagaatcgtgggcggtcaggaatgtaaggacggcgagtgcccctggcaggcgttgcttataaatgaagagaacgagggcttctgcggggggacgattttaagcgaattttacatccttaccgcagctcattgcctttatcaagccaagcgcttcaaagtccgggtcggcgacaggaacacagagcaggaggagggcggggaagcggtgcacgaggtggaggtggttatcaagcataatcggttcactaaggagacatacgatttcgacatcgcggtcttgaggctcaaaacccctattacttttagaatgaacgtggccccagcctgtttgcccgagagggattgggcagaatccaccctcatgacccagaagacgggcatagtgagcggattcgggcgcacccatgagaaagggcgacagagtacacgcttgaagatgttggaagtcccttatgtggaccggaactcctgcaaactttcatcttcgtttatcatcactcagaatatgttctgcgcaggctatgacaccaagcaggaggacgcgtgccaaggagattcaggcgggccccacgtcacaaggtttaaagacacatactttgttaccggaattgtttcttggggggaggggtgcgctaggaaggggaagtatggcatatatacaaaagtgaccgcgttcctcaaatggatagaccgctcaatgaagacccgcgggcttccgaaggctaagagccacgcaccagaggtaatcactagctccccactgaaa

SEQ ID NO: 9362 - DNA, 1464 bp, synthetic construct
  misc_feature 1..1464: note = source = /note="Description of Artificial Sequence: Synthetic coding sequence"
  source 1..1464: mol_type = other DNA
atgggacgaccattgcacctcgtgctattaagtgcgtcattggcgggattgcttttgcttggcgagagtcttttcattagacgcgaacaagcaaataatattcttgcccgtgttactagagccaattcattccttgaagagatgaaaaaaggtcatctcgagcgcgaatgtatggaagaaacatgttcgtatgaagaggcgagagaggtttttgaagattccgataagacaaacgaattttggaataaatacaaggatggagatcaatgcgaaacatcgccgtgtcagaatcagggtaagtgtaaagatggactgggcgaatatacttgtacatgcctcgaaggtttcgaaggtaaaaattgtgagttgttcacccgaaaactgtgttccctggataatggagattgcgaccagttttgtcacgaggaacaaaacagtgtagtctgctcttgcgccagaggatacacactcgcagataacggtaaagcatgtattccaactggaccatacccttgcggaaaacaaaccttggagcgaaggaagcgttcggtggctcaagctactagctcgagtggagaggcaccggattcaattacatggaaaccctatgatgcagccgatctggatccaaccgagaatccatttgatcttcttgacttcaatcaaacacaacccgagcggggagataacaatcttactcgtattgtgggcggacaggaatgtaaggatggtgagtgtccgtggcaagctcttttaattaacgaggagaatgaaggtttctgtggtggaactatcctatcagagttttacattctcaccgctgctcactgtctgtatcaagccaagagatttaaggtgcgggtcggagatagaaatactgaacaggaagaaggtggagaagccgttcacgaggtcgaagtggtaattaagcataacagattcacaaaagaaacgtatgattttgatattgcggtgcttcggttaaagactccaattactttccgaatgaatgtcgcaccagcatgcctgccggaaagggattgggccgagagcactctcatgacccaaaaaactggaatcgtgtcaggcttcggaagaacacacgaaaaaggacgacaatcgactcggttgaaaatgcttgaggtgccttatgttgatcgcaactcctgcaagctgagttcctcgttcattataactcagaacatgttctgtgccgggtatgatactaaacaagaagatgcctgtcaaggagattcagggggaccacatgtgacgcggtttaaagatacctatttcgttacgggaatagtttcatggggagaaggctgcgcaagaaagggaaaatacggaatttacactaaagtgacagctttcttgaaatggatcgataggtcaatgaagacgcgaggtttgccgaaagctaaaagtcatgcaccagaagtaattacctcttctccgttgaaa

SEQ ID NO: 9363 - DNA, 1464 bp, synthetic construct
  misc_feature 1..1464: note = source = /note="Description of Artificial Sequence: Synthetic coding sequence"
  source 1..1464: mol_type = other DNA
atggggaggccactgcatctcgtgctgctgtccgcctctctagccggattactgctcctaggagaatctctctttatccggcgagaacaggcaaataacatactcgctcgggtcactcgcgctaattctttcctcgaggaaatgaaaaaagggcacctcgaaagggaatgtatggaggaaacttgctcttatgaagaagcaagagaagtgttcgaagattccgataaaacaaacgaattctggaataagtataaagatggggatcagtgtgagacatcaccctgtcagaaccaggggaaatgtaaagatgggttaggagaatacacttgtacatgcctcgagggatttgagggaaaaaattgtgaactctttacacgcaagctttgttcactagataatggagattgcgaccaattttgtcatgaagagcagaactctgtcgtttgtagttgtgctaggggatacacattagccgataacggaaaggcctgtattccgacaggaccttatccttgcggaaaacagacactcgagcggaggaaaagatctgtggcacaggccactagttcaagtggagaagcaccagattccattacttggaaaccttacgatgcggcagatctggatcccactgaaaatccatttgatttgctagacttcaaccagactcagcccgaaagaggggataataatctcacacgaattgtgggggggcaggaatgcaaagatggagaatgcccctggcaggcacttctcatcaacgaagaaaacgaaggattctgcgggggaacaatcctcagtgaattctatatcctcacagccgctcattgcctctatcaggccaaacgctttaaagtcagggtgggagatcggaacactgaacaggaagagggaggagaggccgtccacgaagtagaagttgtaataaaacacaatagatttacaaaagaaacatatgattttgatatcgctgtgcttcggcttaaaactcctataacatttaggatgaatgtcgctcctgcttgcttgccagagcgggattgggccgaatcaacacttatgactcagaaaacaggaattgtctccggatttggaagaacacatgagaaagggagacagtcgactcggcttaaaatgctggaagtgccctatgtcgatcggaattcatgtaaactgtcgtcgtcatttattataactcagaacatgttctgtgccgggtatgatacaaagcaggaagatgcttgccagggagattccggagggcctcacgtcactcgctttaaagatacatatttcgtgactgggattgtgagttggggggaagggtgtgcccgtaaaggaaaatatgggatatatacaaaagtcacagccttcctgaaatggattgatcgatccatgaaaactcgcgggctgccaaaagcaaaatcacacgctcccgaggtgataacatcgtcccccctgaaa

SEQ ID NO: 9364 - DNA, 1464 bp, synthetic construct
  misc_feature 1..1464: note = source = /note="Description of Artificial Sequence: Synthetic coding sequence"
  source 1..1464: mol_type = other DNA
atgggccgcccactgcatctagtcctgctgtccgcatccttggccggtctgctgctactaggagagagcctgttcattagacgtgagcaggctaataatattttagctcgagtgacgagggctaactcctttctggaggagatgaagaagggccacctggaacgtgagtgcatggaggaaacctgttcgtatgaagaagctagagaggttttcgaggatagcgataagaccaatgagttttggaacaaatataaggatggggatcagtgcgagacctccccttgccagaatcagggcaagtgcaaagacgggcttggtgaatacacctgcacatgcttggaggggtttgagggcaaaaactgcgagttgttcacgaggaagctctgttccttagataatggggattgcgatcagttttgtcatgaagaacaaaatagcgtagtttgctcgtgcgcccgtggctacacgttagccgataacggcaaggcctgcattccaaccggcccatatccttgcggtaaacaaaccctagagcggaggaagcgttcagtggctcaggccacttcgagcagcggcgaggcacccgatagtatcacctggaagccgtacgacgctgcagacctggatccgaccgagaatccattcgatctgctggatttcaatcaaacgcagcctgagcgcggagataataatctgacccgcattgtcggaggacaagagtgtaaggacggcgagtgtccgtggcaggctcttctcatcaatgaggagaacgaaggattctgcggcggtacgattctaagtgagttttacatcctcacggccgcgcattgcctgtaccaggccaagcgctttaaggtgcgcgttggagaccggaacacggaacaggaggaagggggcgaggctgtgcacgaagtcgaggttgtcattaaacacaatcggtttacgaaggagacatacgattttgatattgctgtgctgcgcctcaagacacccatcaccttccgtatgaatgttgccccagcgtgcttacctgagcgggactgggccgaatctaccctcatgacccagaagaccggaattgtgtctggtttcggcagaactcacgagaaaggccgccagtcgacccgtctgaagatgttggaggtcccatatgtggaccgcaactcctgcaaactgtcaagttccttcatcattacccagaatatgttttgcgcgggatacgacacgaagcaagaagacgcatgccaaggcgactccggagggccgcacgtcacaagatttaaggatacgtatttcgtgaccgggatcgtcagctggggcgaaggatgcgcacggaaggggaagtacggcatttatacaaaagtgacggccttcctgaagtggattgatcgttccatgaaaactcgaggactgcccaaggcgaagagtcatgccccggaggtaattacatcctccccccttaag

SEQ ID NO: 9365 - DNA, 1464 bp, synthetic construct
  misc_feature 1..1464: note = source = /note="Description of Artificial Sequence: Synthetic coding sequence"
  source 1..1464: mol_type = other DNA
atggggcgtcccctccacctcgtgctgttgtctgcaagtctagccggactcctcttgctgggcgagtctctgtttattcgcagagaacaggcgaacaacatattggcaagagtgactcgcgccaattcatttttagaagaaatgaagaaaggccatttggagcgagagtgtatggaagagacttgcagttatgaggaggcccgggaagtcttcgaagattccgacaaaacaaatgagttctggaataagtataaggatggggaccaatgtgagacctccccctgccaaaatcagggcaagtgtaaagatggcctgggagaatatacctgtacgtgtctcgaaggttttgaagggaagaactgtgagctgttcacccgaaagctgtgctcgctcgacaatggcgattgcgatcaattctgccacgaagaacagaactccgtggtctgcagctgtgccaggggctacacccttgccgataacgggaaggcgtgcattcccacaggaccctacccttgtggcaaacagaccctcgagcgccgaaagcgcagcgtggctcaggcgacttcctccagtggggaagcccccgatagtattacttggaagccttatgatgctgcagaccttgatcccaccgagaatccgttcgatctgctggactttaatcaaacccagccagagaggggcgataacaacctgactcggatcgtaggaggccaagaatgtaaggatggcgaatgtccatggcaggccttgctgattaatgaagagaatgaaggcttctgcggaggcacaatcctgtctgaattttatatcctcacagccgcgcattgcctctaccaggccaagcggttcaaagtgcgagtgggggatcggaacacagagcaggaagagggaggggaagcagtgcacgaagtggaagtggtgattaagcacaatcgatttactaaggaaacgtatgactttgatattgccgtccttcgactgaagacaccaatcacttttaggatgaacgtcgcacctgcatgcctcccggagagagattgggccgagtcaactttgatgacccagaagactgggatcgtgagtggcttcggtcggacacacgagaaaggccgccagagcactagattgaagatgctggaggtcccttatgtggaccgaaattcctgtaagctgtcgtcctcattcatcattacccagaatatgttttgtgccggatatgataccaaacaggaagacgcttgtcaaggcgactccggggggccccacgtgacgcgatttaaagacacctactttgtaaccggcattgtgtcttggggtgaagggtgtgcgcgtaaggggaaatatggcatctacaccaaggtgaccgcctttctcaagtggatcgacagatcaatgaaaacccgggggcttccaaaagccaagtcccacgctcctgaagtcataacttcttccccgctcaag

SEQ ID NO: 9366 - DNA, 1464 bp, synthetic construct
  misc_feature 1..1464: note = source = /note="Description of Artificial Sequence: Synthetic coding sequence"
  source 1..1464: mol_type = other DNA
atgggaaggcctctccacctggtgctgctgtctgcctccctcgcaggactactcttgctgggcgagtcactgttcattcgccgcgaacaagctaacaacatcctggctcgtgttacgcgggctaacagcttcctggaggagatgaagaaaggtcatctggagcgcgaatgcatggaggagacctgctcttatgaggaggctagggaggtgttcgaagatagcgacaagactaacgagttttggaacaagtacaaggatggggatcaatgcgaaacttcgccgtgtcaaaatcagggcaagtgcaaggatgggttgggtgagtacacatgcacctgtttagagggtttcgagggaaaaaattgtgagttgttcactaggaaactctgcagtttggataatggtgattgcgaccaattctgtcacgaggagcagaatagtgtcgtgtgcagctgcgctaggggttacaccctggcagacaacgggaaagcttgtattccaacaggcccctatccgtgcggaaagcagactcttgagaggagaaaacgcagtgttgcgcaggctacctcttccagcggcgaggcccccgacagtattacttggaaaccctatgatgccgctgatcttgatccgacagaaaacccgttcgatctgctggatttcaaccagactcagccggagcgtggcgataataacctcactagaatcgtgggtggccaggagtgtaaagacggcgagtgcccctggcaggcactgttaattaacgaggagaacgagggattctgcggcggcacaattctctccgagttctatattttaaccgccgcccattgcctgtaccaggccaagcgatttaaagtgcgggtgggcgaccggaatactgaacaggaggaaggcggcgaagccgtacatgaagtggaggtggtgataaagcacaataggtttaccaaagaaacctacgatttcgacatcgcagtgttgaggctgaaaacccctatcaccttccgcatgaacgttgcccctgcatgtttgcccgaacgtgactgggctgagtcaacactgatgacacaaaagacgggcatcgtctcaggcttcgggagaacgcacgagaagggcagacaaagtaccagacttaagatgctggaggtgccctacgttgacaggaactcctgcaaactgtccagcagcttcatcatcacacagaatatgttttgtgccggttacgacacaaagcaggaggacgcttgccaaggcgattccggcggaccccacgttacccggtttaaggacacttacttcgtgacgggcattgtgtcgtggggggaaggatgtgcccgcaagggcaagtatggtatatacacgaaggtgaccgcctttctcaaatggatcgatagatccatgaagactagagggctgcccaaagccaagagtcacgcacccgaggtaatcacttctagtccactgaaa

SEQ ID NO: 9367 - DNA, 1464 bp, synthetic construct; identical to SEQ ID NO: 9335
  misc_feature 1..1464: note = source = /note="Description of Artificial Sequence: Synthetic coding sequence"
  source 1..1464: mol_type = other DNA

SEQ ID NO: 9368 - DNA, 1464 bp, synthetic construct
  misc_feature 1..1464: note = source = /note="Description of Artificial Sequence: Synthetic coding sequence"
  source 1..1464: mol_type = other DNA
atgggccgcccattgcatctggtacttctgagtgccagcttagcaggactgcttttgttgggcgaaagcctattcatccggcgggaacaggcaaacaatatcctggcgagggtaacgcgcgccaattcctttttggaggagatgaaaaaaggccacttggaaagggagtgtatggaagaaacatgtagctacgaggaagctcgcgaggtctttgaggacagtgacaagaccaacgaattctggaataagtataaggatggggaccagtgcgagactagtccttgtcagaatcagggcaagtgtaaggacgggctcggggagtatacatgtacatgcctcgaagggtttgaaggaaaaaactgcgagctgttcacaagaaaactgtgctccctggacaatggagattgcgatcagttctgccacgaagaacagaactccgtcgtgtgttcctgcgcccgggggtatacccttgcagacaacggaaaggcttgcatccctaccggtccttatccctgtggtaagcagactctggagagaagaaaaaggtccgtcgcacaggctacctcttcatcaggcgaagcccccgattcgatcacatggaaaccatatgacgccgcagatcttgaccctaccgagaatcccttcgatttgttagatttcaatcagactcagccggagagaggtgacaacaatctgaccagaattgtgggaggccaggaatgtaaggatggcgaatgcccatggcaggccctgctcatcaatgaggagaatgaagggttctgcggcggcactatactgtccgagttctacattctgaccgccgcccactgtctgtaccaagctaaacggtttaaggtcagggttggtgaccgtaatacggaacaggaggagggcggggaggccgtacatgaggtggaagtcgtaattaagcataatcggttcaccaaagagacttacgatttcgatatagccgtgctgcgtttgaagacccccattacctttaggatgaacgttgcccccgcctgcctgcccgaaagagattgggcagaaagtacactgatgacccagaagaccggcatcgtctcaggattcggccgcacacatgagaaagggcgccagagtactcgcctgaaaatgctcgaggtaccgtacgtggaccgaaactcttgtaagctaagctcctctttcatcataacacagaatatgttctgcgccgggtacgatactaagcaggaggacgcctgccagggtgactctggggggcctcacgtaaccaggttcaaagatacatatttcgtaaccggaattgttagctggggggaagggtgtgcgagaaagggaaagtacggaatctacaccaaggtgacagctttcctgaaatggattgatcgaagtatgaagactcggggtctgcccaaggctaaatcacacgcacctgaggtgattacgtcttcaccactgaag

SEQ ID NO: 9369 - DNA, 1464 bp, synthetic construct
  misc_feature 1..1464: note = source = /note="Description of Artificial Sequence: Synthetic coding sequence"
  source 1..1464: mol_type = other DNA
atgggcagacctttgcatctcgtgttgctttccgccagtttagccggtcttctgttgttaggcgagagcctcttcattcgcagggagcaggcgaataacatcctggcaagagtaactagggccaattcttttctggaggagatgaaaaaggggcacctggagagagagtgcatggaggagacttgcagttacgaggaggcccgcgaggttttcgaggatagtgataagactaacgaattttggaacaaatataaggacggtgaccaatgcgagacgtctccgtgccagaaccagggaaagtgtaaagacggtctgggtgaatatacatgtacctgcctggagggctttgaggggaaaaactgcgagctgttcacacgcaaactttgtagcctggacaatggagattgcgatcagttctgccacgaagaacagaatagtgttgtgtgctcatgtgccagagggtacacccttgcggataatggaaaggcttgtatcccaactggcccctacccgtgcgggaaacagacgctggagaggagaaaaaggagtgttgcccaggctacaagcagcagcggggaggcccctgatagtatcacctggaagccgtatgatgccgctgatctcgacccaacagagaaccccttcgacttacttgacttcaatcagacacagcctgagcgcggggacaataaccttaccaggatcgtcggggggcaagagtgcaaagatggagagtgcccatggcaggctctgttaatcaacgaggagaacgaaggtttctgtggagggaccatcctgagtgagttctatatcctaacagccgcgcactgtctctaccaggctaaacgctttaaggtcagggtgggggatagaaatactgagcaggaagagggtggagaagctgtccacgaggtggaggtggtcatcaaacataatagatttacaaaggagacttacgactttgacatcgcagttctgcgcttgaagacccccatcacatttcgtatgaatgtggccccggcatgtctgcccgaaagagactgggccgaaagtacccttatgacgcagaagacagggattgtgtcaggctttggacgaacgcacgagaagggccgccaaagcactagactaaagatgctggaagttccatacgtagaccgaaatagttgtaaattgtctagttctttcatcatcacacagaacatgttctgtgctgggtacgacacaaagcaggaggacgcctgccaaggggattcaggtggacctcacgtcactcgcttcaaagacacgtacttcgttaccggcattgtcagctggggggaggggtgtgcccgcaaggggaaatacggaatctacacaaaggttaccgcctttctcaagtggatcgatagatctatgaaaactcggggactacccaaggccaaatctcacgctcctgaggtgatcacgagtagcccccttaaa

SEQ ID NO: 9370 - DNA, 1464 bp, synthetic construct
  misc_feature 1..1464: note = source = /note="Description of Artificial Sequence: Synthetic coding sequence"
  source 1..1464: mol_type = other DNA
atgggaagacctttacatttagttttattatctgcttcactagcaggattacttttacttggagaatctttatttattagaagagaacaagctaataatatacttgctagagtaactagagctaatagttttcttgaagaaatgaaaaaaggacatcttgaacgagaatgtatggaggaaacttgtagttatgaagaagcaagagaagttttcgaagattctgataaaactaatgaattctggaataaatataaagatggagatcaatgtgagacttctccatgtcaaaatcaaggaaaatgcaaagatggtcttggagaatatacatgtacttgtttagaaggttttgaaggaaaaaattgtgaattattcacacgaaaattatgttctttagataatggagattgtgaccaattttgtcatgaagaacaaaattcagtggtttgtagttgtgctagaggttatactttagcagataatggtaaggcatgtattcctacagggccatatccatgtggaaaacaaaccttagaaagaagaaaaagatctgttgcacaagctacaagttcgagtggagaagcaccagattctattacatggaaaccttatgacgctgctgatcttgatccaacagaaaatccatttgatcttcttgattttaatcaaactcaaccagaaaggggagataataatttaactaggatagttggaggacaagaatgtaaagatggtgagtgtccatggcaagcattattgattaatgaagaaaatgagggtttctgtggaggaacaattttaagtgaattttatattcttacggctgcacattgtctttatcaagctaagagatttaaagttagagtaggtgatagaaatacagaacaagaggaaggtggagaggctgttcatgaagtcgaagttgttattaaacacaatagatttacaaaagaaacatatgattttgacattgcagtcttaagattaaaaactccaattactttcagaatgaatgttgctccagcttgtcttccagaaagagactgggctgaaagcactttaatgacacaaaagactggaattgtatctggatttggaagaactcatgaaaaaggaagacaaagcacacgtttaaaaatgttggaagttccttatgttgatagaaattcatgtaaactttctagtagttttattattactcaaaacatgttttgtgcaggatatgatacaaaacaagaagatgcatgtcaaggagattcaggaggaccacatgtcactagatttaaagatacatattttgttacaggaattgtttcatggggagaaggatgtgcaagaaagggtaagtatggtatttatacaaaagttacagcatttcttaaatggatagatagatctatgaaaactcgtggtttaccaaaagctaaatcacatgctccagaagttattacttcaagtccacttaaa

SEQ ID NO: 9371 - DNA, 1464 bp, synthetic construct
  misc_feature 1..1464: note = source = /note="Description of Artificial Sequence: Synthetic coding sequence"
  source 1..1464: mol_type = other DNA
atgggtcggccactgcatctggttctgttgtccgcttccctcgcagggctgctgctccttggtgagtcactgttcattaggcgcgaacaggctaacaacatcctcgcccgggtaactagagcaaactcctttctggaagagatgaagaagggccacctggagagggaatgtatggaagagacttgtagctacgaggaagccagagaggtttttgaagactccgataaaaccaacgagttttggaacaaatataaggacggtgaccagtgcgaaacctccccttgccagaatcaaggaaagtgtaaggacggtctgggcgaatacacctgcacatgtttggaaggattcgagggtaagaattgcgagctctttacaaggaaactgtgctcattggacaatggggactgtgatcagttttgtcatgaggagcagaacagcgtggtgtgctcctgcgccagaggctacaccctggccgataatgggaaggcctgtatcccgaccggcccttatccctgcggtaaacagacacttgagcgacggaaacggtctgtggctcaggctacctcctccagtggagaggcccctgattctataacctggaagccttatgatgctgctgatctcgaccctacagaaaatccttttgatttgctggacttcaatcagacacaacccgagcgaggagacaataacctcactcggatcgtgggcggccaagaatgtaaagatggggagtgtccctggcaagcgctcctgataaacgaagagaacgaaggattctgtggaggaactatactgtccgaattctacattctcacggcagcgcactgcttgtatcaggccaaacggttcaaggtgagggtgggggatagaaatactgaacaggaggaaggcggcgaggccgtacacgaggtcgaagtcgtaatcaaacacaacagatttacgaaagagacctatgacttcgatatcgccgtgctgcggctcaaaaccccaataactttcaggatgaacgttgcccccgcctgcctgccagaaagagattgggccgagagtactttgatgacccaaaagacgggcattgtatccgggttcggcagaacacatgagaagggcaggcagagtacacgcctgaagatgctcgaagtgccatacgtagaccggaacagctgtaagctgagttcctcttttatcattacacagaacatgttctgcgctgggtacgatacaaagcaggaggacgcctgccagggcgactctggagggccccatgtaacccggttcaaagatacatactttgtgacggggatcgttagctggggtgagggctgcgcccgcaaaggcaaatacgggatttatacaaaagtgacagcattcctcaagtggatcgacaggtcaatgaaaactcgcggcctgcccaaggcaaagtcacatgctccggaagtcattacgagctctcctctgaaa

SEQ ID NO: 9372 - DNA, 1464 bp, synthetic construct
  misc_feature 1..1464: note = source = /note="Description of Artificial Sequence: Synthetic coding sequence"
  source 1..1464: mol_type = other DNA
atgggaagacctctgcaccttgtactgctttccgccagcctggccggcctcctgctcttgggagagtcattgttcatcagacgggaacaggcaaacaacatcttagcccgcgtcacaagagctaattctttccttgaggagatgaaaaaggggcatctggaacgggaatgcatggaggagacttgctcatacgaagaagcacgcgaagtctttgaggacagcgataagaccaacgagttttggaataaatataaagatggagatcaatgcgagacatcaccatgccagaaccaggggaagtgtaaggatggcttaggggagtatacctgcacctgccttgagggctttgaagggaaaaactgcgagttgtttacgcgcaagctatgcagcctggacaacggagactgcgaccagttctgccacgaggagcaaaattctgtggtgtgctcctgtgcccgggggtacaccctggcagataatggcaaagcctgtatcccaaccgggccatatccttgtgggaaacagacactggaaaggcggaagcgtagtgtggcccaggccacgagctccagcggcgaggcacccgattcgattacctggaagccttatgacgccgcagacctggaccccaccgagaaccccttcgatctgctggatttcaatcagactcaacccgagaggggcgacaacaacctgacccggatagtgggtgggcaggagtgcaaagacggcgagtgcccctggcaggcacttttgatcaatgaggagaacgagggtttttgtgggggaactatcttgtccgagttctacatacttacagctgcccattgcttgtatcaggcaaagcggtttaaggttcgggtaggagataggaatactgagcaggaggagggtggcgaggcagtgcacgaggtagaagtggtgattaaacacaaccgcttcaccaaagagacgtacgacttcgacatcgcggtcttgcgtctgaaaaccccaattacttttagaatgaacgtggcacctgcttgcctcccagagagagactgggcagagagcacattaatgacccagaagactggcatcgtgagcgggttcggccggactcatgagaaagggaggcagtcgacccgattgaagatgctggaggtgccttatgtggatagaaacagttgtaagctgagcagttcttttattattacccagaacatgttctgtgctgggtacgatactaaacaagaggacgcatgccagggcgacagcggtggcccacacgtgacccgattcaaggacacctacttcgttaccgggattgtgagctggggtgaagggtgtgcgagaaaggggaaatacgggatttatactaaggtcaccgcattcctaaagtggattgaccgcagtatgaaaactagggggcttccaaaagccaaatcacatgcaccagaggtgataacttcctccccactgaag

SEQ ID NO: 9373 - DNA, 1464 bp, synthetic construct
  misc_feature 1..1464: note = source = /note="Description of Artificial Sequence: Synthetic coding sequence"
  source 1..1464: mol_type = other DNA
atgggtaggcctctacatctggtgctccttagcgcaagcttagctgggctgttgctgctgggtgaatcattgtttattcgtcgagagcaggccaacaatatccttgcgcgggtgactagggccaattcatttctggaggagatgaagaaagggcatttggaaagagaatgtatggaggagacctgtagctacgaggaggctagagaagtgtttgaagattcagataagacaaacgagttttggaataagtacaaagatggagaccagtgtgagacgtcaccctgccagaaccagggcaaatgtaaagatgggctgggagaatacacctgcacctgcttggagggatttgagggcaaaaactgtgagctgttcaccagaaagctgtgttccctggacaacggggactgcgatcagttctgtcacgaagagcagaattcggttgtgtgctcatgcgcaagggggtatacgttagcggacaatggaaaggcctgcattcccacgggtccctatccctgcggcaagcagacccttgaacgaagaaaacgatccgttgcccaggccaccagtagttctggagaagcccctgactccattacctggaaaccctacgacgccgcggacttggacccaaccgagaacccttttgacttgttggatttcaaccagactcaacccgagcgaggagataacaacctgacccgcatcgtcgggggtcaggagtgtaaggacggggagtgcccttggcaggccctgttaataaacgaagagaatgaaggtttctgcggagggactattttgagtgagttctacattctcacagccgcccactgcctttatcaggccaagcgattcaaggtccgagtgggggaccgaaatactgagcaagaggaggggggagaagccgttcacgaggttgaagtggtgatcaaacacaacagatttaccaaagaaacttatgatttcgatattgccgtgttgaggctgaagacccctattactttccgaatgaacgtggcaccagcttgcctaccggagcgtgactgggccgagtccacattgatgactcagaagacgggaattgtgtctggattcggaaggactcacgagaaaggccgccagagcacgcggttgaaaatgttggaggtgccttacgtggatagaaattcctgtaaactatcttcctcattcatcatcacacagaacatgttctgcgccggctatgacactaaacaggaggatgcatgtcaaggagatagcggcgggccccacgttactaggttcaaagatacttacttcgtaaccggcattgtttcatggggagaaggatgcgctaggaaggggaagtacgggatttacactaaagtgaccgcatttctgaaatggattgatcgatccatgaagactagggggctgcctaaagcgaaatctcatgctccagaggtgatcactagttcccccctgaaa

SEQ ID NO: 9374 - DNA, 1464 bp, synthetic construct
  misc_feature 1..1464: note = source = /note="Description of Artificial Sequence: Synthetic coding sequence"
  source 1..1464: mol_type = other DNA
atgggtcggcccctccatctggttctgctgtctgcatcactcgccggcctgctgctgctgggcgaatccctctttattaggagggaacaagctaacaatatactggctcgggtgacgagggccaattcattcctggaggagatgaagaaaggtcacctcgagagggaatgcatggaagagacatgtagttatgaggaagcaagagaggtcttcgaggactctgataagaccaatgagttttggaataaatataaggacggcgaccagtgtgagacgagcccctgccagaaccagggaaaatgcaaggacggactgggtgagtacacttgcacctgcctggagggatttgaaggcaagaactgcgagctgttcactaggaaactgtgttccctggataacggtgattgtgatcagttctgccacgaagagcagaacagcgtggtgtgttcctgtgcccggggttacaccctggcggacaatggcaaagcttgcataccaaccggaccgtacccctgcggtaaacagactcttgaacggcgaaagaggtcagtcgcgcaggcaacctcctcaagcggagaggctcctgacagtatcacatggaaaccctacgacgcagcagaccttgatccaactgagaacccatttgacctgcttgatttcaaccagacacagcctgagaggggagataacaatctgacaaggatcgtaggcgggcaggaatgcaaagacggcgaatgtccttggcaagcactgttgatcaatgaggaaaacgaggggttttgtgggggtactatactcagcgagttttacattctgaccgccgcacattgcctgtatcaggcaaagcgctttaaggtcagagtgggcgaccgcaacactgagcaggaagagggtggagaggccgtccacgaagtcgaagtagtgatcaagcataaccgcttcactaaagaaacctacgactttgatatcgctgtcctgagactgaaaacccctattactttccgcatgaatgttgctcccgcatgtctcccagagcgcgattgggcagaatctacgttgatgacccagaagaccggaatcgtctcaggcttcggccggacacacgagaaaggaaggcagtcaacccggctgaagatgctcgaggtaccctacgtggatcgcaactcatgcaagttgtccagttcctttattatcactcagaatatgttctgtgccggatacgacaccaagcaggaggacgcttgtcagggagattcaggcggtccacacgtgacccggtttaaggacacctacttcgtgacaggaattgtgagctggggcgaaggttgtgcccggaaggggaaatacggcatatacaccaaagtgaccgctttcctgaaatggatagacaggtccatgaagacccgaggcctgcccaaagcaaaaagtcacgccccagaagtgatcacatcttcccccctcaaa

SEQ ID NO: 9375 - DNA, 1464 bp, synthetic construct
  misc_feature 1..1464: note = source = /note="Description of Artificial Sequence: Synthetic coding sequence"
  source 1..1464: mol_type = other DNA
atgggccggccgctacatttggtcctgctatcggctagtctcgctggactacttctccttggcgagtccctattcatccggcgcgagcaagctaacaatattctcgctagagtgacgcgagccaacagctttttggaggagatgaagaagggccaccttgagagggagtgtatggaagagacgtgctcctacgaggaggcgagagaagtcttcgaggattcggataagaccaacgagttctggaataagtataaggacggtgatcagtgtgaaacgtcaccgtgtcaaaaccagggcaaatgcaaggacggtttgggggagtacacttgtacgtgtctcgagggtttcgaagggaaaaactgcgagctattcacgcgtaagctctgctcgcttgataacggcgattgtgaccagttctgccacgaagaacaaaattctgtggtgtgctcgtgtgcccgcggttacacacttgctgacaatggcaaggcgtgtattcctacggggccctatccttgcggaaagcagacactggagcggaggaagagatcagtcgcacaagctacgtctagttccggggaagcgccagactctatcacttggaagccatatgacgcagccgatttggatccaacggagaacccattcgaccttttagatttcaaccagacccagccagaaagaggcgacaataaccttacgagaatcgtcgggggacaggagtgtaaggatggtgaatgtccatggcaagcattgcttatcaacgaggagaatgaaggattctgtggcgggaccatcttatccgagttttacatactaaccgccgctcactgcttataccaggctaagcgctttaaggtcagggtgggtgacaggaatacagaacaggaagaaggtggcgaggctgtgcacgaagtcgaagtcgttatcaagcacaaccgtttcacaaaggagacatacgatttcgatatcgccgtgctccgacttaaaacccctatcacattcagaatgaatgtcgccccagcctgcctccctgaacgcgactgggctgagtcaactctgatgactcaaaagacaggtatcgtaagcgggtttggtcgaacacacgagaagggacgtcaatcaactagactgaaaatgttggaggtgccatatgtggaccgcaactcctgcaagctgagttcctcgtttatcattactcaaaatatgttctgcgcgggatacgacacgaagcaagaggatgcttgccagggtgactccggaggaccgcacgtcacgcggttcaaggacacttacttcgtaactggtatcgtatcttggggcgaaggctgcgcacgtaaggggaagtatggtatctatactaaggtcacggctttccttaaatggatcgaccggtcaatgaagaccagaggtctaccgaaagccaaatcacacgcgccagaagtcatcacttcgtccccattgaag

SEQ ID NO: 9376 - DNA, 1464 bp, synthetic construct
  misc_feature 1..1464: note = source = /note="Description of Artificial Sequence: Synthetic coding sequence"
  source 1..1464: mol_type = other DNA
atgggtaggccacttcatctggtgttgctgtccgcgtctttagccgggctgctcctgttaggggaatctctcttcatcagacgcgagcaggccaacaatatccttgcccgagtaacacgggccaactcatttcttgaggagatgaaaaagggtcacctggaaagagagtgcatggaagagacctgctcctacgaggaagctcgagaggtgttcgaagatagtgataagaccaatgagttttggaacaagtataaggacggagatcaatgcgaaaccagcccttgtcagaatcaggggaagtgtaaggatggcctgggtgagtatacgtgcacatgtctggaaggctttgagggcaaaaattgtgagctgttcacccgaaaactgtgctctctggacaatggggactgcgatcagttctgtcacgaagaacagaatagtgtggtttgcagctgtgctcgaggatacacacttgccgacaatggcaaggcctgtatccctactggtccttacccttgtggcaaacaaacgctggagcggcgcaagagatccgtggcccaggcaacttcctcgagcggcgaggcccccgatagtatcacctggaaaccttatgatgctgcagacctggaccccactgaaaacccatttgatcttttggatttcaaccagacacagcccgaaagaggtgataataatctcaccagaatcgtgggaggtcaggagtgcaaagatggggaatgcccttggcaggccttactcattaacgaagagaacgagggattttgcggaggaaccatcctgtcagaattctatattctgacagccgctcactgcctgtatcaggcaaaacgtttcaaggtcagggtaggagaccggaacacagagcaggaggagggaggcgaggccgtacatgaagtggaagtcgtcatcaagcataaccgcttcacaaaagaaacatatgattttgacatcgccgttcttcggctcaagacaccgatcacgtttcggatgaacgtggcccctgcttgtctccccgaaagagactgggccgagtcgaccctcatgacacagaagacaggcatagtgtctggttttggtcggactcacgagaaaggacgccaatctacacgacttaagatgctcgaggttccttacgtggaccggaatagttgtaagttgtcctcctcttttattattactcagaacatgttttgtgccgggtacgatacaaaacaggaggacgcgtgccagggcgattccggagggcctcacgtcacaagattcaaagacacctatttcgtgaccggtatcgtcagctggggcgagggttgtgcccgaaagggaaaatatggaatatatacgaaggtgacggctttcctgaagtggatcgatcgttcaatgaagacaaggggcctccctaaagcgaagagccacgcacctgaggtaattacctcaagcccccttaag

SEQ ID NO: 9377 - DNA, 1464 bp, synthetic construct
  misc_feature 1..1464: note = source = /note="Description of Artificial Sequence: Synthetic coding sequence"
  source 1..1464: mol_type = other DNA
atgggtaggcccctgcacctagtcctcctctcagcaagcctggctggccttctcttgcttggcgagagcctctttatcagacgggagcaggcaaataacatcttggcgagagtgacccgggccaacagctttctcgaggagatgaagaaggggcacctcgaacgggagtgcatggaagagacatgcagctacgaagaagcccgagaagtgtttgaagacagtgataaaaccaatgagttttggaataaatacaaggatggtgaccagtgtgagaccagtccctgccagaaccagggaaaatgcaaagacggcctgggagagtatacctgcacatgtttggaaggcttcgagggaaagaattgtgagctgtttaccaggaaactgtgctccctcgataacggagattgcgatcagttctgccacgaggaacaaaatagcgtggtgtgcagctgcgcccggggatacaccctggccgataacgggaaggcctgcatccctaccgggccttacccttgtggcaaacagacgctggaaaggcggaagcgctcagtggcgcaggccacatcttcaagcggggaggcgcccgatagcattacttggaaaccctacgatgcggcggatcttgaccccacagagaatccatttgatcttctcgacttcaatcaaacgcagcccgaacggggcgataacaatctgaccagaatagtgggaggccaggagtgtaaggacggcgaatgcccctggcaggctctcctgattaacgaagagaatgaggggttctgtggcgggacgatactgagcgaattttacattctaacagctgctcattgtctgtatcaggctaaacgcttcaaggtgcgggttggggatcgaaacaccgagcaggaggaggggggcgaggccgttcacgaagtggaggtcgtcatcaaacataaccggttcaccaaggaaacgtatgactttgacatcgccgtcctaagattaaagacgcccataacattccgcatgaacgtcgcacctgcatgcttgcccgagagggattgggctgaatccacactgatgacacagaaaaccgggatcgtctctggcttcgggcggactcatgaaaaagggagacagtctactcgcctgaaaatgctggaagtgccttatgtcgatcgcaatagctgcaagctgagttcttcttttattattactcagaacatgttctgcgccggatacgacactaaacaggaggatgcatgccagggggactcaggcggcccccatgtgacccgattcaaagatacctattttgtcacagggatcgtcagctggggagaaggatgtgcacggaaagggaaatacgggatttatacaaaggtgactgcattcctcaaatggatagatagatccatgaagactcgcggcctccctaaagccaaaagccatgcccctgaggtaattacgtctagcccattaaag

SEQ ID NO: 9378 - DNA, 1464 bp, synthetic construct
  misc_feature 1..1464: note = source = /note="Description of Artificial Sequence: Synthetic coding sequence"
  source 1..1464: mol_type = other DNA
atgggtcgaccattgcaccttgttcttctatcggcatcgctagccggattattactgctgggagaaagtctgttcataaggagagagcaggccaacaatatcctggccagggttactagggcaaactctttcctggaagaaatgaagaagggccatctggaacgcgaatgcatggaggaaacctgctcctatgaggaagcccgtgaagtctttgaagactcagataaaactaacgagttttggaacaagtacaaggatggcgaccagtgcgagacatcgccttgtcagaaccaaggcaagtgcaaggacgggttgggtgagtatacttgcacttgcctggagggcttcgaaggaaaaaactgcgaattgtttacccgcaaactatgcagtctcgacaacggagactgcgatcagttctgtcatgaagagcaaaatagcgtggtatgctcctgcgcccgaggatacacattggctgacaacggaaaagcatgcatccctaccggaccatatccatgtgggaaacagaccctggagcggcggaagaggagcgtggctcaggccacaagttctagtggcgaggctcctgactcaattacctggaagccctacgacgcagcggacctcgatcccacagaaaacccatttgatttactggatttcaatcagactcagcccgagaggggtgataataatctgacacggatcgtcggcggacaggagtgtaaggacggtgaatgtccatggcaggccctgctgatcaacgaagagaatgagggcttctgtgggggtaccattctgtcggagttttacattctgaccgccgctcattgtctgtaccaagccaagcggtttaaggtccgcgtgggcgatagaaacactgagcaggaggaaggcggcgaagcggtacacgaggtcgaagttgtgattaaacataatcggttcacaaaggaaacttatgattttgacatagccgtgctccgcctcaagacaccaatcaccttcagaatgaacgtcgctcccgcttgtctgcctgaaagagattgggcggagagcacactaatgacacagaaaacaggcatagtgtccggcttcggccgcacacacgaaaaaggccgtcaaagtacacgactgaagatgcttgaggtcccatacgtcgacagaaattcctgcaaactgtcttcatccttcattataacacaaaacatgttttgtgcgggatacgatacgaagcaggaagacgcctgccagggggacagcggcggacctcatgttacccggtttaaggatacttactttgtaaccgggattgtctcctggggggaaggttgcgcaaggaagggcaaatacgggatatacactaaggtcacggccttccttaaatggatcgaccgatctatgaagacccgcggtctgccgaaggccaaatcccacgctccagaggtcattacgagttcgcctctcaag

SEQ ID NO: 9379 - DNA, 1464 bp, synthetic construct
  misc_feature 1..1464: note = source = /note="Description of Artificial Sequence: Synthetic coding sequence"
  source 1..1464: mol_type = other DNA
atggggagacctctacatttggtgctgctgtcagcctccctggctgggttgctcctgctaggggagagcttgttcattaggcgcgaacaggcaaataacattctggccagagtcacccgcgctaactcctttctcgaggaaatgaagaaaggccatctggaacgggagtgtatggaagaaacctgcagctacgaggaagcacgggaagtatttgaggatagtgacaagaccaacgagttttggaacaaatacaaggatggtgaccagtgcgaaacatcaccctgccagaaccagggcaaatgtaaagatggcctgggagaatatacttgtacctgcttagagggctttgaggggaagaactgcgagttattcactcgtaagctctgcagcctcgataatggcgattgcgatcagttttgccatgaggagcagaactctgtggtgtgcagctgtgccaggggctatacccttgccgacaatggaaaagcctgtattccaacagggccttacccttgcggtaagcagacactggaaaggcgaaaaagaagcgtcgcgcaggctactagttcgagtggtgaggcccctgacagcataacatggaagccttacgatgccgctgacctagatcctacagagaatcctttcgatttgctggatttcaatcaaactcaacccgagaggggcgacaataatctgaccagaattgtgggtggacaggaatgtaaggacggggagtgtccctggcaggcccttttgattaacgaggagaatgaaggattctgcggaggcactattttgtccgagttttacattttgacagctgcccactgtctctatcaagccaagcggttcaaagtccgtgtgggtgaccgaaatacagaacaggaagagggcggggaagccgtacatgaagttgaagtggttatcaaacacaacagattcaccaaggagacgtatgactttgacattgcagttctcagactgaaaacccctattacatttaggatgaacgtggctcccgcatgcctacccgaaagagattgggctgaaagtactttaatgactcaaaagactggcattgtttcaggcttcgggaggacacatgagaaaggccggcagtcaacccggctcaagatgttggaagtcccttatgtcgatcgtaattcgtgcaagttgtcctccagctttataataactcaaaacatgttttgcgccggctacgataccaagcaggaggatgcctgccaaggagactcagggggcccccacgttactcggtttaaggatacttactttgttaccggcatcgtgagctggggcgagggctgcgctcgaaagggcaaatacggcatctatacgaaagtgaccgcatttctgaagtggattgatcggtcaatgaaaactcgcgggctaccaaaagccaagtcgcatgcacccgaggtgatcacatcttccccattgaag

SEQ ID NO: 9380 - DNA, 1464 bp, synthetic construct
  misc_feature 1..1464: note = source = /note="Description of Artificial Sequence: Synthetic coding sequence"
  source 1..1464: mol_type = other DNA
atggggcggcctctccatctggtgttactctctgcgtctctcgctggactgcttctcttaggcgaaagcctgttcatccgaagggaacaggccaataacatccttgctcgagtgaccagggccaattctttcctcgaggagatgaagaaggggcacctcgaaagggaatgcatggaagagacttgttcttacgaagaggccagagaggtttttgaggacagcgataaaactaacgagttctggaataaatataaagacggggatcaatgtgagacttcaccctgccaaaaccagggaaagtgtaaagatggtctgggcgagtatacgtgtacctgtttggaagggttcgaaggaaaaaattgcgagttgtttacaagaaagctgtgctcactggataacggcgactgcgatcagttctgccacgaggagcagaactcagtggtgtgcagctgcgcacggggctatacccttgccgataatggaaaagcctgcattccaacaggcccatacccctgtggaaagcaaaccctggaacggcgtaaacggtccgtggcccaggcaacaagctctagcggcgaagccccagacagcataacttggaagccctacgatgcggccgatctcgacccaacggagaaccccttcgacctgcttgacttcaatcagactcagcctgaacggggagataataacctgacccgcattgtgggggggcaagagtgcaaggatggggagtgcccctggcaggccctccttattaatgaggagaacgagggcttctgcgggggcacgattctctcagaattctacattctgaccgctgctcattgtctgtaccaggctaaacgtttcaaggttcgggtgggtgaccgaaacaccgaacaggaggagggaggcgaagcagtccatgaagtggaagtggtcattaagcataacagatttaccaaggagacctacgacttcgacatcgctgtgcttcggctcaagaccccaatcacctttaggatgaatgtcgccccggcctgtctgcctgagcgagattgggccgaatctacgctcatgacacagaaaacgggaatcgtctctggctttggccgcacacatgaaaagggaagacagtccaccaggctgaagatgctggaagtgccttacgtagacaggaatagctgcaaactaagcagctcgttcataataacccagaacatgttttgcgcggggtacgacacgaagcaggaagatgcatgccagggtgacagcggaggaccacacgtgactcgattcaaagacacctacttcgtcacaggaattgtgagctggggcgagggctgcgcaaggaaagggaagtacggcatttacaccaaggtaacggcgttcctgaagtggatcgatcgcagcatgaaaacgcgcggcctgccgaaggctaagagccacgcgccggaggttattacttccagcccactgaaa

SEQ ID NO: 9381 - DNA, 1464 bp, synthetic construct
  misc_feature 1..1464: note = source = /note="Description of Artificial Sequence: Synthetic coding sequence"
  source 1..1464: mol_type = other DNA
atgggacggccacttcatctcgttcttctcagtgcctcactagccgggttattgctcctcggagaatcactctttatcaggagggaacaggcaaacaacatcctggctcgggtgactagagccaactctttcctcgaagagatgaaaaagggacatctagaacgcgaatgtatggaagagacttgttcatatgaagaggcaagggaagtattcgaagatagtgataaaactaatgaattttggaataaatataaagatggagatcagtgtgaaacatcaccctgtcagaatcagggaaaatgcaaggatgggctcggagaatatacatgtacatgccttgaagggttcgaggggaaaaactgtgaactgtttacacggaagctctgttcactcgataacggagactgtgatcagttctgccatgaagagcagaattctgtcgtatgctcatgtgcccgggggtacacactcgccgataacgggaaagcttgcatccccactggaccttacccttgtgggaaacagactcttgaaaggcgcaaaaggagtgtggcacaggccacatctagttcaggggaggccccagattccattacatggaagccctacgatgcagcagatctcgatcccacagagaacccctttgaccttttggatttcaaccagacacaaccggaacgcggggataacaatctgacaagaatagtggggggacaggagtgtaaagatggggagtgtccttggcaggccctgttgattaatgaagaaaatgaaggattctgcggaggaactatcttatccgagttttacatcctcactgcagcgcattgtttgtatcaagctaaacgcttcaaagtccgcgtcggggatagaaatacagaacaggaagagggaggagaagccgtgcatgaagtggaggtggttataaaacataacaggttcactaaagagacttatgattttgacatagccgtgctaagacttaaaactcccatcacattcaggatgaacgtcgcacctgcttgtctgcccgaaagagactgggctgaaagtactctcatgacacaaaaaacaggaatcgttagtgggttcgggagaacacacgagaaagggaggcagagtacaagactcaaaatgctcgaagtgccatatgtggatcggaattcctgtaaactctcatctagttttataatcacgcaaaacatgttctgtgccggatatgatacaaagcaggaagatgcctgccagggggattcagggggaccccacgtaacaagatttaaagacacatattttgtaactgggatagtctcatggggggaaggatgtgctcggaaagggaagtatgggatatatactaaagttacagcttttttgaagtggatcgatcgctctatgaaaactagaggactgcctaaagccaagtctcacgctcccgaagtgataacatcgtcaccacttaaa

SEQ ID NO: 9382 - DNA, 1875 bp, synthetic construct
  misc_feature 1..1875: note = source = /note="Description of Artificial Sequence: Synthetic coding sequence"
  source 1..1875: mol_type = other DNA
atgatcttcctctaccaagtggtgcacttcatcctgtttacttccgtctcgggcgagtgcgtgacccagctgctgaaggacacctgcttcgaaggaggcgatatcaccactgttttcaccccgtccgccaaatactgccaagtggtctgcacctaccatcctcggtgcctgctgttcacttttacggctgaaagcccgagcgaagatcctacgcgctggtttacctgcgtgctgaaagactccgtcacggagactctcccgcgggttaaccggaccgccgccatctcggggtactcgttcaaacaatgttcgcatcagatctccgcctgcaacaaggatatctacgtggatctggacatgaaaggaatcaattacaacagctccgtggcaaaatcggctcaagaatgccaggaacgctgtaccgatgatgtgcattgtcacttcttcacctacgccacccgccagttcccttcgctcgagcaccggaatatctgtctgcttaagcacacccagaccggcactcctacgcggatcaccaagttggataaggtggtgtctggattttcactgaaatcctgtgccctctccaacctcgcttgtatccgcgacatcttccctaacactgtgttcgcggatagcaacatcgactccgtgatggcccccgacgcattcgtctgcgggcgtatttgtacccatcatcccggctgtctcttcttcaccttcttctcacaagagtggccaaaagaatcgcagcgcaacctgtgccttctcaagacgtccgagtccggactgccgtcaactagaatcaagaaatcaaaagccctctcgggtttctcgctgcagtcgtgccgccactccatcccggtgttctgccactcgagcttttatcatgacactgactttctcggagaagagctggacattgtggctgccaagtcccatgaagcctgtcagaagctctgcaccaatgctgtgcgctgccagtttttcacttacaccccggcgcaggctagctgcaacgaagggaagggaaagtgctatctgaaactgtcctcaaatggatcccccaccaaaatcctgcacggaaggggaggcatcagcggttacacgctgcggctctgcaagatggataacgaatgtactactaagatcaaaccaagaatcgtgggcgggaccgcgtcggtccggggagagtggccttggcaggtgaccctccacacgacgtcgcctactcagcgccatctgtgcggaggctcaatcattggaaatcaatggattctcaccgcggcacattgcttctacggcgtcgagtccccgaaaattctgagagtctactccggcattttgaaccagtcggaaatcaaggaggatactagcttcttcggagtgcaagaaatcatcatccacgaccagtacaaaatggcggagtcaggctacgatattgcccttctgaaattggaaacgaccgtgaattacactgacagccaaagaccgatctgcctgccgtccaagggtgacagaaacgtcatctacaccgactgctgggtcaccgggtgggggtacaggaaactgagagataagatccagaatactctgcaaaaagcaaagatcccgctggtgaccaacgaagaatgtcagaagagatatcggggacacaagatcactcacaaaatgatctgcgccggatatcgcgaaggaggaaaagacgcttgtaaaggagatagcggcggcccattgtcgtgtaagcataatgaggtgtggcaccttgtcggcatcacttcatggggcgaggggtgcgcccaacgcgaaaggccaggtgtctacactaatgtggtcgagtacgtcgattggatcttggaaaaaactcaagccgtg

SEQ ID NO: 9383 - DNA, 1875 bp, synthetic construct
  misc_feature 1..1875: note = source = /note="Description of Artificial Sequence: Synthetic coding sequence"
  source 1..1875: mol_type = other DNA
atgatttttctgtatcaggtcgtgcattttattctttttactagcgtgtcaggtgagtgcgttacacagctgctaaaggacacctgctttgagggaggggatataacaacggttttcactccaagcgcgaaatactgccaggttgtctgcacctatcaccctcggtgtctgttgtttactttcacggccgaatcaccctcggaagatcctacgcggtggttcacttgtgttctaaaggacagtgtcacggagacactccctcgtgtgaaccgtacggcggcaataagcggctactcgttcaaacagtgctcacaccaaatctccgcttgtaacaaggacatttacgtcgatttggacatgaagggaattaactacaatagctctgtcgctaagagcgctcaggagtgccaagaacgctgtacggacgacgtgcattgccacttttttacatacgccacacgtcagttcccctcgttggaacaccggaacatctgcttgttgaagcacacccagactggcacccctacaaggatcactaagctggataaagttgtttctggtttctctcttaagtcgtgtgcccttagtaatctggcatgtatacgtgacatcttccccaacaccgttttcgcagactccaacatcgacagtgtcatggcgcccgacgccttcgtttgcggtcgtatctgcacgcatcatccaggctgcctgttcttcactttctttagccaggaatggccgaaagaatcccaacggaacttatgtttgcttaagacttctgagtctggtctaccatcaacccgaatcaagaagtcgaaggccctcagtggattcagtctgcaatcctgtaggcatagcatacccgtgttctgtcattcatccttttatcatgacacagacttccttggggaagaactcgatatcgttgccgccaagtcccatgaagcctgccaaaagctctgtactaacgctgtgcgctgccagttcttcacatataccccggcacaggcttcatgtaatgaggggaagggcaaatgttacctaaaactatcctccaacgggtcaccgaccaagatcttgcacggacgcggtggtatatccgggtacactttacgcctatgcaagatggacaatgagtgcacaacaaagattaagccccgaatcgtaggaggcacagcttcagtgcgtggtgagtggccatggcaggtaacccttcacacaacttcccccacgcagaggcacctatgtggtggatctattattggcaatcagtggatcctgactgcagctcattgcttctacggcgtcgaatctcctaagattcttcgagtctatagtggcattctcaaccagtcagaaattaaagaggacaccagtttttttggtgttcaggaaattattatccatgaccagtacaagatggccgaatcagggtatgatattgcccttctcaagctcgaaacaactgtgaactacacggattcacaaagacctatttgcctccccagcaaaggtgaccgcaacgtaatctacacagactgctgggtcacaggctgggggtacaggaagttgcgtgataaaatacagaacacacttcagaaggccaagattcccttggttaccaacgaggagtgtcaaaagaggtatcgaggccacaagatcacccacaagatgatatgcgcaggttatcgcgagggcggtaaagatgcttgcaagggcgattcgggtgggcccctgagctgtaagcataacgaggtctggcatctggttggaattacatcttggggggagggttgtgctcagcgcgagcggccgggcgtgtatactaatgttgtggaatacgtggactggattttggagaaaactcaagctgtg

SEQ ID NO: 9384 - DNA, 1875 bp, synthetic construct
  misc_feature 1..1875: note = source = /note="Description of Artificial Sequence: Synthetic coding sequence"
  source 1..1875: mol_type = other DNA
atgatttttctgtatcaggtggtgcacttcatattgttcacttctgtgtctggagagtgtgtgacacagctgctgaaggatacatgctttgaaggcggcgatattaccacagtgttcactccaagcgcgaagtactgtcaggtggtgtgcacgtaccacccacgctgtcttctctttactttcacagctgagagccccagtgaggatccaacccggtggttcacatgtgtccttaaggattcagtgactgaaacactgccacgcgtgaaccgtacggcggcgatttccggctatagtttcaagcagtgcagccatcagatttcagcttgcaacaaagacatctacgtcgatctggacatgaaagggattaactataattctagcgtggcgaaaagtgcgcaagagtgccaagagaggtgcactgacgacgtgcactgtcacttttttacctatgctacgaggcagtttcccagcctagagcaccgcaatatttgcctgctgaagcatactcagactggcacaccgactcggattaccaagctcgataaagtagtttctgggttctccttgaaaagctgtgcactgagcaacctcgcgtgcattcgagacatatttcctaatactgtctttgcggactccaatatagactcagtcatggcgcccgacgctttcgtctgcggccgcatctgcactcaccatcctgggtgcctgttcttcacttttttctcccaagagtggcccaaggaaagtcagcgaaatctgtgcctcttaaaaacctctgagagtggactgccatccactcgaatcaaaaagtccaaggcactgtccggtttctctctgcaaagttgccggcattctatcccagtgttctgccattcatcgttctatcatgatacggactttctcggtgaagaattggacatcgtcgctgctaagtcccacgaggcttgccagaagctctgcaccaatgccgtcaggtgccagtttttcacctacactcctgcgcaggccagttgcaatgagggaaagggcaagtgctatctgaaattaagttccaatgggtcacctacgaagattctgcatggaagaggagggattagtggatacacactacgcttatgcaagatggacaatgaatgtactacgaagatcaaacctcgtattgtgggcggaacggccagcgtccggggggaatggccctggcaggtaactctgcataccaccagcccaacccaacgacatttatgtggcggatccatcatcgggaaccagtggattctgacagcagcccactgtttctatggcgtagagtcacccaaaatcctcagagtgtactcaggcattcttaatcagtcagaaataaaagaggataccagcttctttggagttcaggaaatcatcatccacgaccagtacaagatggccgaatctggctacgatatagcacttctgaagctcgaaactactgtcaactatacagattcacaaaggcccatctgtctgccttccaagggcgatcggaacgtgatctatactgactgctgggtgaccggttggggatacaggaagctgcgggacaagatccagaatacattgcagaaagctaagattccgctcgtaactaacgaggagtgccagaagaggtataggggccataagatcacccataaaatgatctgtgccggctacagagagggagggaaggacgcttgtaagggcgacagtggaggacccctctcatgcaagcacaatgaggtgtggcaccttgtcggcattacatcttggggcgagggctgcgctcaaagggagcgccctggcgtttatacaaatgttgtggagtacgtggactggatcctggagaaaacccaggctgtc

SEQ ID NO: 9385 - DNA, 1875 bp, synthetic construct
  misc_feature 1..1875: note = source = /note="Description of Artificial Sequence: Synthetic coding sequence"
  source 1..1875: mol_type = other DNA
atgatctttttgtatcaagtggtgcactttatcctgtttacctcggtgtctggagagtgtgtgacacaacttctgaaagacacctgttttgagggcggagatatcaccaccgtgtttacaccttcggccaaatattgccaggttgtctgtacctatcaccctcggtgtctgttgtttaccttcactgcagaatccccttctgaagatccaactaggtggttcacctgcgtcctcaaagatagcgtcaccgagaccctgccacgggttaatcggacagccgccatctctgggtactcctttaagcagtgcagccaccagatctctgcctgtaacaaagacatctatgtggatctggacatgaaaggcattaactacaactctagcgttgcgaaatccgcccaggagtgccaggagagatgtactgacgacgttcactgtcacttttttacatatgccacgcgtcagttcccaagcttggagcaccgcaacatctgtctgctaaagcacacacagaccggcacacctacccggataaccaaactggataaggttgtcagcggtttttccttaaaaagctgcgccctgtcaaatctggcttgtatccgtgacatcttccccaatactgtttttgccgactcgaacattgattcggtgatggccccagatgcttttgtctgtggacgaatctgcacacaccatccaggctgccttttcttcacgttcttcagtcaggaatggcctaaggaatcccaaaggaacctgtgtctgctgaagacatctgaaagtggcctaccctcaaccagaatcaagaaatctaaggcgctctccgggttctctctccagtcctgtaggcacagcatccccgtgttttgccattcttccttctatcatgataccgactttcttggagaggagctggatatcgtggcggctaagagtcacgaagcatgccagaaactgtgtacaaatgcagtccggtgccagttctttacttacacccccgcccaggcctcctgcaacgaaggaaagggaaagtgctatctcaagctcagttcaaatggtagccctactaaaatcctccatggccgggggggaataagtggatacactctgcgcctgtgcaagatggacaacgagtgcactacaaagatcaagcctcggattgtgggcggaacggcttcagtccggggtgagtggccctggcaggtcaccctacatacaacgagcccaacacagaggcatctgtgcgggggatcgatcataggcaatcaatggattctgaccgctgcccactgtttctacggggttgagtccccaaagattctgagggtctatagcggcatattgaatcaaagcgagatcaaggaggacactagtttctttggggtgcaggagatcattatccatgaccaatacaaaatggcggagtccgggtacgatattgctctgctcaagttagagacaacagttaactacacggattcacagcgcccgatatgcctcccctcaaagggagacaggaatgtcatctacactgactgctgggtgactgggtggggatacaggaagctgcgtgacaagatccaaaataccttgcagaaggccaaaattcccctggtgaccaatgaggagtgtcagaagcgttaccgcggccacaagattacacataaaatgatctgtgctgggtacagagaaggtggcaaggacgcatgcaaaggtgacagcggaggcccattgtcctgcaagcacaacgaggtatggcaccttgttggtataacatcctggggggaaggctgtgcacagagagaacgacctggggtgtacacgaatgtggtggagtacgtggactggatccttgaaaaaacacaggctgtc

SEQ ID NO: 9386 - DNA, 1875 bp, synthetic construct
  misc_feature 1..1875: note = source = /note="Description of Artificial Sequence: Synthetic coding sequence"
  source 1..1875: mol_type = other DNA
atgattttcctgtaccaggtggtgcatttcattctttttacatctgttagtggcgaatgcgttacacagcttctgaaagatacctgtttcgaaggcggcgatattaccacagtgttcacaccaagcgcaaaatattgtcaagtggtttgcacctatcatcccagatgcctactgttcactttcaccgctgagtctccaagcgaggatcccactcgctggttcacttgcgtgctgaaggactctgtgactgaaactctgccaagggtgaataggaccgccgctataagcgggtattcttttaagcagtgctctcatcagatttccgcatgcaacaaggatatctacgtcgacctggatatgaaaggaatcaactataacagcagcgttgcaaagtctgcccaagagtgccaagaaagatgcactgacgacgtgcattgccatttcttcacctatgctactaggcagttcccatcattagaacatcggaatatctgcttactaaagcacactcagactgggaccccaactaggatcaccaagttagataaagtagtttcaggcttttccctcaagtcttgtgccctgtctaatctagcctgcattcgggatatcttccccaacacagttttcgctgatagcaacatagactccgtcatggccccagacgcttttgtctgtggccgcatctgcacccaccaccccgggtgtctcttcttcacatttttttcacaggagtggccaaaggaaagccagcgcaatctatgtctgcttaagacctccgaatcaggcctgccttccacccggattaaaaagtctaaagccttgtctggattttccctgcaaagctgtcgccacagcatacccgtgttttgccattcatcattctaccacgacaccgattttctgggtgaggagttagatattgtagcagccaagtctcatgaggcctgccagaaactgtgtacaaacgccgttcgctgccagttcttcacatatacaccagctcaggccagttgtaatgagggcaagggcaaatgttacctaaaactcagtagtaacggttctccaactaaaatcctacatggcagaggagggatatccggatataccctgcgattatgcaagatggataatgaatgcacaacaaaaatcaagcccaggatcgtgggcggcaccgccagcgttcggggtgagtggccatggcaggtgaccctgcacaccacctctccaactcagagacatctgtgtgggggcagcatcatcgggaaccaatggatcctgaccgccgcccattgcttttatggcgtcgagtcccctaagatacttcgggtgtacagcggcatcctgaatcaatctgagataaaggaagatacttccttttttggggtccaggagatcattattcatgaccagtacaaaatggccgagagcggatatgatattgccctgctgaaactggagaccaccgtgaattataccgatagtcagaggcctatctgtctgccaagcaaaggagataggaacgtgatttataccgattgctgggtcacaggttggggctaccgtaaactgcgcgataagattcagaataccctacagaaggccaagatccccctagtgacaaatgaagagtgtcagaaaagataccggggccacaaaattactcataagatgatttgtgccggctaccgggaaggcgggaaagacgcttgtaaaggggactctggtgggcctctatcttgtaaacacaatgaggtttggcatctggtgggcataactagctggggcgagggctgcgctcagcgagaacgtccaggcgtttacacaaacgtggtggagtacgtagactggattctggagaagactcaagctgtc

SEQ ID NO: 9387 - DNA, 1875 bp, synthetic construct
  misc_feature 1..1875: note = source = /note="Description of Artificial Sequence: Synthetic coding sequence"
  source 1..1875: mol_type = other DNA
atgattttcctctaccaggtcgtgcacttcattctctttaccagcgtgtccggagagtgcgtgactcagctgctcaaggacacttgcttcgaaggtggagacatcaccaccgtgttcactccctcggcgaagtactgtcaagtggtctgcacctaccatccgcggtgcctgctgttcaccttcactgcggagtccccttcggaggacccgaccaggtggttcacttgcgttctgaaagattcggtcactgaaactcttccccgtgtgaacagaactgcggccatctccggatactcctttaaacagtgtagccatcagatctcagcatgcaataaggatatctacgtggatctcgatatgaaaggcatcaactacaattcatcagtggcgaagtcggcccaggagtgtcaagaaagatgtacggatgatgtccactgtcacttctttacctacgcaacccggcagttcccgtcgctcgaacatcggaatatctgccttctgaaacacacccagactggaaccccgactcgcatcactaaacttgacaaggtcgtgtcaggattttcactgaaaagctgcgccctctcaaaccttgcatgcatccgagacattttccctaacacggtgttcgccgactcgaatatcgactccgtgatggccccagacgcttttgtctgcgggcgcatctgcacccatcatcctggttgtctgttcttcactttcttctcacaagagtggccgaaggaatcgcagcggaacctgtgcctgcttaagacttcggaaagcggactcccatccactagaattaagaagtcaaaagctctgtctggtttctcgcttcaatcgtgccgccactcaataccagtgttttgtcacagctccttctaccacgacaccgatttcctgggcgaagagctggacattgtggccgctaagtcccatgaggcctgccagaagctgtgcactaacgcggtgcgatgccagttctttacttacactcctgcccaggcctcgtgtaatgagggcaagggaaaatgctaccttaagctctcgagcaacggctccccgaccaaaatcctccacggaagagggggcatcagcggatacacccttcgcctgtgcaagatggacaacgaatgcaccactaagatcaaacctaggattgtggggggtacggcatccgtgcggggtgagtggccgtggcaggtgaccctccacacgaccagcccaactcagcgccacctctgtggcggctcgattatcggaaaccagtggattctcacggcagcccactgcttctacggggttgaatcaccgaagattctgagagtctatagcgggatcctcaaccaatcggagatcaaggaggacacctcctttttcggagtgcaagagatcatcatccatgaccagtacaaaatggcagagagcggttacgatatcgcgctgctgaagctggagactactgtgaactacaccgacagccaaagaccgatctgcttgccgtctaaaggagatcgcaatgtcatctacactgattgctgggtgacgggctgggggtaccggaagctgcgcgataagatccagaataccctgcagaaggccaaaattccgctggtgacgaacgaggaatgtcaaaagcggtaccgtggccacaagatcactcacaagatgatctgcgcgggttaccgcgagggaggtaaggacgcgtgcaaaggagactccgggggccccctcagctgtaagcacaacgaagtgtggcatcttgtgggaatcacttcatggggtgaaggatgcgcgcagagagagcgaccgggcgtttacactaacgtggtggaatacgtggactggatcctggagaaaacccaggcagtg

SEQ ID NO: 9388 - DNA, 1875 bp, synthetic construct
  misc_feature 1..1875: note = source = /note="Description of Artificial Sequence: Synthetic coding sequence"
  source 1..1875: mol_type = other DNA
atgatttttctgtaccaagtggtgcactttattctctttacctcggttagcggagagtgtgtgactcaactccttaaagatacttgttttgaaggaggtgacataacgacggtgtttaccccgtcagcaaagtactgtcaggtcgtctgtacctaccaccctaggtgcctgctctttacctttactgcagagtcgccctcggaggaccctaccaggtggttcacctgtgtccttaaggattcagtgactgaaactctgccaagagtcaatcgtaccgcagccatttcagggtatagctttaagcaatgtagtcaccaaatctcggcatgtaacaaggacatttatgtggacctggatatgaaagggataaactataacagctccgtggcaaagagcgctcaagagtgccaggaaagatgcactgacgacgtgcactgccatttctttacctatgcgactcgtcaatttccctcccttgaacatcgcaacatttgcctgctcaagcacactcagactggtacgcccactagaatcaccaaattggataaggtcgtgtccgggttctcgctcaagagctgtgcactttcgaatctggcctgcattagagacattttcccgaataccgtgttcgccgacagcaatattgattcagtgatggcacctgacgcatttgtgtgtggacggatttgtacccatcaccccggatgcctctttttcactttcttttctcaagagtggccgaaggaatcacaaagaaacctgtgtctgcttaagaccagcgagtccggtttgcctagcacccgcattaagaaatccaaggcactctcaggattttcgctgcaatcttgcagacatagcattcctgtcttttgccatagctcgttctaccacgacaccgatttcctgggtgaagagctcgacattgtggcagccaagtcacatgaagcatgtcaaaagctgtgtaccaatgctgtcagatgtcagttcttcacctacacgccagcacaggcctcatgcaacgaggggaaaggaaagtgctaccttaagttgtcatcaaacggatcaccaactaaaatcctgcacggaaggggtgggatctccggatacacccttcgactctgcaagatggacaacgaatgcactaccaagattaagcctagaattgtcggtggaacggcaagcgtgagaggcgaatggccttggcaagttacgctccacaccactagccctactcagcggcatctctgcggcggatccatcatcggtaaccagtggattttgactgcggcgcattgcttttacggcgtcgaatcccctaagatcctgcgcgtgtactcgggtattctgaatcagtccgaaatcaaagaggatactagcttctttggtgtgcaagagatcattatacatgaccaatacaaaatggcagaatccggatacgatatagctcttcttaagctggaaaccactgtcaactacactgattcacagcgccctatttgtctgcccagcaagggagatcggaatgtcatttacactgattgttgggttaccggctggggttacagaaagttgagagataagatccaaaatactctgcaaaaggcgaagattccgcttgtgactaacgaagagtgtcaaaagcgttaccgcggtcataagatcacccataagatgatctgcgccggttaccgcgaggggggtaaggatgcatgcaagggagattcgggtggaccactttcctgcaaacacaacgaagtgtggcacctggtgggaataacctcctggggagagggctgtgcacaacgtgagaggcctggtgtctacaccaacgtggtcgaatatgtcgattggattcttgaaaagacgcaagcagtg

SEQ ID NO: 9389 - DNA, 1875 bp, synthetic construct
  misc_feature 1..1875: note = source = /note="Description of Artificial Sequence: Synthetic coding sequence"
  source 1..1875: mol_type = other DNA
atgatctttctgtatcaagtcgtccacttcatcctatttactagcgtgtccggcgaatgcgttacccaacttctcaaagacacatgcttcgaaggaggagacataaccaccgtgtttacgccgtccgcaaaatattgtcaggtcgtgtgtacctaccatcctcgttgtctcctatttactttcacggccgaatctccatccgaggaccccaccaggtggttcacttgtgtgcttaaggactccgttacagagacccttccaagagtgaataggactgctgctattagcggctactcgtttaagcagtgtagccatcagatatccgcttgcaacaaagatatatacgtggacctagacatgaaagggataaactataacagctcagtggctaagtcggctcaggaatgccaggaacgctgcaccgacgatgtacactgccacttttttacttatgctactcggcagttcccgagcttagagcatagaaacatttgcctgctaaagcacacacagacagggacaccgacaaggatcacgaagctggataaagtcgtaagtggtttctccttaaagagctgcgccctgtccaatttagcatgtatcagggatattttccctaataccgtatttgctgacagcaacattgacagcgtcatggctccggacgcatttgtgtgcgggagaatctgtacacaccaccctgggtgcctcttctttacatttttttcccaggagtggcccaaggagagtcaaagaaacctttgccttctaaagacttccgagtccggactgccttctacgcgaatcaaaaagtctaaagcactgagcggcttttcgcttcagtcatgcaggcattccatccccgtcttttgccattccagtttttaccatgatactgacttcctgggtgaagaactggatattgttgcagctaagagccatgaggcctgccagaagctctgcactaacgctgtgcggtgtcaatttttcacatacacacccgctcaagcgtcctgcaacgagggtaagggcaaatgctatctcaagttgtcgagcaatggatccccaactaagatcctacacggccgtggcggaattagcggctacactctgcggctctgcaagatggacaatgaatgcacgaccaaaattaaacctcggattgtaggcggaacagcctccgtccggggagagtggccatggcaggtgactctccacacaactagtcccactcagaggcatctgtgcggaggaagcattattgggaatcagtggatcctgaccgctgcccactgcttctacggggtcgagtcacccaagatcttaagggtgtactccgggattctgaatcagagcgagattaaggaagacacatccttctttggcgtgcaggagatcatcattcatgaccaatataagatggctgagtcgggctacgacatcgcactgctcaaactggaaactactgtcaactacacagacagccagcgtcctatatgcctgccctctaagggcgatcgcaacgtgatttacaccgattgttgggttacaggctggggttataggaaactgagggacaagatccaaaacacactgcagaaagctaaaatccccctcgtgaccaacgaagaatgtcaaaagcggtatcggggtcataaaatcacccacaaaatgatctgcgctggctatcgggagggagggaaggacgcatgcaagggggacagtgggggacccttatcgtgcaagcacaacgaagtgtggcaccttgtaggaattacgtcgtggggcgaagggtgtgcccaacgggaaaggcctggtgtgtataccaacgtcgttgaatatgtggattggattctggaaaagacacaggctgtt

SEQ ID NO: 9390 - DNA, 1875 bp, synthetic construct
  misc_feature 1..1875: note = source = /note="Description of Artificial Sequence: Synthetic coding sequence"
  source 1..1875: mol_type = other DNA
atgatctttctctatcaggtggtgcattttattttgtttacatctgtgtctggggaatgcgtgacacagcttctaaaagatacttgttttgaaggaggagatataactactgtgttcacaccttctgccaagtattgtcaggtagtgtgcacttatcaccctcggtgtcttctattcactttcactgctgaaagtccttccgaagatcccactcgatggttcacatgtgtgttgaaggattctgtaactgaaactctaccccgggttaataggactgctgctatatctgggtattcctttaaacagtgctctcaccagatatccgcttgcaacaaagacatatatgtcgatctggatatgaaagggataaattataactcttcagtcgctaagtctgcacaggagtgtcaagaacgttgcacagatgatgtccattgccatttcttcacgtatgcaactagacagttcccctcactggaacacagaaatatttgtctactgaaacatacacagactggaactcccacaaggataacaaaattagataaagtagtctcaggattctctttgaaatcctgtgccctatctaatctcgcctgcattcgtgacatcttcccaaatactgtgtttgccgatagtaacatagactccgtaatggctccagatgcgtttgtctgcggaaggatctgcactcaccaccctgggtgtctatttttcacattcttttcccaggaatggcccaaagaatctcaacgcaatttgtgtctactcaaaacgtccgaatccgggctcccctccactcggatcaaaaaatccaaagcccttagtggattctccttgcaatcgtgtcggcactccataccagtgttctgccactcatcgttctatcatgacacagacttcctcggggaagagcttgatatcgtcgccgcgaagagtcacgaagcttgtcagaagctgtgtactaacgctgtccggtgccaatttttcacttacacaccagcccaggcatcctgcaacgaaggaaaagggaagtgttatttaaagctttcgtccaacgggtctcctacaaaaatactccatggaaggggggggatatctgggtacacacttcggttatgtaaaatggataatgaatgcacaactaaaattaagccccggatagtcggggggacagcttccgttagaggggaatggccatggcaggtgacactccacactacatcccctactcagaggcacctttgcggggggtcaattataggaaatcaatggatccttactgccgcccactgcttttacggagttgaatctcccaagatacttcgcgtttattccggaatcctgaaccaatccgaaataaaggaagatacttcattttttggggtccaagaaataattattcacgatcagtataaaatggccgaaagtggatatgatatcgctctgctcaagcttgaaacaactgtgaattatacagatagtcagagacctatatgtctaccaagtaaaggagatagaaatgtcatctatactgattgttgggtgacaggatggggatatagaaaattacgggataagatacagaacacactccagaaagccaaaatccccctcgtgactaacgaagaatgtcagaagcggtataggggacataaaatcactcataaaatgatatgtgccgggtatagggagggagggaaagatgcttgtaaaggagattcaggggggcccctttcatgtaaacataatgaagtgtggcacctggtcgggataactagttggggagaagggtgtgcccagcgggagaggccaggggtgtacactaacgttgttgaatatgtggactggatccttgagaaaactcaggccgtt

SEQ ID NO: 9391 - DNA, 1875 bp, synthetic construct
  misc_feature 1..1875: note = source = /note="Description of Artificial Sequence: Synthetic coding sequence"
  source 1..1875: mol_type = other DNA
atgatttttctatatcaggtagtccactttattctctttacaagtgtgtctggtgaatgtgtcactcagctgctcaaggacacgtgctttgagggcggcgacattaccacagtatttacgccctccgccaagtattgtcaggtggtatgcacctaccatcccaggtgccttttgttcaccttcaccgctgagtcaccctcggaggacccaactagatggttcacttgtgttctaaaggattcggtgaccgagacacttcccagagtgaaccgcacggccgctatctcaggatactcctttaagcaatgttcgcatcagatctcagcatgcaacaaggacatctacgtggatctggacatgaaagggatcaactataatagcagtgtggccaagtcagcccaagagtgccaggagcgatgcacagacgatgtacattgtcatttttttacgtatgccaccagacaatttccaagtctggagcaccggaatatttgtttgctgaagcacacacagaccggcaccccaactaggataacgaagctcgacaaggtggtcagcggttttagcctgaaatcttgcgccctgtccaatctggcatgcattcgggatatctttcctaacaccgtcttcgctgattcaaatattgattctgtcatggcacctgatgccttcgtgtgcgggaggatttgcacccaccatccgggatgcctcttcttcacttttttctctcaggagtggcctaaagagtctcagcgcaacttgtgtctcctaaaaacctcagagagcggtctcccttccacgcgcattaaaaagagcaaagcactttccgggttctccctccaatcctgccgccattccattccggtgttctgccacagctcattttaccatgacactgatttcttgggtgaggagctcgacattgttgctgcgaagtcccatgaagcttgtcagaagctttgtacgaacgccgtcagatgtcagttctttacttacacacctgctcaggcgtcttgtaacgagggaaaaggaaagtgctacctgaagctctcttctaatgggtcacccactaaaatactgcatggtaggggaggcatctccgggtacacgctaaggttgtgcaagatggacaacgagtgcaccaccaagatcaagcccaggatcgtgggcggcacagcctcagtgaggggcgagtggccctggcaggtgaccctgcataccacatcaccaacacagaggcacttgtgcggcggaagcattatcggcaaccaatggattctgaccgccgcgcattgcttctatggcgttgaatcacctaagattctccgagtgtacagtggaatcctgaaccagtccgagattaaggaggacacatccttctttggggtccaggagatcattatccacgaccagtacaagatggcagagagcggatacgacatcgctcttctgaagctggagacaacagtcaactacactgattcacagcgccccatttgcttgcccagtaaaggcgataggaatgttatctacactgactgttgggtaacaggttggggatataggaagctgcgtgataagatccagaatacccttcagaaggctaagatcccgctggtgacaaatgaagagtgccaaaagcggtatcgcgggcataagatcacgcacaagatgatatgtgctggctaccgagagggcggaaaggatgcttgtaagggcgactccggtggtcctctgtcgtgcaaacataacgaggtctggcatttagtgggcattacttcttggggagaaggctgcgcgcaacgggagcggccaggcgtgtacacgaacgtggtcgagtatgtggactggatcctggagaagacccaggcagtg

SEQ ID NO: 9392 - DNA, 1875 bp, synthetic construct
  misc_feature 1..1875: note = source = /note="Description of Artificial Sequence: Synthetic coding sequence"
  source 1..1875: mol_type = other DNA
atgatcttcctgtaccaggttgttcatttcattctgttcactagcgtctcgggagagtgcgtgactcaactcctcaaagacacctgctttgaaggcggtgacatcacgactgtgtttactccgtcagccaaatactgccaagtggtgtgtacctaccatccgcgctgccttctcttcacgttcactgcagaatcaccctccgaggaccccacccgctggtttacctgcgtgctgaaggattccgtcactgaaaccctgccgcgcgtgaaccgcaccgcagccattagcggatactcgttcaagcagtgcagccatcagatctcggcgtgtaacaaagacatctacgttgacctcgacatgaaaggaatcaattacaactcgtccgtggccaaatctgcccaggagtgccaggagcggtgcaccgatgacgtgcactgccacttctttacctacgccacgcggcagtttccttcgctggaacacaggaacatctgcctcttgaagcacacccagaccggaacgccaaccagaatcactaagctggataaggtggtgtcgggattctcgctgaagtcctgcgctttgtcaaatctggcctgcatccgcgacatctttcctaatactgtgtttgcggactcgaacatcgatagcgttatggcaccggacgcttttgtctgtgggcgcatctgcactcatcatcccggatgtctgttctttacgtttttctcacaggaatggccgaaggagtcccaaaggaatctctgcttgcttaaaaccagcgagtcagggctgccgtccactagaatcaagaagagcaaagcgctgtcaggcttctcattgcagtcctgcagacattcgatccctgtgttctgccactcctccttctaccatgacaccgactttttgggagaagaacttgatatcgtggcagccaagagccacgaggcctgtcagaaactttgcactaacgccgtcagatgccaattcttcacttacacgccggcacaagcctcgtgcaatgaaggaaagggaaagtgctacttgaaactttcatcgaacggatccccgacgaaaatcctccacgggcggggaggcatttcaggatatactctgcggctttgtaaaatggataacgaatgcactaccaagattaagccccgcatagtgggaggaaccgcctctgtgcgcggggaatggccctggcaggtgacgctgcatactacttcaccaactcaaagacatctctgcggcggatccatcatcgggaaccagtggatccttactgccgcccactgtttctacggcgtcgagtctcctaagattttgcgcgtttactcagggatccttaatcagtcagagattaaagaggacacctcattcttcggtgtgcaggagatcatcatacacgaccagtacaagatggcagaaagcggctacgatatcgctctcctcaagctggaaaccactgtcaactacactgactcgcagcgccccatttgccttccatccaaaggggatcgcaatgtgatctacaccgactgctgggtgaccggatgggggtatagaaagctccgcgacaagatccagaataccctgcaaaaagctaagatcccgcttgtgaccaacgaagagtgccagaagcgttaccggggccacaagatcactcataagatgatctgcgccggctaccgggagggcggaaaggatgcctgtaaaggggatagcggcggaccactgtcgtgcaagcacaatgaagtgtggcacctggtgggaatcacttcctggggcgaaggatgtgcgcagagagagcgaccgggagtctacaccaacgtggtcgaatacgtcgattggatcctcgagaaaactcaggctgtc

SEQ ID NO: 9393 - DNA, 1875 bp, synthetic construct
  misc_feature 1..1875: note = source = /note="Description of Artificial Sequence: Synthetic coding sequence"
  source 1..1875: mol_type = other DNA
atgatatttctgtaccaagtggtccactttatcctttttactagcgtatccggcgaatgcgtgacgcagcttttgaaggatacctgttttgaaggtggggacatcactaccgtgtttaccccttcggctaagtactgccaggtggtctgcacttatcatcctaggtgtctgctgtttactttcactgcagagtcaccttccgaagatcctactcgatggtttacttgcgtgctgaaggattccgtgaccgagacgcttcctagggtgaatcgcactgccgcaatttcgggatattctttcaaacaatgctcgcaccagatttccgcctgtaacaaagacatttatgtcgatctggacatgaagggaatcaattacaacagctcagttgctaagtcggcacaggaatgccaagaaagatgcaccgatgatgtgcactgtcacttctttacctacgcgacccgccaatttccctcactggagcatcgcaacatttgtctcctgaagcatacccaaaccggaacgcccacccggatcacgaagctggacaaagtggtcagcggcttctcccttaagtcgtgtgcgctctccaaccttgcgtgcattagggacatatttcctaacaccgtctttgcggatagtaacattgattcggtcatggcccccgatgcctttgtgtgcggacgaatatgcactcaccatcccggttgtctgttcttcaccttcttttcccaagagtggccaaaagaaagccagcggaacctgtgcctcctcaagacgtcggaatccgggcttcctagcacccgtattaagaaatcaaaggcactgagcggcttttccttgcaatcctgtcggcacagcatcccagtgttctgtcatagctcgttttaccatgacactgatttcctgggcgaggaattggacattgtggcagcaaagtcccacgaagcatgtcagaagctctgtaccaatgccgtgcgctgtcaattcttcacgtacacccctgctcaagcaagctgtaatgagggcaagggaaagtgttacctgaaactttcgtcgaacgggtcccctaccaagattctgcatgggcgcggaggtattagcggatataccctgaggctttgcaagatggataacgagtgcacgaccaagatcaagccgagaattgtcggtggaacggcctccgtcaggggagaatggccctggcaggtgaccctgcacactacctcgcctacgcagcggcatttgtgtggcgggagcatcattggaaaccaatggattctgactgcagcacactgcttttacggagtggaatcacccaaaatactgagagtgtactccggaattcttaatcagtccgagatcaaggaagatacttctttctttggtgtgcaggagattatcatccatgaccaatacaaaatggctgagtccggttacgatattgcgttgcttaagctcgaaactaccgtgaactatactgacagccagcgccctatatgtctgcctagcaagggggaccggaacgtgatctacaccgactgttgggtgaccgggtggggttacagaaaactgcgggataagattcaaaacaccctgcaaaaggcaaaaatcccattggtgactaacgaggagtgtcaaaagaggtaccgagggcataagatcactcacaagatgatctgcgcaggttacagggaaggtggtaaggatgcatgtaagggcgacagcggggggccacttagctgcaagcataacgaggtgtggcatctggtcggaataacctcgtggggtgagggatgtgcacaacgcgaacgtcccggagtgtacaccaacgtcgtggagtacgtggactggatccttgaaaagacgcaagccgtc

SEQ ID NO: 9394 - DNA, 1875 bp, synthetic construct
  misc_feature 1..1875: note = source = /note="Description of Artificial Sequence: Synthetic coding sequence"
  source 1..1875: mol_type = other DNA
atgatctttctctatcaggtcgtccacttcattctatttacatcggtgtccggggaatgcgttacacaattgttgaaagatacttgctttgaggggggagacataaccactgtgttcacgcctagcgctaagtattgtcaggtagtgtgcacctatcacccacgttgcctgctgttcacattcacggctgagtcccctagtgaggatcctaccaggtggttcacttgcgtgttaaaagatagtgtgactgaaacactgcccagagttaataggactgcagccatttcggggtattctttcaaacagtgtagtcatcagatttccgcgtgcaacaaggacatatacgttgacctggatatgaaaggcatcaactataattcatccgtggctaagtccgctcaagagtgccaggagcgatgtacagacgacgtccactgccactttttcacttatgccacccgtcagttcccatccctggagcacaggaacatttgcctcctcaagcacacacagaccggtactcccacccgaatcactaagttagataaagtggttagcgggttctcactgaagtcttgcgcgctgagcaatcttgcctgcatccgagatatcttcccgaataccgttttcgctgattcaaatatcgattccgtgatggctcctgatgcattcgtgtgtggccggatctgcacccatcaccccggatgtttattttttacattcttcagtcaggaatggcccaaggagtcgcagcggaacctttgtcttctgaaaacctcggaatcgggcctgcccagcaccaggattaagaagtctaaagccctctccggcttttctctgcaatcctgcaggcactccatcccggtgttctgccactcttctttctatcacgatactgattttctgggagaagaactcgacattgtcgcagctaaatcacacgaagcgtgtcaaaagctctgcaccaatgccgttcgctgccagttcttcacatataccccagcccaagccagttgcaacgaaggaaaaggaaagtgctatcttaaactgagcagcaatgggtcgcctacaaaaatcctgcacggcagaggtgggatttcgggttacaccctgagactttgcaagatggataatgaatgcaccaccaagatcaaaccaaggatcgtagggggcacagcttcagtacgcggtgagtggccctggcaggtgactctccacaccactagcccaacgcagaggcacctttgtggcggctccatcattggcaatcagtggattctcacagccgcccactgtttttacggagtcgagtcccccaagattctacgagtgtactccggcatacttaaccagtcagagatcaaggaggatacctccttcttcggagtccaggagatcataatccatgaccagtacaagatggccgaatccgggtatgatatcgctctgctgaaattggagacaactgtaaattataccgactctcagaggcctatttgcctgccctcaaagggtgaccgaaacgtgatctatactgattgttgggtgacaggctggggataccgaaagctgagggataagatccaaaacacactgcagaaagccaagatacctttggtgacaaatgaagaatgtcagaagaggtatcgagggcataaaatcactcacaaaatgatttgtgctggttatagggaagggggcaaagacgcgtgcaagggcgattctggcggaccactttcctgtaagcataatgaagtatggcacctggtgggtattacctcttggggcgagggatgtgcacagcgtgaacgaccgggcgtctatactaatgtcgttgagtacgtcgattggattttggagaaaacacaagccgtg

SEQ ID NO: 9395 - DNA, 1875 bp, synthetic construct
  misc_feature 1..1875: note = source = /note="Description of Artificial Sequence: Synthetic coding sequence"
  source 1..1875: mol_type = other DNA
atgatcttcctgtaccaagtggttcacttcatcctgttcacttcagtttctggtgaatgcgtaacacaactgctgaaggatacttgctttgaaggtggtgacatcacaacggtgtttactccgtctgcaaaatactgccaggtggtgtgcacgtatcaccctagatgcctgctcttcacattcactgctgaatctccatccgaggatcccactaggtggttcacatgtgtgcttaaggatagcgtcaccgaaaccctgcccagggtaaacaggactgctgcaattagcgggtattcattcaagcaatgttcacaccaaatcagtgcttgtaataaagatatctacgttgacctggatatgaaagggatcaactacaatagctcagtcgccaaaagtgcacaggagtgtcaagagagatgcaccgatgacgtgcactgtcatttcttcacctatgctacaaggcagtttccaagtctggagcaccgaaacatctgcctccttaagcatactcagaccgggacacctaccaggatcactaagctcgataaagttgttagcggcttcagtcttaagagttgtgccctgtccaatttggcttgcatcagggacatcttcccaaataccgtgttcgctgattcaaatatcgattctgtgatggccccagacgcattcgtttgcggcagaatctgcacacaccacccggggtgccttttcttcacatttttctcccaggagtggccaaaggagagtcagagaaacctatgtttgttgaaaacaagcgagtcgggactcccctcaacgaggatcaaaaaaagtaaggccctgagtggatttagcctgcagagctgtaggcattcgattcctgtattttgtcattctagcttttaccatgatacagacttccttggcgaggaactggacattgtggcggcaaagtcacacgaggcttgccaaaagctgtgcaccaacgcagtgcgctgccaattcttcacctacacgcctgcacaagcttcatgcaatgaagggaagggcaagtgttacctgaagctgtcctccaatggtagtccgacgaaaatacttcacggcagaggcggcatttccgggtatactctgcgcctgtgcaagatggacaatgaatgcaccacaaaaattaaaccgcggattgtgggtggaacagcctcagtccgtggagaatggccatggcaggtgaccctacacacaacgtcccccacgcagcgccatctttgcggggggtcaatcatcgggaaccaatggatcctcaccgccgctcactgcttttacggcgtggagtcacctaagatactgagggtatatagcgggattctaaatcagtcagagattaaagaagatactagcttttttggggtgcaggaaattatcatacatgaccagtataaaatggccgagtcaggctatgacatcgcactgttgaagcttgagaccactgtcaactacactgactcacagcgccccatttgcctcccctcaaagggcgacagaaatgttatctatacagattgttgggtcaccggctggggatatcgcaagctgagagataaaattcaaaataccctccagaaggccaagattccccttgttaccaatgaagagtgccagaagaggtatcgcggccataagataacacataagatgatatgtgctggataccgggagggtggcaaggatgcctgcaaaggagattcaggcggccccttgtcgtgcaagcacaatgaggtctggcacctggtaggcatcacttcttggggggagggatgtgcacaaagggagcgcccgggagtgtacacaaatgtcgtggaatacgtagattggatcctcgagaagacccaggcagtg

SEQ ID NO: 9396 - DNA, 1875 bp, synthetic construct
  misc_feature 1..1875: note = source = /note="Description of Artificial Sequence: Synthetic coding sequence"
  source 1..1875: mol_type = other DNA
atgatattcctgtatcaagtggtccatttcattttgtttacctcggtcagcggtgaatgtgtcactcagttgctgaaggatacctgttttgagggtggggatataaccacggtctttactccctcggcgaagtactgtcaagtcgtctgtacttatcaccccaggtgtctcttgttcactttcaccgcagaatcgccgagcgaggatcccacccgttggtttacctgcgtgcttaaagattcggttaccgaaactcttcccagagtgaacaggacggcagcgattagcggatacagcttcaagcaatgttcccaccagatatccgcatgtaacaaggatatctatgtcgacctggacatgaagggtataaactacaattcctcagtggcaaaatccgcacaggaatgtcaagaaaggtgtactgatgatgtgcactgccacttctttacgtacgccactaggcaatttccatcacttgaacatcgcaacatatgtctgctgaagcatacccagactggaactccgactcgaattactaagctggacaaggtcgtgtcgggattttcgttgaagagctgcgccctttctaacctggcatgtatacgtgacatctttcctaacactgtgtttgcagattcgaacattgacagcgtgatggcccctgacgcattcgtgtgtggcagaatttgcacccatcatcctggatgcctgttctttacgttcttttcccaggaatggccgaaggaatcccagcggaatctttgcctgctgaaaacctccgaaagcggccttccttccactagaattaagaagagcaaagcactcagcggattctcactgcagtcatgtcgtcattcaattcccgtgttttgtcacagctccttttaccatgataccgattttctgggagaagaactggatatcgtggctgcgaagtcccatgaagcatgtcaaaagctgtgtaccaacgcagtgcgatgtcagtttttcacttacactccagcacaggcatcctgtaacgaaggaaagggaaagtgttacttgaagctctcatctaacggatcgccaaccaagatactgcatggtcggggtggtatttcgggctacaccctgagactttgcaaaatggataacgaatgtaccaccaagattaagccacggattgtcggcgggaccgcatccgtccggggggaatggccttggcaggtgaccctgcatacgacctcacctactcagagacatttgtgtggaggcagcattatcgggaatcaatggattctgacggccgcacattgtttttacggtgtggagagcccaaagattttgagagtgtactccggcattcttaaccaatcagagataaaagaggatacctcattctttggagtgcaggaaatcattatccatgaccaatacaagatggccgaaagcggctacgacattgccctccttaaacttgaaactaccgtgaactatacggactcgcagcgccctatttgtttgccctcgaagggggacagaaatgtcatttacactgattgttgggtgacgggatggggctacaggaagctgagagataagatccagaatactctgcagaaggcgaagattccactggtgacgaatgaagagtgtcaaaagaggtacagaggacacaagattacgcacaagatgatttgtgcaggttaccgagaggggggaaaagatgcgtgcaagggtgattccggaggccctctgtcgtgcaagcataacgaggtatggcaccttgtggggattactagctggggcgaagggtgcgcacaacgcgagcgccctggagtgtacaccaacgtggtcgaatacgttgactggattttggaaaaaactcaagccgtg

SEQ ID NO: 9397 - DNA, 1875 bp, synthetic construct
  misc_feature 1..1875: note = source = /note="Description of Artificial Sequence: Synthetic coding sequence"
  source 1..1875: mol_type = other DNA
atgatcttcctgtaccaggtagtgcactttatattgtttacttccgtttcaggagagtgcgtgactcagcttctgaaagatacttgttttgaaggaggagacatcactacagtgtttacaccctctgctaagtactgtcaggtggtgtgcacctatcacccacgatgtttattatttacctttaccgccgagtccccatcggaagatcctacccgttggtttacatgcgtcctcaaggacagcgttaccgagacactgccaagggtcaatcggaccgctgccatctccggctactcattcaaacagtgctcccaccagatcagcgcttgcaacaaggacatctacgtagatctggatatgaagggcataaactacaattcgtcagtcgccaaatccgcccaggagtgtcaagaacgatgcacggacgatgtgcactgccatttcttcacgtacgccacacgacagttccctagcctagagcaccgcaacatctgtctcttaaagcatactcagacaggtactccgacacgtataacaaagttggataaagtcgtatccggttttagcctgaagtcgtgcgccctttccaatttagcctgcatccgggatatattccctaacaccgtgtttgcagacagtaacattgactcagtgatggcccctgacgcttttgtatgtggacgaatttgtacccatcatcccgggtgcttgtttttcacatttttcagccaggagtggcccaaagagtcccagcgaaatctttgtctcctgaagacctccgagagtgggttgccctccacccggattaagaagtccaaggccctgagtggcttctctctccagtcttgcagacactcaattcccgtgttctgtcactccagtttttatcacgataccgatttcctcggcgaggaactggatattgtggcagctaaatcacacgaggcgtgccagaaattgtgtacaaacgctgttcgctgccagttcttcacatatactccagcccaggccagttgtaacgagggtaaaggcaagtgttacctcaaacttagctccaacgggtcacccacaaaaattttgcatggccgaggaggcatcagtgggtataccctgcggttgtgtaaaatggacaacgagtgcacgactaaaattaagccaagaattgtcggaggtacggcttctgtgcggggagaatggccttggcaggtaaccttgcacacaacctcaccaacacagcgccacttgtgcggagggagcattattgggaatcagtggattctgaccgctgcgcactgcttttacggtgtagaaagccctaaaatcctgcgcgtttacagtgggatacttaaccagtcagaaataaaggaggacactagcttcttcggtgtccaggagataatcatccatgaccagtataagatggcggagtctggatacgatatcgctctgctgaagcttgagaccactgtcaattataccgactcgcagcggcctatctgcctaccgtcaaagggtgaccggaatgtgatatacacagactgctgggtcaccggttggggctaccgcaaactcagggacaaaatacagaataccctacagaaggctaaaatacccctggtgacgaatgaggaatgtcagaaacgatatagggggcacaagattacccacaaaatgatttgcgccggttacagggagggggggaaagatgcttgtaaaggtgactccggcggtccattatcatgtaagcataacgaggtctggcatcttgtgggcattaccagctggggagagggatgcgcacagcgagagcgccccggcgtttataccaatgttgtggaatacgttgattggattctggagaagacacaggctgta

SEQ ID NO: 9398 - DNA, 1875 bp, synthetic construct
  misc_feature 1..1875: note = source = /note="Description of Artificial Sequence: Synthetic coding sequence"
  source 1..1875: mol_type = other DNA
atgattttcctctaccaagtggtccacttcattttgttcaccagcgtgagcggagagtgtgtcactcaactgttgaaagacacttgctttgaggggggcgacatcactactgtgtttaccccttccgccaagtactgccaagttgtctgcacttatcatcctcgctgcctcctgttcaccttcaccgccgagtcgccctcggaagatccgacgcgctggttcacgtgtgtgctcaaggactctgtcaccgaaaccttgccaagggtcaacaggaccgccgcaatctccggatactcattcaagcagtgcagccaccaaatctcggcttgcaacaaagacatctacgtggatctggatatgaagggtatcaactacaactcgtcggtagcaaagtctgctcaggaatgtcaggaacgctgcacggatgacgtgcactgccatttcttcacctacgccactcgccaatttccatccttggaacaccgcaacatatgtctgctcaagcatacccaaacgggaaccccgacccgcattaccaaactggacaaggtggtgtccggtttctcactcaagtcatgcgcgctgtccaacctggcctgcatccgagacatcttccctaatactgtgttcgcggacagcaacattgacagcgtcatggctccagatgcattcgtgtgcggcaggatctgcacccatcacccgggatgcttgttctttacctttttcagccaggaatggcctaaggagagccaacgaaacctgtgtctcctgaaaactagcgagtcgggactgccgtcaactcgcattaagaagtccaaggcgcttagcggcttctcattgcagtcatgccgccattcaattccagtgttctgccattcatccttttaccacgacacggatttcctcggagaggagctggacatcgttgctgcgaaaagccacgaagcgtgccagaagttgtgcaccaacgctgtcagatgccagtttttcacctacactccagcccaggcctcgtgcaacgaaggaaaaggcaagtgttacctcaagctcagctcaaacggatccccaaccaagatcctccacggaagaggcggaataagcggctacaccctgcggctgtgtaagatggacaatgagtgcactaccaagattaagcccagaattgtcggtggcactgcttccgtccgcggagaatggccctggcaggtgactctccatactacctctccaacgcagcgccatctctgcgggggctcgatcatcggaaaccaatggatccttacggcggcccactgcttctacggtgttgagtcgccgaagatccttcgcgtgtattccggcattctgaatcaatcagagatcaaggaggacacgtcgttcttcggagtgcaggagatcattatccatgaccagtacaagatggcagaatcagggtacgatatcgcgctcctgaaactggagactactgttaactataccgactcacaacgcccaatctgtctgcccagcaaaggcgaccgtaacgtgatttacaccgattgctgggtcaccggatggggctaccggaaactgcgggacaagatccagaacaccctgcagaaggccaaaattccgctggtgaccaatgaagagtgtcagaagcgctaccggggacacaagatcacccacaagatgatctgtgccggataccgggaaggaggaaaggacgcttgcaagggggactcaggcggaccactgtcctgtaagcataacgaggtctggcacctggtgggaatcacttcatggggagagggctgcgcacagcgcgaaaggccgggagtgtacaccaatgtggtggaatatgtcgactggattctggaaaagacccaggcagtg

SEQ ID NO: 9399 - DNA, 1875 bp, synthetic construct
  misc_feature 1..1875: note = source = /note="Description of Artificial Sequence: Synthetic coding sequence"
  source 1..1875: mol_type = other DNA
atgatatttttgtatcaagttgttcattttattttattcacttctgtttcaggagaatgtgttacccaacttttaaaagatacatgttttgaaggaggagatattactactgtttttactccatcagctaagtattgtcaagttgtttgcacatatcatccaagatgtctactttttacatttacagccgaaagtccatcagaggatccaacaagatggttcacttgtgttcttaaggatagtgttactgaaacacttccaagagtcaacagaactgcagcaatttctggttatagttttaaacagtgttcgcaccaaatttctgcttgtaataaggacatttatgttgatttagatatgaaaggtattaactataattctagtgtagcaaaaagtgctcaagaatgtcaagaaagatgtacagatgatgtacactgtcatttttttacttatgcaacaagacaatttccttcattagaacacagaaatatttgtttacttaaacatacacaaactggaactccaacaagaattactaaacttgataaagttgtatcaggttttagtttgaaatcgtgtgctttatcaaatttggcttgtattagagatatttttcctaatactgtttttgcagatagtaatatagattcagttatggctccagatgcttttgtttgtggaagaatttgtacacatcatcctggttgtcttttctttactttcttctcacaagaatggcctaaagaatctcagagaaatttatgtcttcttaaaacatcagaaagtggacttccttcaacacgtattaaaaagtcaaaagcactttctggattttctttgcaatcttgtagacactctattcctgtattctgtcattcttcattctatcatgatacagattttttaggagaagaacttgatattgtagcagctaaatcacacgaagcttgtcagaaattatgtactaatgctgtacgatgtcaatttttcacatatactccagcacaagcatcatgtaatgaaggtaaaggaaagtgttatcttaaattatcgtcaaatggatcccctactaaaattttacatggaagaggaggaattagtggatacactttaagattatgtaaaatggataatgaatgtactactaaaattaaaccaagaatcgtcggaggaacagcatcagttagaggagagtggccatggcaagttactttgcacacaacttcaccaacacaaagacatctttgtggaggaagtattataggaaatcaatggatattaaccgccgctcattgtttttatggagtagaatctccaaaaattttaagagtatattcaggtatcttaaatcaatcagaaattaaagaagatacttcattttttggagttcaagaaattattattcatgatcaatataaaatggctgagtctggatatgatattgcattattaaaacttgaaacaacagtcaattatactgatagtcaaagaccaatttgtttaccatcaaaaggtgatagaaatgtgatttatactgattgttgggttaccggatggggatatagaaaacttagggataaaattcaaaatacattacaaaaagctaaaataccattagttacaaatgaagaatgtcaaaaaagataccgtggacataaaataactcataaaatgatatgtgctggatacagagaaggtggaaaggatgcttgtaaaggagattctggaggtccattatcttgtaaacataatgaagtttggcatttggtaggaataacatcttggggtgagggatgtgcacaaagagaaagaccaggagtgtatactaatgtagttgaatacgtagactggatattagaaaaaactcaagctgta

SEQ ID NO: 9400 - DNA, 1875 bp, synthetic construct
  misc_feature 1..1875: note = source = /note="Description of Artificial Sequence: Synthetic coding sequence"
  source 1..1875: mol_type = other DNA
atgatcttcctgtaccaggtcgtgcactttatcctgtttacttccgtttctggcgaatgcgtcactcaactcctcaaagacacctgctttgaaggcggagacatcactacggtcttcacgccctctgcgaaatactgccaggtagtatgtacctatcatccgaggtgtctgctgtttacattcactgctgagtctccctccgaggatcctacacgctggttcacctgtgtgttgaaggatagcgtgactgaaaccctcccaagagtgaaccggacagctgccattagcggctactccttcaagcagtgctcacaccaaattagtgcttgtaacaaggatatctacgtggatttggacatgaaggggatcaattacaattcctctgtagccaaatccgcgcaggaatgtcaggaacggtgtactgacgacgtccactgccatttttttacatacgccactcgacagtttcctagtttggagcaccggaatatctgtctgctgaaacatacacaaacgggtaccccaacaagaatcactaagctcgataaggtggtttcagggttttctctgaagtcttgtgccctcagcaacctggcctgcataagagatatttttcctaatacagtgtttgccgactcaaacatcgactctgtcatggcgccggacgcattcgtgtgcgggcggatttgtacacatcatccaggctgcctcttcttcacattcttttcacaggaatggcctaaggaatcccaaaggaacctgtgcttgctgaagacaagcgaatccggactgccatcaacaaggatcaagaaaagcaaagcactgagcggcttctctcttcaatcctgtcgccatagtattcccgtcttctgtcactcctccttctatcacgatactgactttctgggggaagagctcgacattgtcgcggcaaagagtcacgaggcatgtcagaaactgtgcacgaacgccgtcaggtgccagttcttcacctatacgcctgcacaggcaagctgtaacgagggtaagggtaaatgctacctgaagctgagcagtaacggatctccaaccaaaattctgcacggcagagggggcatttccgggtatacactgaggctgtgcaagatggacaacgaatgcacaacgaagatcaaaccacgcatagtgggcggcacagctagcgtcagaggcgaatggccttggcaggtaacactgcacactacatccccaactcagagacacctctgtggaggcagtattataggcaatcagtggatattgaccgcagcccattgtttttacggcgtggagtcccctaagatactccgggtttacagcggaatcctgaaccaaagtgagataaaggaagacacttctttcttcggggtgcaggagattatcatccatgatcagtacaaaatggccgagtcaggctacgacatagccctgctcaagctcgagactacggtgaactacacagattcacagagacccatatgcctcccaagcaagggagatcgcaacgtcatctataccgattgttgggtgaccggttggggttacaggaagctcagggacaagatccagaatacgctgcagaaggccaaaattccgcttgttaccaacgaagaatgccagaagagataccgagggcacaagatcacccacaaaatgatttgcgcgggttatagggaaggcgggaaagatgcatgtaagggcgactctggcggccctctgagctgcaagcacaatgaggtgtggcatctggtggggatcacatcctggggggagggttgcgcccaacgcgagagaccaggcgtgtacactaacgtggtggaatacgtcgactggattctggaaaagacccaagctgtc

SEQ ID NO: 9401 - DNA, 1875 bp, synthetic construct
  misc_feature 1..1875: note = source = /note="Description of Artificial Sequence: Synthetic coding sequence"
  source 1..1875: mol_type = other DNA
atgattttcctgtatcaagttgtccattttatactgttcaccagcgtcagcggagagtgcgttacccaattgctgaaagacacctgcttcgagggaggcgatattacgaccgtctttactcctagtgccaagtattgtcaggtcgtgtgtacctatcatcctaggtgcttgctctttaccttcaccgccgagtcgccctcagaggatcccactaggtggttcacatgcgttctgaaggactccgtaaccgaaacactgccgcgggtgaaccgcaccgccgctatcagtggctacagcttcaagcaatgctcacaccagattagcgcctgtaataaggatatttacgtggaccttgacatgaagggcatcaactataacagcagcgttgccaaaagcgcacaggagtgtcaggagagatgcaccgatgacgtccactgtcatttttttacatatgcaactcggcagttcccttccctcgaacaccgcaacatctgccttcttaagcatactcagaccgggacccccacccggataactaaattggataaagtcgtcagtggatttagtctgaaatcatgcgcactgagcaaccttgcctgcattagagacatttttcctaataccgtatttgcagatagcaacatcgactcagtgatggctcccgatgccttcgtctgcggacgtatctgcacccatcaccctggatgtttatttttcacatttttcagccaggaatggcctaaagaatcacagaggaacctctgcctcctgaaaaccagcgagagtggcttgccgagcactcggattaaaaaatctaaggccctgagtggattcagtctccaatcttgccgacactcaataccagtgttttgccattcctcattctaccacgacaccgacttcctgggcgaggagttagatattgtggctgccaaaagtcacgaggcttgccaaaagctttgtaccaacgcagtccgctgccaattttttacctatacacccgctcaggcaagctgcaatgagggaaaaggaaagtgttacctgaaactttcaagcaatggtagcccaactaaaatccttcatggacgcgggggcatcagcggttacactctgagactctgcaagatggacaatgagtgtacaacgaaaatcaagccaagaatcgttggcggcactgcttcagtacggggggaatggccttggcaggtgactcttcacaccacctcacctacccagcgacatctatgcggaggcagcatcatcggaaaccagtggatccttacagcagcacattgtttctacggggtagagagccccaaaatcctccgcgtgtatagcggcattctgaatcaatcagagataaaagaggacacgtctttttttggcgtccaggagattatcatccacgatcaatacaagatggctgagtctggatatgatatcgcgttgctgaaactggaaacaaccgttaattataccgacagccagagaccaatttgcctcccaagcaagggtgacagaaatgtaatttacaccgattgctgggtgactggctgggggtaccggaaactgcgagataagatccagaacacccttcagaaggcgaagatcccgctggtgaccaacgaggaatgccagaaaaggtatcggggccataaaatcactcacaagatgatctgcgccggctacagggaaggaggcaaggacgcatgtaaaggcgattccggaggcccattgagctgtaagcataacgaagtgtggcatcttgttggcatcaccagctggggcgagggatgcgctcaacgcgagcgccccggggtgtatactaatgtggtggagtacgtggattggatcctagaaaagacgcaggccgtt

SEQ ID NO: 9402 - DNA, 1875 bp, synthetic construct
  misc_feature 1..1875: note = source = /note="Description of Artificial Sequence: Synthetic coding sequence"
  source 1..1875: mol_type = other DNA
atgattttcctttaccaagtggtgcactttatcttgtttacctcagtgtcgggggagtgtgttactcagctccttaaggacacctgcttcgagggcggagatatcaccaccgtgttcactccgtcagcaaagtactgccaagtcgtgtgcacgtatcatccacgctgtctgctcttcactttcaccgccgaatcaccatcagaggacccgactcggtggtttacttgtgttctcaaagattcagtcaccgagacgctccctcgggtgaacagaaccgcggctatctccggttactcatttaagcagtgctcgcatcaaatctcggcatgcaataaggacatctacgtggacctcgatatgaagggaatcaactacaactcatccgtcgcaaaatcagcccaggagtgtcaggaacgctgcactgacgacgttcactgccacttcttcacgtacgcaacgaggcagtttccgtcgctggaacatagaaatatctgcctgctgaaacacacccagactggaactccaacccggattaccaagctcgacaaggtcgtgtcgggtttcagcctgaagtcatgtgccctctcgaacctggcttgtatccgggacatttttccaaataccgtctttgctgacagcaacatcgattcggtgatggcaccggatgctttcgtgtgcggacggatttgtacgcatcatcccggttgcctcttcttcacgttctttagccaagagtggccgaaggaaagccagcgaaacctgtgcctgctcaagacctccgagtccggactgcccagcactaggattaagaagtccaaagcgctgtcaggattctcgctccagtcatgccggcactcgatcccggtgttctgtcattcctccttctaccacgataccgatttccttggagaagaacttgacatcgtggcagcgaaatcacacgaggcctgccagaaactctgcaccaatgcggtgagatgccagttcttcacttacacccctgcacaggcctcgtgcaacgaaggaaaaggaaagtgctacctcaagctgtccagcaatggaagccctactaagatcctgcatggtcgaggaggaatcagcggatatacgctgcgtctgtgtaaaatggacaacgagtgcactaccaagatcaaaccgcgcatcgtcggcggaaccgccagcgtccggggagaatggccgtggcaggtgactctgcacaccacgtcaccgactcagcgccatctttgcggaggcagcatcatcggaaaccagtggatcttgactgctgcgcactgcttctacggggtggaatccccgaagatactcagggtgtattcaggcatcctgaaccagtcggagatcaaggaggatacttccttctttggagtgcaagagatcattattcacgaccagtataagatggcggaatcgggttacgacatcgcactccttaagttggagactaccgtgaactacactgattcgcagcgcccgatttgcctgccaagcaagggagacaggaatgtgatctacactgattgctgggttaccggatggggctacaggaagctgcgggataagatccagaacactctgcaaaaagccaagataccgctggtgactaacgaagagtgccaaaagcggtacaggggacataagatcactcacaagatgatctgtgcgggctacagggaaggggggaaggacgcctgcaagggagattccggtggaccattgtcatgcaagcataacgaggtgtggcaccttgtgggcatcacgtcctggggagagggatgcgcccaacgcgagcgccccggcgtgtacacgaacgtcgtggagtacgtggattggatactggagaaaacccaggccgtg

SEQ ID NO: 9403 - DNA, 1875 bp, synthetic construct
  misc_feature 1..1875: note = source = /note="Description of Artificial Sequence: Synthetic coding sequence"
  source 1..1875: mol_type = other DNA
atgatttttctgtaccaagtggtccatttcatcctgtttaccagcgtgtcgggagaatgcgtgactcaacttttgaaggatacgtgctttgaaggcggcgatatcacgacggtttttacgcctagcgcaaagtactgtcaggtggtgtgtacctaccatcctcgatgtctgctctttacgttcactgccgaatcccccagcgaggacccaactaggtggttcacctgcgtccttaaggatagcgtgaccgaaacccttccaagggtgaaccggaccgcagcaatttccggatacagctttaaacaatgttcgcatcagatatccgcttgtaataaggacatctacgtggatcttgacatgaagggaatcaattacaattcgagcgtggcaaagtctgcccaagagtgccaagagcggtgtacggatgacgtccattgccactttttcacctacgcaactagacagttcccaagcctggaacaccgcaacatttgtctgctgaaacatactcagaccggaacgccaacccggataaccaaattggataaggtcgtgtcaggattttcactgaagtcctgcgccctgtctaatcttgcatgtattagggacatattccctaacactgtgtttgcagacagcaatattgactccgtcatggcgccagacgcatttgtttgtggaaggatatgtactcatcaccctggctgtcttttcttcaccttcttttcccaagaatggcctaaggaatcgcaacggaacctttgcttgcttaaaacttcagagtccggactgccatccactagaattaagaagtcgaaggccctgagcggcttctcactgcagtcatgtagacactcgatccctgtcttttgccactcctcattctaccatgataccgatttccttggtgaggagctcgacatcgtggcagcaaagtcgcacgaagcatgtcagaaactctgcactaatgcggtcagatgccagttcttcacttacacccccgcacaagcctcttgtaacgaaggaaaggggaagtgttacctcaagctgtcctctaacggtagccccaccaagatcctgcatgggagaggtggaatcagcggctacactctgcgactctgcaagatggataacgagtgtaccaccaaaatcaagccaagaattgtgggaggaaccgcttccgtgcgaggtgaatggccttggcaagtgacccttcatactacttcaccaacccagagacacctctgtggcggtagcatcattggaaaccaatggattctgactgcagcgcattgtttttacggtgtggagagcccaaagattctgagggtgtactcgggtatcctcaaccagtccgaaatcaaagaagatacctccttttttggagtgcaggaaatcataatccatgaccagtacaagatggcagagtcgggatatgacatcgcgttgctcaaactcgaaactaccgtgaactacaccgattcccaaagacctatttgtctgccatcaaagggggataggaacgtcatatacaccgattgctgggtcactggatggggttaccggaaattgagggataagattcaaaacactctgcagaaggcgaaaattcctcttgtgaccaacgaagagtgtcagaagagatacagaggtcacaagataactcacaagatgatctgtgccggatatcgcgaaggcggcaaggatgcgtgtaaaggcgactccggcgggccgttgtcatgtaaacataatgaggtctggcacttggtgggaattaccagctggggcgaaggatgcgcacaacgcgagcggccgggtgtgtataccaacgtggtcgagtacgtggactggattcttgaaaagacccaagcggtc

SEQ ID NO: 9404 - DNA, 1875 bp, synthetic construct
  misc_feature 1..1875: note = source = /note="Description of Artificial Sequence: Synthetic coding sequence"
  source 1..1875: mol_type = other DNA
atgatcttcttgtatcaagtagtgcacttcatcctgttcacatcggtttcaggtgagtgtgtgacacagcttttgaaggatacctgcttcgaaggcggagacatcaccacagtgttcaccccatccgctaaatattgccaggttgtttgtacgtatcatccccgttgtctgctgttcactttcacagctgagagcccttctgaagaccctacccgctggtttacgtgcgtactgaaggacagcgtgaccgagaccctaccacgggtgaaccggacggcagccataagtggctattctttcaagcagtgtagccaccagatctcggcctgtaataaagacatatacgtggatctcgacatgaagggcatcaactacaactcaagcgtggccaaaagcgcacaggagtgccaagagcggtgtacagatgatgtccactgccatttctttacatatgccacaaggcagtttcctagtcttgaacaccgaaacatctgtttgttgaagcacactcagaccggcactcctactcgcattacgaaactagacaaagtggtatcaggtttttcactgaagagctgtgccctgtccaatctggcctgcatccgcgacatcttcccaaatactgtgtttgctgatagcaatattgatagcgtgatggccccggacgcgtttgtgtgtggcagaatatgcacacaccacccaggctgcctgttttttacctttttcagccaggagtggcctaaggagagccagaggaatctgtgcttattaaagactagtgaatctgggctgccttctacgagaattaagaaatctaaggccctgtccggcttctctctacaatcttgcaggcactcaattccagtgttttgtcattcatccttttaccacgatacggattttctgggggaggagttggacattgtcgctgctaagagccacgaggcctgccagaagctgtgcaccaatgcggtgagatgccagttctttacctatacgcctgcacaggcctcatgcaacgaaggaaaaggtaaatgttacctcaagctctcctctaatgggagccctaccaagattttgcatggacgcggcggaatcagtggctacactctccggctgtgcaaaatggacaatgaatgtaccaccaagatcaagcctaggattgttggaggaactgcttccgtccgcggggaatggccatggcaggtgaccctgcacactacctccccaactcagagacacttgtgtgggggctcgatcataggtaaccagtggattctgaccgcggcacactgcttttatggcgtggaatctcccaagatcttgcgcgtctactcaggtattctgaatcagagcgaaatcaaggaggacacttccttctttggggtccaggagataatcatacatgatcaatacaaaatggccgaaagtggttacgacatcgccctcctgaagctggagacaacggtcaattacaccgactctcagaggccgatctgtctgccttccaaaggagatagaaatgtaatctacacagattgttgggtcacaggctgggggtatcgcaagcttagagacaagatccagaacaccctgcagaaagctaagattcctttagtcaccaacgaggagtgccaaaaaagatataggggacataaaatcacacacaaaatgatttgtgctggttaccgggagggcggcaaagacgcatgtaaaggcgattccggcggtccattaagttgtaaacataacgaagtatggcatcttgtcggaatcacgagttggggcgagggatgtgctcaacgagaacgccccggggtttatacaaacgtagtcgaatatgtagattggatcttggagaaaactcaggccgtt

SEQ ID NO: 9405 - DNA, 1875 bp, synthetic construct
  misc_feature 1..1875: note = source = /note="Description of Artificial Sequence: Synthetic coding sequence"
  source 1..1875: mol_type = other DNA
atgatcttcctttaccaggtggtgcacttcatcctcttcaccagcgtgtcgggtgaatgtgtgactcaacttctgaaggacacctgcttcgagggaggagacatcaccactgttttcacgccgtcggccaagtactgccaggtggtttgtacttaccacccacgctgcctcctcttcactttcacggcagaaagcccctccgaggatccaaccagatggttcacctgcgtgctcaaagattcggtgaccgagactttgccgagggtcaatcggaccgccgcgatcagcggatactcctttaagcagtgctcgcaccagatttccgcgtgcaataaggatatctacgtcgacctcgacatgaagggcatcaactacaacagtagcgtggctaagagcgctcaggaatgccaggagcgctgtacggatgacgtgcattgtcatttcttcacttatgctactcgacaattcccgtcgctggaacaccggaacatctgcctgctgaagcatactcaaaccgggacccctacccggatcacgaaactggacaaggttgtgagtggattttcactcaaatcctgcgccctgtcgaatctggcatgcattcgagatatcttccctaacactgtgttcgcggactccaacatcgattccgtgatggcccctgacgcgttcgtgtgcggcagaatctgcactcaccacccaggatgtctgttctttaccttcttttcccaagaatggcccaaggaatcacagaggaacctgtgcctgctgaaaacgagcgagtccggtttgccgtcaactagaataaagaagagcaaggccctgtccggcttcagtctgcagtcgtgccggcactcaatcccggtcttttgccattcgtccttctaccatgatactgactttctcggagaggaactggacatcgtcgctgcaaaatcgcatgaagcctgtcaaaagctgtgcaccaatgccgtgaggtgccaattctttacctacacgccagcacaggcctcctgcaacgaaggaaaaggtaaatgttacctcaaactctcgagcaacgggagtcctaccaaaattctgcatggaagaggggggatttccggatacaccctgaggctctgcaagatggacaacgaatgcaccaccaagatcaagcctcggatcgtgggtggaaccgcttccgtgcgcggagagtggccgtggcaagtaaccctgcacactacttcgccaactcaacggcatctgtgcggaggaagcatcatcgggaaccagtggatcctcactgcggcacactgcttctacggtgtcgagtcaccgaagattctcagggtttactcaggcatcttgaatcagtcagagattaaagaagatacctctttctttggagtgcaggagatcatcatccatgaccaatacaagatggccgaatcaggctatgatattgcgttgctgaaactcgaaactaccgtgaactacactgactcgcagcgcccgatttgtctgccctctaagggggatcgcaacgtcatctacacggattgctgggtgaccgggtggggataccgaaaacttcgggataagatccagaacaccctgcaaaaggccaaaataccgcttgtgaccaatgaggagtgccagaagaggtaccgcggccacaaaatcactcacaagatgatctgcgccgggtaccgtgaggggggcaaggacgcatgtaagggcgactccggcggcccattgtcctgcaagcacaatgaagtttggcaccttgtgggaatcacttcatggggagaaggctgtgcccagcgcgaacgccctggcgtctatactaacgtagtggagtacgtcgactggatcctggaaaagacgcaggctgtc

SEQ ID NO: 9406 - DNA, 1875 bp, synthetic construct
  misc_feature 1..1875: note = source = /note="Description of Artificial Sequence: Synthetic coding sequence"
  source 1..1875: mol_type = other DNA
atgatctttctttaccaagtcgtgcactttattctctttacttcagtctcgggtgaatgcgtgacccaactgctgaaggacacttgtttcgagggcggagatattaccactgtgtttactccatcagcgaagtactgccaagtcgtgtgcacctaccatccaagatgccttcttttcacttttaccgcggaatcgcctagcgaagatccaacccggtggtttacttgtgtgttgaaggattcagtgactgaaactctgcctcgagtgaacaggacggcagcaatttcgggctactctttcaaacaatgttcccatcagatctcggcatgtaataaggatatctacgtggatctggatatgaagggtataaactacaatagcagtgtcgccaaatcagctcaggagtgtcaggaaagatgtacggatgacgtgcattgccacttctttacctacgcaactcggcagtttcctagcttggagcacagaaacatctgccttctgaagcatacgcaaaccggtacccctacgcgcattaccaagctcgataaagttgtgtcgggattttcgctgaagtcgtgcgcactgtcaaacctggcgtgcattcgtgacatttttcctaatactgtctttgcagattcgaatatagattcggtgatggctccagatgcattcgtctgtgggcgcatctgtactcaccatcctggatgcttgtttttcactttcttctcccaagagtggcctaaagaaagccagcgcaacctctgtttgctcaaaaccagcgagtcggggctcccctcgaccagaatcaagaagagcaaggcgctcagcgggtttagccttcaatcgtgtcggcattccatccctgtcttttgtcactcgtctttttaccatgacaccgatttcctgggagaagaactggatattgtcgctgccaaatcacacgaggcctgtcagaaattgtgtaccaacgcggtgagatgtcaattcttcacttacacccctgcacaggcctcttgcaacgagggcaagggaaagtgttacctgaagctgtccagcaacggatcgccaaccaagattctgcacggacgaggaggtattagcggctacaccctgcgactttgcaagatggacaacgaatgtactaccaagatcaagccgcggatcgtgggaggtaccgcatccgtgcgtggtgaatggccatggcaggtgactctgcatactacctcaccaactcagagacacctgtgcggtggctccatcatcggtaaccaatggatcctgactgcagcacactgcttttacggagtcgagtcgcctaagatcttgagagtgtactccggtattcttaatcaatccgaaatcaaagaggacactagctttttcggcgtccaagagatcattattcacgatcaatacaagatggctgaatccggttacgatattgcactgctgaagctggaaactaccgtgaactacactgattcgcaaaggccaatctgtctgccgtcgaagggtgatagaaatgtgatttacaccgactgctgggtgaccggatggggttaccgaaagctccgcgataagattcagaacactctgcaaaaggcaaagattccccttgtgacgaacgaagaatgtcagaagcgataccgtggacacaagattacccataagatgatctgtgcaggataccgggaaggtggaaaggacgcttgcaagggcgacagcggtggtcccctctcgtgtaagcataatgaggtgtggcacctggtgggaatcacttcatggggggagggatgtgcacagcgtgaacggccaggagtgtacactaatgtcgtggaatacgtggattggatccttgagaaaacccaggcagtc

SEQ ID NO: 9407 - DNA, 1875 bp, synthetic construct
  misc_feature 1..1875: note = source = /note="Description of Artificial Sequence: Synthetic coding sequence"
  source 1..1875: mol_type = other DNA
atgatctttctataccaagtcgtgcactttatcctcttcacttccgtttctggagaatgtgtcacgcagctcttaaaagacacatgctttgagggaggagacatcaccaccgtgttcactcccagcgcgaaatactgccaggtcgtatgcacataccacccaagatgtctcctgttcactttcaccgccgagtccccttctgaggatcccacccgctggtttacctgcgttctcaaggatagtgtcactgaaaccctgccgagggtgaacaggacagctgccatcagcgggtatagttttaagcaatgtagtcaccaaatctctgcatgcaataaggatatctacgtcgatctggacatgaaaggtattaactataattcgagtgtcgctaagagcgcacaggagtgccaggagagatgcactgacgacgttcattgccatttctttacctacgcaactagacagttcccgtctctcgagcaccgcaatatatgcctgctgaaacatacgcagacaggtacgcctacccgtatcaccaaactagacaaggttgtctccggcttctcactgaaatcatgcgccctgtcgaacctggcctgtatacgtgatattttccccaacacagtgtttgcagactctaacattgactccgttatggcacctgatgcattcgtgtgtggcaggatctgcacccaccacccgggctgcctattctttacctttttttcccaggagtggcctaaggagagccagcgaaacctgtgcttactgaaaacgagcgagtcagggttgccctccacccggatcaagaagtccaaagccctttccggattctctttacagagctgcagacacagcatccccgtcttttgccattcttctttttatcatgataccgacttccttggcgaggagctcgacatcgtggcagctaagtcacatgaggcctgccagaaactgtgtactaatgcagttaggtgtcagtttttcacctacacgcccgcccaggcatcttgtaacgaaggcaaaggaaagtgttatctgaagctctccagcaatgggagtcccactaagattttgcatgggaggggtgggattagtggttacacattgcggctgtgtaagatggataatgaatgcaccacaaagattaagccccgcatcgtaggggggaccgcaagcgtacgaggagaatggccatggcaggtgaccctccacaccaccagtcccacccagaggcatctatgtggcggaagcataattggtaatcagtggatcctgacggccgcccactgcttctacggggttgagtctccaaagattctccgcgtgtacagcggcatcctcaatcagtctgagattaaggaagataccagtttctttggagtgcaggagatcataatccacgatcagtacaagatggccgagagcggatatgacattgcattgttaaagctggagactactgtcaattatacagacagtcaacgacccatttgcctgccaagtaaaggcgatagaaatgtgatatacactgactgttgggtgactgggtggggatacaggaaactgcgggacaaaatccagaacaccctgcagaaggcaaaaattcccctagtgaccaatgaagagtgtcagaaaaggtatcgagggcacaagatcacccacaaaatgatttgcgctggctatagagaaggcgggaaagacgcatgcaagggtgacagtggaggacccctaagctgtaagcacaatgaggtctggcatcttgtgggaatcacatcctggggcgagggctgtgcacagcgggagaggcccggagtatacacgaatgtggtagagtacgttgattggatcttggagaagactcaggcggtg

SEQ ID NO: 9408 - DNA, 1875 bp, synthetic construct
  misc_feature 1..1875: note = source = /note="Description of Artificial Sequence: Synthetic coding sequence"
  source 1..1875: mol_type = other DNA
atgatctttttgtaccaagtcgtccacttcatcctttttacatctgtatccggagagtgcgtgactcagcttctgaaagatacctgttttgaaggcggggacatcaccaccgtgttcacgccatcagcaaaatattgtcaagtggtctgtacgtaccacccaaggtgcttgctttttaccttcacagctgagtctcccagcgaggatcctacccgctggtttacctgtgttctaaaggatagtgttactgaaacgttaccccgggtcaatcggacagcagccatttcgggatatagcttcaaacagtgctctcatcaaatttcagcgtgcaacaaggacatctacgtagatctcgacatgaaaggcattaattataactcctcagtcgcaaagtctgcccaagaatgccaggagcggtgcactgacgacgtgcactgccatttttttacctacgcaactagacagttcccgtctctggaacaccgaaatatttgtctgttgaagcatacccaaaccggcactcccactcgcatcaccaaacttgataaagtcgtgtctgggttcagccttaagtcatgtgccctaagcaaccttgcttgtatccgggacatcttccctaacaccgtctttgcggacagtaacattgacagtgtgatggcccctgacgctttcgtgtgcggtcgcatatgtactcaccaccccggatgtctgttcttcactttcttctctcaggaatggcctaaagagtctcagagaaacctttgcctgctaaagactagcgaatctggcctgccctccacacggatcaagaagtcaaaggccctcagtggctttagcctccagtcatgtcgccacagcattccagtgttttgtcactccagcttttaccatgataccgactttttgggggaagaattagacattgtggcggcaaagagccatgaagcctgccagaagctttgtacgaacgccgtgaggtgccaatttttcacgtatactcctgcgcaggcgtcttgcaatgaaggaaaaggcaaatgctatctcaaactgtctagtaacggatcacctactaaaattcttcacggtcggggcggaataagtggctacaccttgcgtttgtgtaagatggataatgagtgcacgaccaaaatcaagcctcgaatcgtgggcgggacggccagcgtgaggggcgagtggccctggcaagtgactctgcacacaacgtcgcccacccaacgccacctctgtggtggatccattatagggaaccagtggattttaacggctgcgcattgcttttatggggtcgagtctcctaagatactgcgggtgtactcaggcattttgaatcagtcggagattaaagaggacacgtcattcttcggcgtccaggaaatcatcattcatgaccagtacaagatggcagagtccggttacgatatcgcactcctgaagctggaaaccaccgttaattacactgacagccagaggccaatttgcctgcctagtaagggggatcggaatgtgatctacactgattgctgggttaccggatggggttacaggaaactccgggataaaatccaaaataccctgcaaaaagccaagatccccttggtgacaaacgaagagtgccaaaagcggtatcgcggacataagatcactcacaaaatgatctgcgcagggtaccgggagggtggaaaagacgcttgtaaaggggacagcggcggtcctctgagctgcaagcataacgaagtgtggcatctggttgggattacaagttggggcgaaggctgtgcccaacgagagcgtccaggagtgtacactaatgtagtcgagtacgttgattggattttggagaagacccaggctgtg

SEQ ID NO: 9409 - DNA, 1875 bp, synthetic construct
  misc_feature 1..1875: note = source = /note="Description of Artificial Sequence: Synthetic coding sequence"
  source 1..1875: mol_type = other DNA
atgatcttcctgtaccaggtggtccactttatcctttttacttcggtgtccggggaatgcgtcacccaactgctcaaagacacctgttttgagggaggagatattaccactgtctttaccccgagcgcaaaatactgccaagtggtgtgtacttaccaccctcgctgccttctttttacctttaccgccgaaagcccttccgaggatccaaccagatggtttacgtgtgtgcttaaggactcggtgacggagactctgcctcgagtgaacagaacggccgccatctcgggatacagctttaagcaatgttcgcatcaaatcagcgcatgcaacaaagatatctatgtggacctcgatatgaagggcatcaactataactcctctgtggccaagtcagcgcaggagtgtcaggaacggtgcactgacgatgtgcactgtcatttcttcacttacgcgactagacaatttccctcgcttgagcatcgcaacatttgtttgctgaagcacacccagaccggaactcccacgcgtattactaaacttgacaaggtcgtgtccggctttagcctcaaatcgtgtgctctgtccaatcttgcatgtattagagacattttccctaataccgtgttcgcagactccaacatagatagcgtcatggccccggatgcctttgtctgtggacgcatttgtacgcatcatcccggttgtctgtttttcacctttttctcgcaggagtggcccaaggagtcgcaaagaaatctttgtctgcttaagacgtcggaatcgggtctgccttcgactcgcattaagaagtcaaaggccctctcgggattttcgcttcagagctgcaggcattcgatccctgtgttttgtcattcatccttctaccacgacactgacttccttggcgaagaactggatattgtggccgcaaaatcacatgaagcgtgtcagaagctgtgtaccaacgccgtcagatgtcaattctttacctacactcctgcacaagcatcctgtaacgaaggaaagggaaagtgttaccttaagctctcttcaaacgggtcaccaacgaagatacttcacggacgcggagggatatccgggtacactttgagactgtgtaagatggataacgaatgcaccaccaagatcaagcccagaattgtgggaggtactgcatcagtaagaggcgagtggccatggcaggtgaccctgcacaccactagccctactcagcgacacctgtgcggtggatcaataatcgggaaccaatggatcctcaccgctgcccactgtttctatggggttgagtcacctaagatactgagagtctacagcggcatcctcaaccagtctgaaatcaaggaagatacttccttcttcggggtgcaggaaatcatcattcatgaccaatacaagatggctgaatccggatatgacatcgcactgctcaaactggaaacgaccgtgaactataccgattcgcaacggccaatatgccttcccagcaagggggatagaaacgtcatctacactgattgttgggtgaccggctgggggtacaggaaacttcgggataagatacagaatactctgcagaaggccaaaattcccctggtgaccaatgaagagtgccaaaaacgataccggggacataagatcacgcataagatgatttgcgcaggttacagagagggtggcaaagatgcttgtaagggagacagtggcgggccactgtcgtgtaaacataacgaggtctggcatctcgtcggtattacttcctggggcgagggttgtgcacagcgtgaacgtccaggcgtgtacacgaacgttgtggaatacgtagattggatcctcgaaaagacccaggccgtg

SEQ ID NO: 9410 - DNA, 1875 bp, synthetic construct
  misc_feature 1..1875: note = source = /note="Description of Artificial Sequence: Synthetic coding sequence"
  source 1..1875: mol_type = other DNA
atgatttttctgtaccaggtggtgcactttattctttttacttccgtgagcggagaatgtgtgacccagcttctgaaagatacctgtttcgagggtggagatatcaccactgtgttcacgccgtcggcaaagtactgtcaagtggtgtgtacgtaccatccgcggtgccttctgtttacctttaccgccgaaagccctagcgaggatccaaccaggtggttcacctgcgtgctcaaggattccgtgaccgaaaccctgccacgcgtgaaccgcactgcagcaatctcgggttattcctttaagcagtgcagccatcaaatttcagcatgtaacaaagacatttacgtcgacttggatatgaaggggatcaactacaatagctccgttgccaagagcgcacaggagtgtcaggaaagatgtacggatgatgtgcattgtcacttcttcacctatgccactcgccagtttccttcccttgaacataggaacatttgcctgctgaagcatacccagaccggtaccccaactcggatcaccaagctcgacaaggtcgtctcaggatttagcctcaagagctgcgcactctcgaacctcgcctgcattagagacatattcccgaacaccgtctttgcagattcaaacatcgactcagtcatggcacctgacgcattcgtgtgtggacgcatttgtacccatcaccctggatgcctgtttttcacctttttcagccaagaatggccaaaggaatctcaacggaatctgtgccttcttaaaacctcggaatccggcctcccgtcgacccggattaagaagtcgaaggcgctgtcgggtttctcccttcagtcctgtcggcactctattcccgtgttttgccactcatcattttaccatgacaccgattttctgggagaagaactcgacattgtggctgccaaatcacacgaagcatgtcagaaactctgtaccaatgccgtgcgctgccagttctttacgtacaccccagcacaggcatcatgtaacgaaggaaagggcaaatgttaccttaagctgtccagcaatggctcccctaccaagattcttcatggaagagggggcatttccggttacacgttgagactttgtaagatggataatgagtgcactaccaagattaaacccagaatagtgggtggtacggcatcggtgagaggggaatggccatggcaagtcacccttcacactaccagcccgacgcagcgacatctttgcggtggctcgattattgggaaccagtggattctcacggcggcacactgcttttacggggtcgaatccccaaagattcttcgcgtgtactcgggtattttgaaccaatcggagatcaaggaagatacttccttttttggggtgcaagagattatcatccacgaccagtacaagatggcggaaagcgggtacgatattgctcttcttaagctggaaacgaccgtcaactacaccgattcacaaagaccaatatgccttccatcgaagggagacaggaacgtgatttacactgactgttgggtgactggatggggatacagaaagctcagagacaagattcagaatactctgcagaaggcgaaaatacccctcgtgactaacgaagaatgccaaaaaagatacagaggtcacaagatcacccacaaaatgatttgcgccggctaccgagaagggggcaaggacgcatgcaaaggggactccggaggacctctttcatgcaagcataatgaagtgtggcaccttgttggaatcacttcgtggggagaaggctgcgcgcaacgagaaagacccggagtctacaccaacgtggtggagtatgtggattggatccttgaaaagacgcaagccgtc

SEQ ID NO: 9411 - DNA, 1875 bp, synthetic construct
  misc_feature 1..1875: note = source = /note="Description of Artificial Sequence: Synthetic coding sequence"
  source 1..1875: mol_type = other DNA
atgatcttcctgtatcaagtagtgcatttcatcctgttcacttctgttagcggagagtgcgtcacccagctcctcaaggacacgtgcttcgaaggtggcgacatcaccaccgtgttcaccccttcggccaagtactgtcaggtggtgtgcacttaccatccgcggtgtctgctgtttaccttcaccgcagagtccccttcggaggacccgacccgctggttcacttgcgtgttgaaggattccgtgaccgaaaccctgccgcgcgtcaatcggacggcagccatatccgggtacagcttcaagcaatgctcccatcagatctcggcctgcaacaaagacatctacgtggacctcgacatgaagggaatcaactacaattcgtcggtcgcgaagtccgcccaggaatgccaagagcgctgcactgacgatgtgcattgtcacttttttacctacgcgactagacagttcccatcactcgaacataggaatatctgcctcctgaagcacacccagaccggaactcctactcgaatcaccaagctggataaagtggtgtccgggttctcgctcaaatcgtgcgccttgtccaaccttgcgtgcatcagggacatcttccctaacactgtgtttgccgattcaaacatcgacagcgtcatggctccagacgctttcgtgtgcggcagaatctgcacccaccatccgggttgcctcttcttcactttcttctcgcaagagtggccaaaggaaagccaacgcaacctgtgcctgctcaagacctccgagagcggcctgccgagtactagaatcaaaaaatcgaaggcactgtcaggcttttcactccaatcatgtaggcactccatccccgtgttttgtcactcatccttctaccatgacaccgacttcctcggagaagagcttgacattgtcgcagctaagagccacgaagcctgccaaaagctgtgtactaacgcggtcagatgccagtttttcacttacaccccagcacaagcctcctgcaacgagggaaaaggcaagtgctaccttaagttgagctcgaatggaagcccgactaaaatcttgcatggacgcggcggtatctcgggttatacgctgcgcctctgcaagatggataacgaatgcaccactaagattaaaccccgcatcgtcggcgggaccgcgtcagtccgtggggagtggccttggcaggtgactctgcatactacttccccgacccagcgccacctctgtggcggatcgattatcggaaaccagtggatcctgactgccgcccactgcttctacggagtggagagcccgaagatcctgcgggtgtactctggaatccttaatcagtcggagatcaaggaagataccagcttctttggtgttcaggagattatcatccacgaccagtacaagatggctgagagcgggtacgatatcgcgttgctgaaactggaaaccaccgtcaattacactgattcacaaagaccgatttgtctcccatccaagggcgatcgaaacgtgatttacaccgactgttgggtcacgggatggggataccggaagctgcgggacaaaatccagaacactctgcagaaggctaagatcccgctggtcactaatgaagagtgccaaaaaagatatcggggccacaagattacgcacaaaatgatctgcgccggataccgggaaggagggaaggatgcgtgcaaaggggattccggaggccccctgtcatgcaagcacaatgaagtgtggcaccttgtgggaattacctcgtggggagaaggatgtgcacagcgggaacgcccaggagtttacactaacgtggtggaatacgtggactggatcctggaaaagacgcaggccgtg

SEQ ID NO: 9412 - DNA, 1875 bp, synthetic construct
  misc_feature 1..1875: note = source = /note="Description of Artificial Sequence: Synthetic coding sequence"
  source 1..1875: mol_type = other DNA
atgatttttctgtaccaagtggtgcatttcatcttgttcacgtcggtttccggagagtgcgtcactcagctcctgaaagacacgtgcttcgaaggcggagatatcactacggtgttcaccccttcagcgaagtactgccaggtcgtttgtacttaccatccacgctgcctgcttttcacctttactgccgaaagcccgtcggaagatcctactcggtggtttacttgcgtcctcaaagactctgtgactgagactctgccgcgcgtgaatagaaccgcagcaatttccggctactcgtttaagcaatgttcgcatcaaatctccgcttgcaacaaagatatctacgtggatctggatatgaagggcatcaactacaattcgtcagtcgcaaagtcagcgcaggagtgccaggagcggtgcactgacgacgttcactgccatttcttcacttacgcgacccggcagtttcccagtctggagcaccgcaacatttgcctgctcaaacacacccaaactggtaccccgaccaggatcaccaagctcgacaaggtcgtgtcgggtttttctctgaagtcctgtgcactcagcaacctggcatgcattcgcgacatcttcccgaacaccgtattcgccgactccaacatcgactcggtgatggcgccagacgcatttgtgtgcggacggatctgcactcatcacccggggtgtctgttctttactttcttctcgcaggaatggccgaaggaaagccagcggaacctgtgtctgttgaaaaccagcgaatccgggttgccgtcgacgcgcatcaaaaagtccaaggcactgtcgggattctccctgcaaagctgcaggcattccatcccggtgttctgccactcctccttctatcatgataccgattttctgggcgaagagttggatatcgtcgccgcgaagtcgcacgaagcgtgccagaagctgtgcaccaatgcggtgagatgtcaattcttcacttatactcctgcacaagcgtcatgcaatgaaggaaagggcaaatgctatctgaagctctcctccaatgggagtccaaccaagatcctgcatggccggggtggcatttccggatataccttgagactgtgcaaaatggacaatgaatgcaccactaagataaagccgaggatcgtgggaggaaccgcgtcggtgcggggagagtggccatggcaggtgactctgcatactacgtcgccgacccagaggcacttgtgtggagggtccattattgggaatcagtggatcctcacggcagctcattgcttctacggcgtggaatcaccgaagatcctgagagtgtacagcggaatcctgaaccaatcggagatcaaagaagatacgagctttttcggtgtccaagagattatcatccacgaccagtacaagatggctgaatccggatacgacatcgcgcttctcaagctggagactactgtgaactatactgactcgcaaagaccgatctgcctgcccagcaaaggggacagaaatgtgatctacaccgactgctgggtgactggctggggatacagaaagctgcgggataagatccagaacacgctccaaaaggccaagatccctttggtgactaatgaagaatgtcagaaacgataccggggacacaaaatcactcacaagatgatctgcgccggataccgggagggagggaaggacgcgtgcaagggcgattcggggggacctctgtcctgcaagcacaacgaggtgtggcacctcgtgggcatcacttcatggggagagggatgcgcccagagggaacgccccggggtttacacgaatgtggtggaatacgtggactggatcctcgagaaaactcaggccgtc

SEQ ID NO: 9413 - DNA, 1875 bp, synthetic construct
  misc_feature 1..1875: note = source = /note="Description of Artificial Sequence: Synthetic coding sequence"
  source 1..1875: mol_type = other DNA
atgattttcctgtatcaagttgtccacttcatcctcttcacgtcagtgtcaggcgaatgcgtgacccagctgctcaaagacacgtgctttgaaggaggggacatcaccactgtattcacgccttccgcgaagtactgccaggtcgtgtgcacctaccaccctcggtgcctgcttttcaccttcactgccgagagcccctccgaggatccgacgcgctggtttacttgcgtgctgaaagactcggtgacggaaaccctgcctagagtgaaccgcaccgcggctatctcgggttattccttcaagcagtgctcgcatcagatcagcgcctgcaacaaggatatctacgtcgatctggacatgaaaggaatcaactacaactcatccgtcgcaaagtcggcccaggaatgccaggaacggtgtaccgacgatgtgcattgtcatttcttcacctacgcgaccagacagttcccatctctcgaacaccggaacatctgcctgctcaaacacactcaaaccggtactccaacgagaatcacgaaactggacaaggtcgtctcaggctttagcctcaagtcatgtgccctgagcaatctggcttgcattcgggatatcttcccaaatacggtgttcgctgattcgaatatcgattccgtgatggcaccggacgcatttgtttgcggaagaatctgtactcatcacccggggtgcctgtttttcactttcttcagccaggaatggccaaaggaatcccaaagaaatctctgcttgcttaaaacttccgaatcgggcctgcccagcaccagaatcaaaaagtcgaaggcattgtcgggcttttcactgcagtcgtgtagacattcaatccccgtgttttgccattcatcgttctaccacgacacggacttcttgggagaggaactggacatcgtcgctgccaagtcgcacgaggcttgtcagaagctgtgcaccaatgctgtccggtgtcagtttttcacctacaccccggctcaagcaagctgcaatgagggcaagggaaaatgttacttgaagctgtcctcaaacggatctccgactaagatcttgcatggaaggggaggaatctccggttacaccctgcggctctgtaaaatggataacgagtgcaccaccaagatcaagccgcggatcgtgggaggcactgcgagcgtgcggggagaatggccttggcaggtgaccctgcataccacgtctccgactcagagacacctttgcggcggctcgatcatcggtaatcaatggattttgactgccgcgcattgcttttacggagtggagtcccctaagattctgagagtgtacagcggtatcctcaaccagtcggaaatcaaggaggacacgtcatttttcggggtccaggagatcatcattcacgaccaatacaagatggcagagagcggctatgacatcgcactgctcaagttggaaactaccgtgaactacacggattcacaacgccccatctgcttgccgtcgaaaggagatcggaacgtgatctacaccgactgttgggtgaccggatggggctaccggaaattgcgcgacaaaatccaaaacacgctgcaaaaggccaaaatccctctcgtgactaatgaagagtgccaaaagcgctatcgcggacacaagattacccataagatgatctgcgccggataccgcgaagggggaaaggacgcctgcaagggagattccggaggacctttgtcctgcaaacacaatgaagtgtggcacctggttggaatcacttcgtggggagaaggatgcgcccaaagagaacgcccaggcgtgtacaccaacgtggtggagtacgtcgattggattctcgaaaagactcaggcagtg

SEQ ID NO: 9414 - DNA, 1875 bp, synthetic construct
  misc_feature 1..1875: note = source = /note="Description of Artificial Sequence: Synthetic coding sequence"
  source 1..1875: mol_type = other DNA
atgatttttctctaccaagtagttcacttcattcttttcactagcgtgtcaggtgaatgcgtcactcaactcttgaaagatacatgctttgaaggtggtgatattacaacagtttttaccccatccgcaaagtactgccaagtggtgtgtacatatcaccctagatgccttctttttacattcacagctgagtctccgtctgaggatcctaccagatggttcacatgtgtgctcaaggatagtgtgactgaaaccctccccagagttaacagaaccgcagctatcagtggttattcgtttaagcaatgctcccatcaaatttctgcatgcaacaaggatatctatgtcgatcttgatatgaaggggataaattataactcttctgttgccaagtcggctcaagagtgccaagagcgctgtactgatgatgttcattgccattttttcacatacgctactcgtcagtttccgtctcttgagcatcgtaatatttgtttgcttaagcatacgcaaacaggaactccaactaggattactaaactagacaaagtggtatcgggattttcactcaagtcttgtgcattatccaaccttgcgtgtattcgtgacattttccctaatacggtttttgccgattctaatatagattccgtcatggctccggatgcctttgtgtgtgggaggatttgcacccaccacccaggttgtctttttttcacttttttcagtcaagagtggcctaaggaatctcagcgcaatctatgcttactcaaaacctcggaatcgggtctcccatcaacccgaattaaaaagagcaaagcattgagcggtttttccttgcagtcatgcaggcattcaatccccgttttctgtcacagctcattctaccacgatacagattttctcggggaagaactcgacattgtggcagctaaatcgcatgaagcctgccaaaagttgtgcactaatgccgtccggtgtcaattcttcacctatacccctgctcaagccagctgcaatgagggtaaggggaaatgttatctcaaactatcttcaaatggttcaccaacaaagattttacacggccgaggcggaatctccggttacactcttcggctctgcaaaatggacaatgaatgtacgactaagattaagcctcggatagtaggcggaaccgcctcggttaggggcgagtggccctggcaagttacgcttcatactacaagtcctactcagcgccacctttgcggcgggtctatcattggtaaccagtggatacttaccgccgctcattgcttttacggtgttgagagtccgaaaatccttcgtgtatatagcggaatattaaatcaatcagagatcaaggaggacacctccttctttggcgttcaagagatcatcattcacgatcaatataagatggctgaatccggttacgatatcgctcttttaaagcttgagactacagttaattatacagactcacaacgacctatctgccttccatctaaaggcgataggaacgtgatttatactgattgctgggtcacagggtgggggtatcgcaagcttagagataagatccaaaacactttgcaaaaggctaagatcccacttgttaccaacgaggaatgccaaaaaagatatcgaggtcataaaatcacgcataagatgatttgcgccggttatcgtgaaggtgggaaagatgcatgcaagggagattcgggaggtcccctttcttgtaagcacaatgaggtgtggcatcttgttgggattactagttggggggaaggttgcgctcaaagagagaggccaggtgtgtatacgaacgttgttgaatacgtggattggattctcgaaaaaactcaagccgtt

SEQ ID NO: 9415 - DNA, 1875 bp, synthetic construct
  misc_feature 1..1875: note = source = /note="Description of Artificial Sequence: Synthetic coding sequence"
  source 1..1875: mol_type = other DNA
atgatctttctctaccaggtggtgcacttcatcctgttcacctcggtgtcaggggagtgcgtgacccagcttctcaaggatacgtgcttcgaaggcggagacatcaccaccgttttcaccccatccgccaagtactgccaggtggtctgcacgtaccatccgagatgcctgttgtttaccttcaccgccgaatcgccgtccgaagatccgactaggtggttcacctgtgtgctcaaagattcagtcaccgaaactctcccgcgcgtgaaccgaacggcggccatctcgggttactcgttcaaacagtgttcccaccagatttcagcgtgcaataaagacatctacgtcgacctggatatgaaggggatcaattacaactccagcgttgccaagtcggcgcaggaatgccaggaacggtgcactgacgacgtgcattgccacttcttcacgtacgccacccgtcagttcccgtcgctggaacataggaatatctgcttgttgaaacatacccagaccggaaccccgacccggatcaccaagctggataaagtggtgtcgggattctcgctgaagagctgtgccctctcgaacctggcgtgcatccgggacatctttccgaacaccgtctttgccgatagcaatatcgacagcgtgatggcgcccgacgccttcgtgtgtggacggatttgcacccaccacccaggctgcctgtttttcacgttcttttcgcaagaatggccgaaagaatcccagcgcaatctgtgcctcctcaagactagcgagtcaggattgccatcaacccgcatcaagaagtcgaaagcactctcgggattttccctgcagtcatgccggcactcaattccagtgttctgccattcatcattttaccacgacaccgatttcctcggagaagaactggacatcgtcgcggcgaagtcccatgaagcctgtcaaaaactgtgcactaacgcggtgcggtgtcagtttttcacttataccccggcccaagcctcgtgcaacgagggaaagggaaagtgctacctcaagctgtcatccaatggctccccaaccaagatcctgcacggtcgcggaggaatctcgggctacacgctccgcctgtgtaagatggacaacgaatgtactaccaaaatcaagccaagaatcgtcggaggaaccgcctccgtgagaggagaatggccgtggcaagtgacgctgcatactacttcacctacccaacggcatctctgtggaggatcgatcatcggaaatcagtggatcctgacggccgcccattgcttctacggggttgaatccccgaagattctccgcgtctactccgggatccttaatcagtctgagatcaaagaggatactagcttcttcggggtgcaggaaatcatcattcacgaccaatacaagatggctgagtccggctatgatatcgcactgctgaagctcgagactactgtgaactacaccgactcacaacggccaatctgtctgccttcaaagggcgacagaaacgtgatctacaccgattgctgggtcaccggctggggatataggaagctgcgggacaagatccagaatactctgcagaaggcaaagatacctctggtgactaatgaggagtgtcaaaaacgctaccgcggtcataagattactcacaagatgatctgcgcgggttacagggaaggaggaaaggatgcctgcaagggcgatagcggaggaccgttgtcctgcaagcacaatgaagtttggcatctggtcggaatcacgtcgtggggagagggttgcgcgcagagggagcgcccgggagtgtacaccaacgtcgtcgaatacgtggattggatcctggaaaagactcaggcagtg

SEQ ID NO: 9416 - DNA, 1875 bp, synthetic construct
  misc_feature 1..1875: note = source = /note="Description of Artificial Sequence: Synthetic coding sequence"
  source 1..1875: mol_type = other DNA
atgatttttttgtaccaggtggtgcacttcatccttttcacatccgtgtccggcgaatgtgtgactcagctccttaaggacacctgtttcgaaggcggtgacatcaccaccgtgttcactccctccgctaagtattgccaggtggtgtgcacttaccacccccgctgtctactctttacatttaccgcagagagccctagtgaggatcccacgcgctggttcacatgtgttctaaaagatagcgtgacagaaacactgccacgcgtgaatcgtactgccgcaatctctggctattcattcaaacagtgctctcatcagattagtgcatgtaataaagacatatacgtagacctggatatgaaggggattaactataacagtagcgtggctaaatccgcgcaagagtgccaggaacggtgtacagacgatgtgcattgtcatttttttacctatgctactaggcagttccctagccttgaacaccgcaatatctgtcttttaaagcacactcagaccgggacaccgactcgaattaccaagctggacaaggtcgtgtctggtttcagtctcaaatcctgcgcactgtctaacctggcttgcatacgggatatctttcccaatactgtgttcgcggactcaaatatcgattccgtgatggcacctgatgctttcgtttgcgggcgaatttgcacccatcatccgggctgtctctttttcacattttttagtcaggagtggccaaaggagagccagaggaatctttgtctactgaagacttcagaatcaggtttgccttctactcgcatcaagaagagcaaggcactttccggcttctccttgcagagctgcaggcattcgattccagtattctgtcattccagcttttatcacgacacagacttcttaggagaggagctcgatatcgttgctgctaagtcacacgaggcttgccaaaaattgtgcaccaacgcggtcaggtgtcagttcttcacctatacacctgcacaggcaagctgtaacgagggcaaggggaagtgttacttgaagttgtcatccaacggtagcccgaccaagattctgcatggtagaggtggcatcagcgggtacactctccgcttatgcaagatggataatgagtgtacaaccaagattaagccacgcatcgtcggaggtaccgcttcagtaagaggggaatggccatggcaagtgacccttcacaccacttcacccacacagaggcatctgtgcggcggctcaataatagggaaccagtggattctgacggccgcgcactgcttctatggcgtggagtcccccaagattctacgcgtttattccgggattttgaaccagagtgagatcaaggaggatacaagcttttttggtgtccaggagatcataatccatgaccagtacaaaatggccgagagcggctacgatatagccctattaaaattggagacaacagtgaactacacagacagccagcggccaatttgcctgcccagtaagggagaccgcaatgtgatctacacagactgttgggtcaccggttggggctataggaaactacgcgacaagatccagaacacacttcagaaagcaaagatccctctggtgaccaatgaggaatgtcagaaaagataccggggccataagattacacataaaatgatctgcgctggctaccgggaagggggaaaggacgcctgcaaaggtgattcaggagggcctctgagttgtaagcacaacgaagtgtggcacctggtaggaattaccagctggggtgagggctgcgcccagcgggagagaccgggggtctatacaaatgtggtcgagtacgtagactggatcctagagaagacccaagcagta

SEQ ID NO: 9417 - DNA, 1875 bp, synthetic construct
  misc_feature 1..1875: note = source = /note="Description of Artificial Sequence: Synthetic coding sequence"
  source 1..1875: mol_type = other DNA
atgatttttctgtaccaagttgtgcactttattctttttacttcagtgtcgggagaatgcgttacccagcttctgaaggatacctgttttgaaggcggagacatcaccaccgtgttcactccttcggctaagtactgtcaagtggtgtgtacctaccatccgcgctgccttctctttacctttactgcagaatctccttcagaggatccaacccgatggttcacctgtgtcctgaaggactccgtgaccgaaactctgccccgcgtgaatcgcactgccgcaatctcgggatacagctttaaacaatgttcccatcagataagcgcatgcaataaggacatttacgtggatcttgatatgaaaggcattaactacaattcctccgtggcaaaatccgcccaagaatgccaggaacgctgtaccgatgatgtgcattgtcacttctttacctatgcaactcggcaatttccttcgcttgagcatcgaaacatttgtctgctgaaacatactcaaaccggaacccctactcggattactaaattggataaggtggtgtcagggttctcgctgaagtcgtgtgctttgtccaacctggcatgtattagagacatttttccgaacactgtgttcgcggactcgaacatcgattccgtgatggccccggacgcgtttgtttgtggaagaatttgcactcaccaccctggttgtctcttcttcactttcttctcacaggagtggcccaaagaatcccagcggaacctctgtctgcttaagacgtcagaatccggtctgccttcgaccagaatcaagaagagcaaagcattgtcaggctttagcctccagtcctgtaggcattcaattccagtgttctgccacagcagcttttaccatgatacggactttcttggagaggagctggatatcgtggccgccaagagccatgaggcctgccaaaaactgtgcactaacgcggtccggtgccagtttttcacctatacccctgcacaggcaagctgtaacgaagggaaagggaagtgctaccttaagctgagctcgaatggatcccctacgaagatactgcatggacgcggtggcatctcaggctacaccctgcgtctgtgtaagatggacaatgagtgtactaccaagatcaagccacgaatcgtcggtggcactgcatccgttcggggcgaatggccatggcaagtgacccttcataccacgtcgcctacccagcggcacctgtgcggaggcagtatcattgggaatcagtggatattgacggcagcacactgcttttacggagtggagtcccccaagattctccgcgtatattctggcatcctgaaccaaagcgagattaaagaagatacttcgttttttggtgtgcaagagattatcatccacgaccaatacaagatggctgagtcgggttacgatatcgccctccttaaactggaaactaccgtgaattacaccgacagccagcgcccgatttgcctgccttctaaaggtgacagaaacgtgatctacactgattgttgggtgactgggtggggctacagaaaacttagagataagattcaaaatactctgcagaaggcaaagattcctcttgtcactaatgaagagtgccagaagcggtaccgggggcacaagatcacccacaagatgatttgtgccggttatagagaaggaggaaaggacgcatgtaaaggagactccggaggaccactgtcctgcaagcataatgaagtctggcatctggtgggtataacctcctggggagaaggatgcgcccaaagagaacgcccgggagtgtacaccaacgtagtggagtacgtggactggatccttgagaaaacccaggccgtc

SEQ ID NO: 9418 - DNA, 1875 bp, synthetic construct
  misc_feature 1..1875: note = source = /note="Description of Artificial Sequence: Synthetic coding sequence"
  source 1..1875: mol_type = other DNA
atgatttttctgtaccaggtggtacacttcattttgtttacctcagtgagtggcgaatgcgtaacccagctccttaaagacacctgtttcgagggtggagatatcacgacagtcttcaccccgtcagccaagtactgccaggtggtctgtacctaccaccccagatgtctgctgtttacgttcacagctgaaagccccagcgaggacccaactcggtggttcacatgcgttctgaaagactctgtgacagagaccctgccacgcgtcaacagaacagcggcaatcagcggctacagttttaagcagtgctcacaccagatctccgcctgtaacaaggacatttacgtggatctggacatgaaaggaataaactacaattcatccgttgccaagtctgcccaggagtgtcaagagaggtgcacagatgatgtccactgccacttttttacctatgctacacgccagtttccctccttagaacataggaatatttgcctgttgaaacatactcagaccgggactccaaccagaatcaccaagctggacaaggtggtgtcaggtttttccttgaagtcgtgcgccctcagcaacctagcttgcatccgggacatttttcctaacacagtgttcgccgactcgaatatagactcggtgatggcccccgacgctttcgtctgtggccgaatctgcactcaccatccgggttgcttgttcttcactttcttttcccaagagtggccaaaggaatcacagcgcaatctgtgtttgctgaagaccagcgagagcgggctgccttccaccaggattaagaagagtaaagccctgtccggtttctcgttacaaagttgtagacattccataccggtgttctgccattcatcattttaccacgacactgattttcttggtgaggagctggacatcgtcgctgccaaatcccatgaggcttgtcaaaaactgtgtacaaatgccgtccgttgccaattctttacctacacacccgcgcaggcatcgtgcaatgagggcaaggggaagtgctacttaaagctgtccagcaatgggtctcccaccaaaatcctccatggtcgcggaggaatctccggctatacgttgagattgtgcaagatggataacgagtgcactaccaagattaagccccgtatcgtcggcggtacagccagcgtaagaggcgagtggccctggcaggttactctgcatactacctctcctacccagcggcatctgtgtggcggatccataataggtaatcagtggatactgaccgccgctcactgcttttacggcgtggaatcccctaagattctgagagtctacagcgggatcctgaatcaaagcgagatcaaggaggacaccagtttctttggggtgcaggaaataattatccacgatcaatataagatggctgaatccggctatgacatcgccttgctgaaactggagaccacagtcaattataccgacagccagaggcccatctgcctgccatctaagggggaccgcaacgtgatttacactgattgttgggtgaccggttggggttatcgtaaactccgcgacaagatccagaataccctccagaaggccaaaatcccgctggtgacaaatgaggaatgtcagaagcggtacagaggccataaaattacacataagatgatctgtgcaggttaccgcgagggcggcaaagacgcttgtaagggggattccggaggaccactgtcctgcaagcacaacgaggtgtggcaccttgtcggaattaccagctggggggaggggtgcgcccagcgcgagaggcccggcgtctacactaacgtggtggagtacgtcgactggatactggagaagacgcaagccgtt

SEQ ID NO: 9419 - DNA, 1875 bp, synthetic construct
  misc_feature 1..1875: note = source = /note="Description of Artificial Sequence: Synthetic coding sequence"
  source 1..1875: mol_type = other DNA
atgatctttctgtaccaagtggtccatttcattctttttacctcagtgtcgggtgagtgcgtcacccaactccttaaggatacctgtttcgaaggaggagatataaccactgtgttcaccccctcagcaaagtactgtcaagtggtgtgtacctaccatccccggtgcctgctttttacgttcactgcagaatcacccagcgaggacccaacccgctggtttacctgcgtgctcaaggattccgtcacggaaactcttcctagagtcaatagaactgcagcaatttccgggtactcgttcaaacaatgttctcaccagatctccgcatgcaacaaggatatctacgtggacctggacatgaagggaatcaactataactcctctgtggcaaagtccgcccaagaatgtcaagaacgatgcactgacgatgtgcactgccatttctttacttacgctactaggcagttcccatcactcgagcatcgcaacatatgtctgctgaaacacacccaaaccgggacccctacgagaattactaagttggataaggtggtgtcaggattcagcctgaagagctgcgctctctccaatctggcgtgcataagggacatatttcccaacactgtctttgcagattccaacatcgattccgtgatggcccctgacgcctttgtgtgtggccgcatttgcactcaccatccaggttgtctgtttttcacctttttctcgcaagaatggcctaaggaatcacaaagaaacctgtgcttgcttaagacctccgaatcgggactgccatcaaccagaataaagaagtccaaggctctctcgggattctcgctccaatcgtgtaggcactctatccccgtgttttgtcatagctccttttatcacgacactgacttcctgggtgaagagcttgatatcgtcgcagcaaagtcccatgaggcatgccagaagctctgtactaacgccgtgcggtgccaattctttacgtacaccccagcacaggcatcatgcaatgaagggaaggggaagtgttacctcaagttgtcatcgaacgggtcaccaactaagattctgcacggcaggggtgggatttccggctacactctccggctgtgtaagatggataacgaatgcaccactaagattaaaccgagaattgtgggaggcactgcctcggtcaggggtgaatggccatggcaagtgaccctgcataccacttcgcctacgcagcgacatctttgtggaggctccataattggtaaccaatggatccttactgcagcacattgtttctacggggttgaatcacctaagattctccgtgtgtactcgggtatccttaaccaatctgaaatcaaggaggacacctcgttctttggagtgcaggagatcataatccatgaccagtacaaaatggcagaaagcggttatgacattgccttgctgaagctcgaaaccaccgtgaactacactgacagccaaagaccaatctgtctgccatcgaagggagatcgaaatgtcatttacactgactgttgggtcactggatggggataccgcaagctgagagataagatccaaaatacgctgcagaaagccaagatcccacttgtgaccaacgaagagtgtcagaaaagataccgtggtcataagataacccacaagatgatttgtgcaggttaccgggaaggtgggaaggatgcatgcaagggggattcgggaggccccctgtcctgtaagcacaacgaggtgtggcacctggtgggtattacctcgtggggagaaggatgcgcacagagggagcgacctggtgtgtacaccaatgtcgttgagtacgtggattggattcttgaaaagacccaagccgtc

SEQ ID NO: 9420 - DNA, 1875 bp, synthetic construct
  misc_feature 1..1875: note = source = /note="Description of Artificial Sequence: Synthetic coding sequence"
  source 1..1875: mol_type = other DNA
atgatcttcctctaccaagtggtccactttatcctgttcacctctgtctcgggagagtgtgtgacccagctgttgaaggatacttgtttcgagggtggcgacatcacgaccgtgttcactccgtcagcaaagtactgccaggttgtttgcacctatcatccaaggtgtctgctgttcacgttcactgcagaaagcccatcggaggaccctacccgttggttcacctgtgtgctgaaggattcggtgaccgaaaccttgccgagggtgaaccggaccgccgctatttctggatactcgttcaagcagtgcagccaccaaatctccgcttgcaacaaggatatctacgtcgaccttgacatgaaggggatcaattacaattcatcagtggcaaaatctgcccaagaatgccaggaaaggtgtaccgacgacgtgcattgccactttttcacttatgccacccgccagttcccgtcactggaacatcgcaacatctgtcttttgaaacacacccagactggcacgccgacccggatcaccaaactggataaagtcgtgagcggcttctccctgaagtcatgtgctctctccaacttggcctgcatccgcgacatattcccaaacactgtctttgcagattcgaacatcgatagcgtcatggccccggatgcatttgtctgcggcaggatctgcacccaccaccccgggtgtcttttcttcacgttctttagccaagagtggcccaaagaatcgcaaagaaatctgtgtctgctcaagacgtcagagtcggggctgccctcgactagaatcaaaaagtccaaggcgctgtccgggttttccctgcagtcctgccggcattccatccctgtgttctgccactcgagcttctaccatgataccgacttcttgggagaagaactggacattgtggcagccaaaagccatgaggcgtgccaaaagctgtgcactaacgcggtgagatgccagtttttcacctacaccccggcccaggcttcgtgtaacgaaggaaagggcaagtgctaccttaagctcagctccaacggatccccaactaagatcctgcatgggcggggaggaatctcggggtacactctccgactttgcaaaatggacaacgagtgcacgactaagattaagcctagaatcgtgggaggcaccgcgtccgtgcgcggggagtggccgtggcaggtgaccttgcataccacctcaccgacccaacgccacctctgcggaggatcaatcatcggaaaccagtggatcctcactgctgcgcactgcttctacggagtggaatcgccaaaaatcctccgggtgtactctgggatcctgaatcaatcggagataaaggaagataccagctttttcggagtccaagaaatcatcattcatgaccagtacaagatggccgaatcaggttacgacatcgcgctgctgaagctggagactaccgtcaactatactgacagccaacgccctatctgcctcccttctaagggtgaccgcaacgtgatttacactgattgctgggtgacgggatggggatatcggaagttgcgagacaaaatccagaatacccttcagaaggccaaaataccactcgttaccaatgaggaatgccagaagcggtaccggggacacaagatcacgcacaagatgatctgcgctggttacagggaaggtggtaaggacgcatgcaagggcgactcggggggaccattgagctgcaagcacaacgaagtctggcacctggtgggaattacctcgtggggagagggatgtgcccaacgcgagcggccgggagtgtacaccaatgtcgtggagtacgtggactggatcctcgagaaaacgcaggcggtg

SEQ ID NO: 9421 - DNA, 1875 bp, synthetic construct; identical to SEQ ID NO: 9416
  misc_feature 1..1875: note = source = /note="Description of Artificial Sequence: Synthetic coding sequence"
  source 1..1875: mol_type = other DNA

SEQ ID NO: 9422 - DNA, 1875 bp, synthetic construct
  misc_feature 1..1875: note = source = /note="Description of Artificial Sequence: Synthetic coding sequence"
  source 1..1875: mol_type = other DNA
atgatctttctctaccaggtggtgcattttatccttttcactagcgtcagtggggaatgcgtgacacagcttctcaaagacacgtgcttcgaaggcggggatatcacaacagtttttacaccctcagccaaatactgtcaggtcgtgtgtacctatcatccgaggtgcttgttgttcacgtttactgccgagtctccgagtgaagatcccacccggtggttcacttgcgtgctgaaagattcagtcaccgagaccctacccagagtgaacaggaccgccgcgatttccggttactcgtttaaacagtgtagccaccagatttctgcatgcaacaaagacatttatgtggatcttgacatgaaggggatcaactacaacagctctgtggccaagagcgcccaggagtgtcaggagcggtgtacggacgatgttcactgccactttttcacatacgcaacacggcagttcccaagcctggaacataggaacatatgtctccttaaacatacacagaccgggaccccaactcgaattactaagctagacaaagttgtctcagggttctcgctaaagagctgcgctcttagcaatttggcttgcatcagggatattttcccaaacaccgtgttcgccgacagtaacatagacagtgtaatggctccagatgctttcgtgtgcggccgtatctgtacccatcaccccgggtgcctgttcttcacatttttcagtcaggagtggccaaaagaatcccagcgtaatctctgtttgctgaaaacttctgagtcgggactgccctctacacgaatcaagaaatctaaagccctgagtggttttagtctgcagtcttgccggcattccattcccgtcttttgccacagttccttttaccatgacacggatttcctgggagaagagttggatattgtggccgctaaatcgcacgaagcatgccagaagctgtgtacgaacgctgtgcggtgccaattttttacctacacccccgcccaggcttcatgcaacgaaggtaaaggaaaatgttacttaaagctgtctagcaacggttctccaacaaagattctgcatggcagaggaggtatcagcgggtacacactccgactgtgtaagatggacaatgagtgtacaaccaagatcaagccacggatcgtcggcgggaccgccagcgttagaggtgagtggccatggcaggtgacactgcacaccacaagcccgacacagcggcatctttgcgggggtagtataatagggaatcaatggattcttacagccgcccattgtttttatggcgtcgagtcccctaaaatcttacgcgtgtactcggggatcctgaaccagtcggagatcaaggaggacacgagcttcttcggagtccaagagataattatacacgaccagtataagatggcggaaagcggttatgatatcgcactgctcaagctggagaccacagttaactatacagatagccagaggccgatttgcctgccaagtaaaggcgatagaaacgtgatttataccgattgttgggtgacaggttggggttataggaaactgcgggacaaaattcagaacactctgcaaaaggctaagatccccctggtgacgaacgaagaatgccagaaacggtacagggggcacaagatcacccataagatgatctgtgctggttaccgcgaaggaggaaaggatgcatgcaagggggacagcggtggtccactctcttgtaagcacaacgaagtctggcatttggtcggcattacttcatggggggagggctgcgcacagcgcgagcgtccgggagtttataccaatgtggtggagtacgtggactggatcctcgagaaaactcaggctgtg

SEQ ID NO: 9423 - DNA, 1875 bp, synthetic construct
  misc_feature 1..1875: note = source = /note="Description of Artificial Sequence: Synthetic coding sequence"
  source 1..1875: mol_type = other DNA
atgatcttcctttatcaagtcgttcattttatcttgttcacaagcgtctcaggcgagtgcgttacacagctgctcaaagacacttgctttgaaggaggcgatataactaccgtgttcacaccaagcgccaaatactgccaggttgtgtgcacatatcaccccaggtgtctgttgttcacattcactgctgaatcaccatctgaggatcctaccagatggtttacctgtgttctgaaggacagcgtgaccgaaactctgccccgcgtcaatagaactgcagctattagtggttactccttcaagcaatgcagtcaccagattagtgcctgcaacaaggatatttacgtggatcttgacatgaaaggaatcaattataactccagcgtcgctaaatcagcccaggaatgccaggagcgttgtacagacgacgtgcactgtcacttcttcacttatgcaacacgtcaattcccctcactggagcatcgtaacatatgcttgctgaagcatacccagaccggaacaccaaccaggatcaccaaactcgataaagttgtctcaggtttctctctcaagtcttgcgcccttagcaatctggcttgcattagggatattttcccaaatacagtctttgccgatagtaatatcgactcagttatggctccagacgccttcgtgtgcggccgcatctgtacacatcaccccggctgccttttcttcacattcttcagccaggaatggcctaaggaaagtcagaggaacttgtgcctcttgaagacctctgagtccggattgccctctactcgtatcaagaagtcaaaggcattgagcggcttttcattgcagtcctgtagacatagcatcccagttttctgtcacagctccttctatcatgacaccgatttccttggagaggagctcgacattgtcgcagccaagagccatgaggcctgtcaaaaactgtgtaccaacgcagtgagatgtcagtttttcacttacactcctgcacaggcttcatgcaacgaaggtaagggcaagtgttacctcaaactgagcagtaatggctctccaaccaagatcctgcacggtaggggaggaatctcaggatataccctgagactgtgcaaaatggacaacgagtgcactaccaagatcaagccacgtattgtcggaggcaccgccagcgtgcgcggtgaatggccatggcaggttactctgcacaccacctcaccaacacagcgccatttgtgtggtggatctatcattggcaatcagtggattctgactgctgctcactgcttttatggagtggagagtcccaagattctgcgcgtgtactccggaattctcaatcagagcgagatcaaggaggacacctcattttttggcgttcaggagatcatcatccatgatcagtacaagatggccgaatccggttacgacattgcccttcttaaattggagactaccgtgaactacaccgactcccagcgtcctatctgcctcccttccaagggtgatcgtaacgtgatctataccgactgttgggtcacaggatggggataccgtaagctgagggacaagattcagaacactctgcagaaagccaagatccctctggtcacaaacgaagaatgccaaaagcgttaccgcggacataagatcacccacaaaatgatttgtgccggatacagagagggaggaaaggacgcttgtaagggagatagtggcggtccactcagctgcaagcacaacgaagtctggcacctcgtaggaattacatcctggggcgaaggttgcgctcagagggagaggcctggcgtttacaccaatgtcgtggagtacgttgattggattctcgaaaaaactcaggcagtt

SEQ ID NO: 9424 - DNA, 1875 bp, synthetic construct
  misc_feature 1..1875: note = source = /note="Description of Artificial Sequence: Synthetic coding sequence"
  source 1..1875: mol_type = other DNA
atgatatttttgtatcaggtggttcactttatcttgtttacgtccgtgtctggggagtgtgtgacgcaacttctgaaggatacctgtttcgaagggggggatattacgacagtctttacacctagcgctaaatactgtcaggtcgtatgtacatatcatccaagatgccttctgttcacctttacagctgagtctccatctgaggaccctactcgctggtttacttgcgttctgaaagattcggtgaccgagactctgcctagagttaaccgcaccgctgcgatcagtggatactcctttaaacagtgttcccaccagatttcggcttgcaataaagacatctacgtggatctcgacatgaaagggatcaactacaactctagcgttgctaaatctgcccaggagtgccaggagcgctgtacggacgacgtacactgccatttttttacatacgctacacggcagttcccttcgctcgaacacaggaacatttgcctgctgaagcacactcagactgggacaccaactcgtattactaagctagataaagtggtgtccggcttctcattaaagtcatgtgccctgagtaacttggcctgcatccgcgacatattcccaaacaccgtgtttgcggacagcaatatcgatagtgtgatggctccagatgcttttgtgtgcggaagaatttgcacacatcacccgggatgtctgttctttacatttttttcacaggagtggccaaaggaatcccaacgcaatctatgcctgctgaagacaagcgaatccggcctgcccagtacacggataaaaaaaagcaaggcactgtccgggttcagcctccagtcgtgtcggcatagcatcccagtcttctgccattcgtcattctaccacgacaccgactttctaggggaagagctcgacatcgtggctgcaaagtcccatgaagcctgtcagaagctctgtactaacgcggtgcggtgccagttctttacatacacgcctgcgcaagcatcatgcaacgaaggtaaagggaagtgttatctgaaactgtcgagtaacgggtcccccactaagatcctgcacggccggggggggatttcaggctatactctccgactgtgcaagatggacaacgagtgcaccacgaaaattaaaccacgcattgtgggggggacagcaagtgtgcgcggagagtggccttggcaggtgactttgcataccacgtcaccaacacagaggcatctctgtgggggaagcataattggcaaccagtggatactcacagctgcacactgcttctacggtgtggagtcgcccaaaattttgagggtgtatagtggcatcctcaaccagtccgagataaaggaggacacctcattttttggagtgcaggagatcatcattcacgatcaatataaaatggccgaatccggatatgacattgctcttctcaagttggaaactacggtgaattacacagacagtcagaggccaatatgtctcccttccaagggtgatcgtaacgtcatttacactgattgctgggtgacagggtggggatatagaaagctgcgagacaaaattcaaaatacactgcaaaaggccaaaattccgctggtgaccaatgaggagtgtcaaaagcgatatcgaggccacaagattacacacaaaatgatctgcgctgggtatcgggagggcgggaaggacgcctgtaaaggcgacagcggaggcccgctctcttgtaaacataacgaagtgtggcacctagttgggattactagttggggtgagggatgcgcccagagggagaggccgggcgtgtacactaacgtggttgagtacgtagactggatcctggaaaagacccaggcagtt

SEQ ID NO: 9425 - DNA, 1875 bp, synthetic construct
  misc_feature 1..1875: note = source = /note="Description of Artificial Sequence: Synthetic coding sequence"
  source 1..1875: mol_type = other DNA
atgatatttctgtaccaagtcgttcactttattctcttcacgagtgtttccggcgagtgcgtgacacagttactgaaggatacctgtttcgaggggggggacattaccaccgtctttacgccatctgccaagtattgtcaggttgtgtgcacttatcacccaaggtgtcttcttttcacatttaccgcagaatccccctctgaggatcctactaggtggttcacttgcgtcctcaaggactcagtaacagaaacgctgccgcgtgttaatcgtactgcagctatttctgggtactcatttaagcagtgtagccaccagatcagcgcctgtaacaaggacatatacgtggatcttgacatgaaagggataaactataacagctcagttgccaaatccgcccaggaatgtcaagagagatgtaccgatgatgtgcactgccatttttttacgtacgccacccgccagtttcccagcctggagcatcgcaacatatgtctcctgaagcacacccagaccgggacccctacgcgaattaccaagctcgacaaggtagtgtcaggattttccctgaagtcctgtgccctgtctaatctggcctgtatcagggacatcttccccaacaccgtttttgctgattctaacattgatagcgtcatggctcccgatgcatttgtctgcggccgcatttgcacacatcatccagggtgtctgttcttcaccttttttagtcaggaatggccaaaggaaagccaaagaaatctgtgtctactgaagacaagcgagagtggcctccccagtactcggatcaagaagtccaaggctctttcaggcttcagcctgcagtcgtgcaggcactctatacctgtgttctgtcactccagcttttaccatgatacagatttccttggtgaagagctcgatattgtggcggcgaagtcccacgaggcgtgccagaaactgtgcaccaacgcagtgaggtgccaattctttacatacactcccgcgcaggcaagctgcaacgaaggaaaggggaagtgttacctgaaactgagttccaacgggtcgcccactaagatcctgcatggccgcggtggaatatccggatatactcttcgcctgtgcaagatggataacgaatgtaccaccaagatcaagccaaggatcgtagggggcaccgcttcagtaaggggagagtggccgtggcaggtgacactccataccacgagccccacccaaaggcatctttgtgggggttccatcatcggtaatcagtggatcctaacagccgcccattgtttttatggcgtcgaatcccctaaaatcctgcgcgtgtacagcgggatcctgaaccagtccgagatcaaagaagacacgagcttcttcggtgtccaggaaataataatccatgaccagtataaaatggccgaatcagggtacgacatcgcccttcttaagctggagacaacagtcaattataccgactcccagaggccaatatgcttaccttcaaagggagatcggaatgtgatatacaccgactgctgggttaccggctggggctacaggaaactgagggataaaattcaaaacaccctccagaaagccaaaatcccgttggtgaccaacgaagagtgccaaaaacgttaccgcggacacaagatcacgcacaaaatgatctgcgccggctaccgtgagggcggaaaagatgcctgtaaaggggacagcggggggcccctgtcctgcaagcataatgaggtttggcatttagtgggaatcacaagttggggggagggatgtgcacaacgcgagcgacctggagtctatactaacgttgttgaatacgtcgactggattctcgagaaaactcaagctgtc

SEQ ID NO: 9426 - DNA, 1875 bp, synthetic construct
  misc_feature 1..1875: note = source = /note="Description of Artificial Sequence: Synthetic coding sequence"
  source 1..1875: mol_type = other DNA
atgatctttctgtaccaagtcgtccactttatactgtttacttccgtgtcaggggagtgtgtgactcagctgcttaaggatacgtgcttcgaaggtggagatatcaccactgtgttcaccccatcagcaaaatactgtcaggtcgtctgcacttaccacccgagatgcctgttgttcacctttactgcagaatcgccatcagaagatcctactcggtggtttacttgtgtgctgaaggattccgtgaccgaaacccttccccgagtaaatagaacggccgccatctccgggtactcctttaagcaatgttcgcatcaaatatcggcatgtaacaaggacatctatgttgacctggatatgaagggtatcaactacaattcgagcgtggcaaagtctgctcaagagtgtcaggaacggtgtactgatgacgtacactgccacttctttacgtacgccacccggcagtttccttcacttgaacacagaaacatttgcctgctgaaacatacccaaaccggaaccccaactaggattacgaaacttgacaaggtcgtgtcgggattctcattgaaatcgtgtgcactctccaaccttgcatgtataagggatatctttcctaatactgtgtttgcggattcgaacattgacagtgtgatggcgccggatgcattcgtctgcggaagaatttgtacccatcaccccggctgtctctttttcacctttttctctcaggagtggcccaaggaatcccaacgtaatctgtgcctgctcaagacttccgagtctggtctgccctccacgcgcattaagaaatccaaggcgctttcaggattttccctccagagctgccgacacagcattcctgtgttttgccattcaagtttctaccatgacaccgattttcttggggaggagctcgacattgtggccgctaagagccatgaggcatgtcagaagctctgcaccaacgcagtccgctgccagtttttcacgtatactcctgcccaagcctcctgtaatgaaggcaagggaaagtgctacctgaagttgtcgtcgaatgggtcgccaactaaaatcctgcatggacgcggcggtatctcgggctatacccttagactctgtaagatggataatgaatgtaccaccaagattaagcctaggatagtgggcggcactgcgtcggtccgtggcgaatggccttggcaagtgaccctgcacactacctcgcctactcaaaggcatctttgcggtggttccataatcggcaaccagtggattcttaccgcagcacactgcttttacggagtggaaagtccgaagattcttagggtgtacagcggtatcctcaaccaatccgagataaaagaagatacgtcctttttcggtgtgcaagagatcattattcatgaccaatacaagatggcagaatcgggatacgacatcgcactcctcaaactcgaaaccaccgtaaactacaccgatagccaacgcccgatttgtctgcccagcaagggtgataggaacgtgatttacaccgactgttgggtcaccggttggggatacagaaaacttagagacaaaatacagaacacccttcaaaaggcaaagatcccactggtgactaatgaggaatgtcagaaacgctataggggtcataagattactcacaagatgatttgcgcaggataccgggaggggggaaaggatgcctgtaagggagattcaggcgggccactgtcgtgtaagcataacgaagtttggcatcttgtgggaattacgtcctggggagaaggctgtgctcaacgcgaaagacccggggtctacactaacgtggtggaatacgtcgattggattcttgagaaaactcaggcagtg

SEQ ID NO: 9427 - DNA, 1875 bp, synthetic construct
  misc_feature 1..1875: note = source = /note="Description of Artificial Sequence: Synthetic coding sequence"
  source 1..1875: mol_type = other DNA
atgatattcttgtaccaggtagtacacttcattttgttcacctccgtctccggcgagtgtgtgacacaacttctaaaggacacctgtttcgaggggggtgacattactacagtatttacgccaagtgctaaatattgtcaggttgtttgcacctaccatccaaggtgtctgctttttacattcaccgcggagagcccctccgaagaccctactagatggtttacctgtgtcctcaaagatagcgtaactgaaacacttccacgagtgaatcggactgccgcaatcagtggctatagtttcaaacaatgtagccaccagattagtgcatgtaacaaggatatctacgtcgacctggacatgaagggaataaattataactccagtgtcgctaaatccgcccaggagtgtcaggagagatgtactgacgatgtgcactgccatttcttcacctatgctacgagacaatttccctctctcgaacatcgtaatatatgccttttgaagcacacccagaccggcacacctacacggataacaaaattagacaaggtcgtctctgggttcagcctaaaatcttgcgccttgtccaatctggcatgcattagggacatctttcccaacaccgtttttgcggattccaatatcgatagcgtgatggcacccgatgccttcgtttgcggaaggatttgtactcaccaccccggctgtctattctttacattttttagccaggaatggccaaaagaatcgcagagaaacctgtgcctgctcaagacatcagaatccggactgccatccactcgcattaagaaatctaaagcgctgtcggggttctccctgcagtcctgcagacactctatacctgtgttctgccactcttcattctaccacgataccgacttcctaggcgaagagctagatattgttgccgccaagtctcacgaagcttgtcaaaaactgtgcactaacgccgttcgctgccagtttttcacatacacaccagctcaggcctcctgcaatgaggggaaggggaagtgctatctgaaactgtccagtaacggctcgccgacgaagatcttacatggccgtgggggcatatcagggtacacacttcggctctgtaagatggataacgaatgtactacaaaaatcaaaccccgtatcgtaggcggtaccgcctccgtccggggtgagtggccatggcaggtgactctacacaccaccagccccactcagaggcacctgtgcggcgggtctattatcggaaaccaatggatcctgaccgcagctcattgcttctatggagtggagtctcccaaaatactgagggtctactccggaatactaaatcagagtgaaattaaggaggacacatctttcttcggcgttcaggagattattatccatgaccagtacaaaatggcagaatctggttatgatatagcccttctcaagctcgaaaccaccgtgaattataccgactctcagagaccaatctgcctccccagcaaaggcgaccgcaacgttatttatacagactgttgggttaccgggtggggatataggaagttgagagacaagatccaaaatacactccagaaagctaagatcccgctcgtcactaatgaggagtgtcagaagcgataccgcgggcataaaattacccacaagatgatctgtgctggctacagagaaggcggtaaggacgcttgtaagggagattcggggggcccccttagctgcaagcacaatgaagtctggcacctggtcggaatcacatcatggggtgagggatgcgcgcagagggaacggcccggagtgtataccaatgtagtcgagtatgtggattggattctggaaaaaacacaggccgtt

SEQ ID NO: 9428 - DNA, 1875 bp, synthetic construct
  misc_feature 1..1875: note = source = /note="Description of Artificial Sequence: Synthetic coding sequence"
  source 1..1875: mol_type = other DNA
atgatttttctctatcaggtggtgcacttcattctgttcacatctgtctctggggaatgtgtcacacaacttttgaaagatacgtgttttgaaggaggcgacataacgacagtctttacgccaagtgccaaatattgtcaggtggtatgtacttaccatcctagatgtttattgtttacattcacggctgaatccccaagcgaagatccgaccagatggttcacgtgtgtgctgaaagatagcgttacggaaacgctaccgcgtgtaaatcgcaccgctgcgatttctggatattcgtttaaacagtgctctcaccagataagcgcgtgcaacaaagatatttatgtggaccttgatatgaaaggaattaattacaattcctctgtagccaaatcagcccaagaatgccaagaaagatgtacagacgatgtacattgccatttttttacctatgcaacacgccaatttcctagcttagaacataggaatatctgcctgcttaaacacactcagactggaacaccaacaaggattaccaagcttgataaagtggtgagcggatttagccttaaatcttgtgctttaagcaatttggcgtgtattagagatatttttccgaataccgtctttgcagacagcaatattgattctgtgatggcaccagatgcttttgtttgtgggaggatttgcacccaccatcctggatgtctgtttttcactttcttttcacaggaatggccgaaagaaagccaaaggaatctgtgtctcctcaaaacgtctgaatcgggcttaccttctactagaattaaaaaaagcaaagctctgtccggctttagcttgcagtcatgccgccactctattccagttttttgtcactcctccttctaccatgacactgattttcttggtgaagaattggatatcgttgcagccaagtcccacgaagcgtgccaaaaattatgcacgaatgcagtgcgctgccaattcttcacctacacgccggcccaggccagctgcaatgaaggtaagggtaaatgttatcttaagttgtcatctaacggcagtccgacgaagatcctccacggacgtggcggcatctctggatacacgcttcgtctgtgtaaaatggacaatgaatgtacgacaaaaattaaacctcgcattgttggcggtacggcctcagttagaggagaatggccctggcaagtaacactccacactacttctcctacacagagacacttatgcggtggcagcattattggcaatcagtggatcctcactgcggcgcattgcttttacggcgtagaatctcctaagattctgcgtgtgtatagtggcatccttaatcaaagcgaaattaaagaagacacatcattttttggagttcaggaaattattatccatgatcagtataagatggcggagtcaggatacgatattgccttacttaagctcgaaacaactgtcaattatacagacagtcaacgaccaatctgccttccgtctaaaggggacagaaacgtcatttatacagattgttgggtcacaggctggggatatcgcaaactgcgggacaaaattcaaaacactctgcagaaggcaaaaatccctcttgtaaccaacgaagaatgtcagaagagatatcggggacataagattacacataaaatgatatgcgccggatatcgcgaaggcggcaaagatgcttgcaagggcgactctggcgggccgctgtcgtgcaaacataatgaagtatggcatctggtgggcattacgtcatggggggaaggatgcgcacagagagaacgtccgggagtctatactaatgtcgtcgaatatgttgactggattcttgaaaaaacccaggctgtt

SEQ ID NO: 9429 - DNA, 1875 bp, synthetic construct
  misc_feature 1..1875: note = source = /note="Description of Artificial Sequence: Synthetic coding sequence"
  source 1..1875: mol_type = other DNA
atgattttcctctaccaggtggtgcacttcatcctcttcacttcagtctcgggcgagtgcgtgactcaactgctcaaagacacctgtttcgaaggaggagatattactaccgtgttcacccccagcgccaagtactgccaagtggtgtgcacctaccacccacggtgcctcctgttcactttcactgccgaatcaccgagcgaggacccaaccagatggttcacttgtgtcctgaaagattcagtcacggaaaccctgcctcgggtcaaccgtacggccgcgatctcgggctattccttcaagcagtgcagccatcaaatcagcgcctgtaataaggacatttacgtcgacttggacatgaaaggcatcaattacaattcatcagtcgctaagtcagcacaggagtgtcaagaacggtgcactgacgacgtgcattgccacttcttcacgtacgcgacccgtcagttcccttcgcttgagcaccgaaacatctgcctgcttaagcacactcaaactggaactccgacccggatcaccaagctggacaaggtggtcagcggattcagcctgaagtcatgcgctctctccaacctggcgtgtatccgcgacatatttcccaatactgtgttcgcggattccaacatcgactccgtgatggccccagacgccttcgtgtgtggacgcatctgtacccaccaccctggatgtctcttctttaccttcttctcgcaagaatggccgaaggaaagccagcgcaatctgtgcctgctcaagacctcggagtccggcctgccgtcaacccgcatcaagaaatccaaggctctgagcggtttttctctgcaaagctgtaggcactcgatcccggtgttctgccactcatcattctaccacgacacggactttctgggcgaggagctggacatcgtcgccgcgaaatcacacgaagcctgccagaaactttgcaccaatgccgtgaggtgccaattcttcacttacactccggcgcaagcatcgtgcaacgagggaaagggaaagtgctatctgaagctctcgtcgaatggatctccgactaaaatcttgcacggcagaggaggcatttccggatacactctgcgcctgtgcaaaatggataatgaatgtacgaccaaaatcaagccgcggatcgtgggaggaactgcatcggtgcgcggtgaatggccgtggcaagtgactctgcacaccacctcgcccactcaacgccacttgtgtgggggatcgatcatcggaaatcagtggatcctgactgcggcccattgtttttacggggtggagtccccaaagatcctgcgggtctactcggggattctcaatcagtccgaaatcaaggaagatacttcctttttcggagtgcaggagattatcatccatgatcaatacaagatggcagaatcgggctacgatatcgcgctgctgaagctcgagactaccgtgaactacactgactcgcagcggcccatctgcctgccttcgaagggtgaccggaacgtcatctacactgactgctgggtgactgggtggggatacagaaagctgagagataagatccagaataccttgcagaaagccaagatcccgctggtcaccaacgaagaatgccagaagaggtaccggggacacaagatcacgcacaagatgatttgcgcgggataccgcgaaggagggaaagatgcctgtaagggagactccgggggccccctgtcgtgtaaacacaatgaagtttggcatctggtgggaatcacctcatggggcgaggggtgcgcgcagcgcgaaagacctggtgtttacaccaacgtcgtcgagtacgtcgactggatcctcgaaaagacccaggccgtg

SEQ ID NO: 9430 - DNA, 1875 bp, synthetic construct
  misc_feature 1..1875: note = source = /note="Description of Artificial Sequence: Synthetic coding sequence"
  source 1..1875: mol_type = other DNA
atgatcttcctgtaccaagtggtgcatttcatactgttcacttccgtgagtggagagtgtgtgactcaactccttaaggatacgtgttttgaagggggcgatattactaccgtgttcacgccttcggcaaagtattgccaagtggtgtgcacttaccaccctcgctgtcttttgtttacctttacggcagaatccccctcagaagatcccactagatggtttacgtgcgtccttaaagatagcgtcacggaaaccctcccgcgtgtgaatagaactgcagcaatctccggatactcttttaagcaatgtagccatcagatatcggcatgtaacaaggacatttacgtcgacctggatatgaagggtattaactataactcgagcgtcgcaaaatccgcccaagagtgccaagagcgatgtactgatgacgtgcactgtcactttttcacgtacgcaacccgccaatttccatcgctcgaacatagaaatatctgccttcttaagcatacccaaactggaacgccaaccagaatcaccaagttggacaaggtggtgtcggggttttccctgaaatcatgcgcattgagcaacctggcctgtattcgcgacatttttccaaacactgtgttcgcggactcgaatatagattcagtgatggctcctgatgcctttgtttgtggacgcatctgtactcatcatccgggctgtctctttttcacctttttctcccaggaatggcccaaagaatcccaacgaaacctgtgtttgttgaaaacttctgaatcaggacttccttcgactcgcataaagaagtccaaagcgctgtctgggttttcacttcaatcctgtagacatagcatccctgtcttttgtcacagctcgttttaccacgataccgatttcctcggggaagaactggatattgtggcagccaaatctcatgaagcatgtcagaaactgtgtaccaacgcggtcaggtgccagttctttacgtacaccccggcacaggcttcctgcaacgagggaaagggaaagtgttacctgaaactgtccagcaatggatccccgactaagatactgcatggacggggaggaatctcgggttacactcttagactttgcaaaatggacaacgaatgtaccaccaaaatcaagccacggattgtgggagggaccgcctccgtgcgtggtgagtggccatggcaggtgactcttcacactacctcgccaacccaaagacatctttgcggtgggtcgatcattggaaaccagtggatccttactgcagcgcattgtttctacggagtggagtctccaaagattcttcgagtctactccggcattcttaaccaaagcgagataaaggaggataccagcttttttggggtccaggaaatcatcatccacgatcaatacaaaatggcggaatcgggttacgatatcgccctcctgaaactcgaaaccacggtcaattacactgattcgcaaagaccaatctgccttcccagcaaaggagacagaaacgtgatttacaccgattgctgggtcaccggctggggataccggaagctccgggacaaaattcaaaatacccttcagaaggcaaagatccctctggtgactaacgaagagtgtcagaagagataccgagggcacaagattactcacaagatgatctgtgcgggctacagagaaggggggaaagatgcctgcaagggtgacagcgggggacctctgagttgcaagcacaatgaggtctggcacttggtgggaatcacgagctggggcgagggatgtgctcaacgagaacgtcccggcgtctacactaatgttgttgaatatgtggactggatactggaaaagactcaagcagtg

SEQ ID NO: 9431 - DNA, 1875 bp, synthetic construct
  misc_feature 1..1875: note = source = /note="Description of Artificial Sequence: Synthetic coding sequence"
  source 1..1875: mol_type = other DNA
atgatctttctttatcaggttgtacatttcatcctatttacatccgttagcggcgagtgcgttacccagctgctgaaagatacatgtttcgagggtggagatataaccacagtgtttacgccctccgccaaatattgtcaggtggtttgcacgtaccaccctcggtgcctgctgtttacctttactgctgagtcgccctcggaggatcccactcgatggtttacatgcgttcttaaagacagcgttactgagaccctcccccgtgtgaatcggaccgctgccattagcggttatagttttaaacaatgttcccaccagatcagtgcgtgcaacaaggacatttacgtggatctcgatatgaagggcataaactacaattctagcgtggctaaaagtgctcaggagtgccaggagcgctgcacagacgatgttcactgtcacttcttcacctatgctacccggcaatttccatccctggagcacagaaacatatgtttgctgaaacacacccaaaccgggacacctactcgcatcaccaagttagataaggtggtctcgggtttctcactgaagagctgtgccctgtccaacctggcatgcatcagagatatttttccgaatactgtgttcgcagatagcaatatcgattcagtgatggcccctgatgcattcgtctgtggcaggatatgcacccatcatcccgggtgtctgttctttacattctttagtcaggagtggcccaaggaatctcagcgtaacctatgtctgctgaaaacctcggaaagcggtctgccttcaacacgaattaagaagagcaaagccctgtccggcttcagcctgcagtcctgccggcatagtattccagtattttgtcattcctccttctatcacgacaccgactttctgggcgaggaacttgacatagtggctgctaagtcacacgaggcttgtcagaaactatgtacaaacgcagtgcgctgccagttcttcacttataccccagcccaagcatcttgcaacgaagggaaggggaagtgctatctgaagttgagcagcaacggcagcccaactaagatcctccacggccgcggcggcatctctggatacacgctccgactgtgcaagatggataacgaatgtactacaaagatcaaaccaaggatagtagggggaaccgcgtccgtaagaggggagtggccatggcaggtgactctgcatactacgtcacccacccagcgccatctgtgcggaggtagcatcattggcaaccagtggatattaacagccgcacactgcttctacggagtagagagccccaaaattctaagagtgtattcgggaatcttgaaccaaagcgagataaaagaggatacttcattcttcggagtgcaggagattattattcacgaccagtacaaaatggcggaaagtggctacgacattgcattattgaaactcgagacaaccgtaaactatactgactctcagcgtcccatttgcttgccatcaaaaggggacaggaacgtgatctacacagattgctgggtgacagggtggggctataggaaattgagagacaagattcagaacacactgcagaaagcaaagattccccttgttactaatgaggaatgtcagaagagatatcgagggcacaagatcacacacaaaatgatttgtgccgggtacagggaggggggcaaagatgcctgcaaaggggactcagggggccccttgtcatgcaagcacaacgaagtttggcacctagtcggaatcactagctggggagagggatgtgcccagagagaaagaccaggtgtctatacgaacgttgtagaatatgtggattggatactcgaaaagacacaagctgta

SEQ ID NO: 9432 - DNA, 1875 bp, synthetic construct
  misc_feature 1..1875: note = source = /note="Description of Artificial Sequence: Synthetic coding sequence"
  source 1..1875: mol_type = other DNA
atgatattcctttatcaagtcgttcatttcatcctgttcacctccgtttctggcgaatgtgtcactcagttgctgaaggacacatgtttcgaaggcggggacattaccacggtctttacgccctccgccaagtactgtcaggtggtgtgcacctaccatcctcggtgtctcctgttcactttcacagcagaaagcccttcggaggatcctacacgatggttcacgtgcgtgctgaaagattccgtgacagagaccctaccacgagttaacaggacagcagccatctctggctatagcttcaagcagtgctctcatcaaatctcagcatgtaacaaggacatttacgttgacctggacatgaagggaataaactacaacagttccgtggcaaagagcgctcaagagtgccaggagagatgtacagatgatgtgcactgccatttttttacgtatgccactcgccagttcccatctttagaacaccgaaatatctgcctcttgaaacacacacagaccggcacacctacgagaattaccaaacttgataaggtagttagcgggttcagtttgaaatcttgtgctttgtcgaatctcgcttgcatacgtgatatctttccaaatacagtgtttgctgactccaacatagattccgttatggcaccagacgctttcgtctgtgggcggatttgcacacaccacccaggctgcctcttcttcacttttttctcccaggaatggccaaaggagagccagcgaaatctctgcctactgaagacttccgagagtggactcccatcaacccgaattaaaaaatctaaggctctctccggctttagcctgcagtcgtgtagacactccattcccgttttttgccattcctctttctaccacgacactgacttcctgggcgaagagctagacatagtagccgcgaagagtcacgaggcctgtcaaaagctttgtaccaatgctgtaagatgccagtttttcacttacactccggcacaagcatcatgcaacgaaggcaaagggaaatgctacctgaaactgtcgtccaatggaagcccaaccaagatcctacatggaaggggggggatttccggctacaccttgagattgtgtaaaatggataatgaatgtaccactaagatcaaaccgcgtatcgtcggtggtactgcgtctgtgagaggggagtggccatggcaggtgacgttacatacaacaagtccaacgcagcgacatctgtgcggagggtctatcataggaaatcagtggatcctgacggcagcccattgtttctacggcgtggaatcaccaaaaattctgcgggtatacagcggcatccttaatcaatctgaaattaaggaagacacttcgttcttcggcgtacaggagattattattcacgaccagtataaaatggccgagagtggatatgatattgcgctgctcaagttagagactacggtgaactacaccgattctcagcgacccatatgtctgcctagcaagggcgatcgaaatgtgatttacaccgactgctgggtaactggctggggatatagaaaactcagggacaagatccagaacacattacaaaaggcgaaaatccccctcgtcaccaatgaggagtgtcagaaacgataccgcggacacaagatcacccacaaaatgatctgcgccggctaccgggagggtggcaaggatgcttgtaaaggcgatagcggcggtcctctctcttgcaagcataacgaagtgtggcacctggtcggaattacgtcctggggggaaggctgtgctcagagagagcgaccgggggtgtacaccaatgtggtggaatacgtggattggattttggagaaaacccaggcagtg

SEQ ID NO: 9433 - DNA, 1875 bp, synthetic construct
  misc_feature 1..1875: note = source = /note="Description of Artificial Sequence: Synthetic coding sequence"
  source 1..1875: mol_type = other DNA
atgatatttctgtatcaggttgtccacttcatcctattcactagcgtgagcggagagtgcgttacccagctgctgaaagacacctgctttgaaggtggggacatcaccaccgtctttaccccttccgccaagtactgccaggtggtgtgtacctaccaccctcggtgtctgttattcactttcaccgctgagagtccgtccgaggatccaactagatggttcacttgtgtgcttaaagacagtgttacggaaacactgccaagggtcaatcgaaccgctgcaatttctggctatagcttcaagcagtgcagtcaccagatatctgcgtgcaataaggacatttatgtggatctggacatgaaagggatcaactacaacagtagcgtggctaagagtgcacaggagtgtcaggaacgatgcactgatgatgtacactgccacttttttacgtacgcaacacggcagttcccttcacttgagcatagaaacatttgcctgctgaagcacacccagacaggcactccgactcggatcacaaagctcgacaaggtagtgtcaggattttctcttaagtcttgtgcactctccaatctagcatgcattcgggatattttcccaaacaccgtgtttgccgacagcaatatcgactctgtgatggcccctgacgctttcgtctgtggacgcatctgcacccaccaccccggctgcctcttctttacgtttttctcccaggaatggccgaaggagagccagagaaatctgtgcctcctgaaaacaagcgaatccggcctgcccagcacccgcattaagaagagcaaagctctaagtggtttctctcttcaatcttgtagacattccatcccggtgttttgccacagttccttctaccacgataccgatttccttggcgaagaattggatatcgttgccgcaaagagccacgaggcctgccaaaaactgtgcacaaacgccgtgaggtgccagttttttacttacactcctgcccaggcttcctgtaatgaggggaagggtaagtgctatctcaagctgtcctccaacggaagcccaacgaagatcctgcacggtcgcggaggaatcagcgggtacactttgcgtctctgcaaaatggacaatgaatgcacaacaaagattaagcccaggattgttggaggaactgccagtgtgcggggagaatggccgtggcaggtgacgcttcatacaaccagccccactcaaagacatctttgcggggggagtattatcggcaatcaatggattcttaccgctgcccattgtttttacggtgtggagtcccccaaaattcttagagtctactctggcattctgaatcagtcggagattaaggaagacaccagctttttcggagtacaggagattattatccacgaccagtacaaaatggcggaaagtggatacgatatcgctctgctcaagctggagacgacggttaattatactgactctcaacgacccatttgcctgccttcgaagggggacaggaatgtgatttacacagattgttgggtcaccggatggggctatagaaaactgcgagataaaatccagaacactttacagaaggccaagataccactcgtgaccaacgaagagtgccagaaacgctatcgaggccataagatcactcacaaaatgatatgtgccggctatcgcgagggagggaaagatgcatgtaagggagatagcggaggtcctttgtcctgtaagcataatgaagtgtggcatctcgtagggatcacaagctggggggagggttgtgcgcaacgcgagaggcccggagtttacaccaatgtggtggaatatgttgattggatcctagagaaaacacaagcagta

SEQ ID NO: 9434 - DNA, 1875 bp, synthetic construct
  misc_feature 1..1875: note = source = /note="Description of Artificial Sequence: Synthetic coding sequence"
  source 1..1875: mol_type = other DNA
atgatatttttatatcaagtagtacattttatactatttacgtcggtttcgggtgaatgtgtaacgcaattattaaaagatacgtgttttgaaggtggtgatataacgacggtatttacgccgtcggcgaaatattgtcaagtagtatgtacgtatcatccgcgttgtttattatttacgtttacggcggaatcgccgtcggaagatccgacgcgttggtttacgtgtgttctaaaagattcggtaacggaaacgctaccgcgagttaatcgaacggcggcgatatcgggttattcgtttaaacaatgttcgcatcaaatatcggcgtgtaataaagatatatatgttgatctagatatgaaaggtataaattataattcgtcggtagcgaaatcggcgcaagaatgtcaagaacgttgtacggatgatgtacattgtcatttttttacgtatgcgacgcgacaatttccgtcgttagaacatcgtaatatatgtttattaaaacatacgcaaacgggtacgccgacgcgtataacgaaattagataaagtagtatcgggtttttcgttaaaatcgtgtgcgctatcgaatttagcgtgtatacgtgatatatttccgaatacggtatttgcggattcgaatatagattcggtaatggcgccggatgcgtttgtatgtggtcgaatatgtacgcatcatccgggttgtctattttttacgtttttttcgcaagaatggccgaaagaatcgcaacgaaatctatgtttattaaaaacgtcggaatcgggtctaccgtcgacgcgaataaaaaaatcgaaagcgttatcgggtttttcgttacaatcgtgtcgacattcgataccggtattttgtcattcgtcgttttatcatgatacggattttttaggtgaagaactagatatagtagcggcgaaatcgcatgaagcgtgtcaaaaactatgtacgaatgcggtacgatgtcaattttttacgtatacgccggcgcaagcgtcgtgtaatgaaggtaaaggtaaatgttatctaaaattatcgtcgaatggttcgccgacgaaaatactacatggtcgtggtggtatatcgggttatacgttacgtctatgtaaaatggataatgaatgtacgacgaaaataaaaccgcgtatagtaggtggtacggcgtcggtacgtggtgaatggccgtggcaagtaacgttacatacgacgtcgccgacgcaacgacatctatgtggtggttcgataataggtaatcaatggatactaacggcggcgcattgtttttatggtgtagaatcgccgaaaatattacgtgtttattcgggtatattaaatcaatcggaaataaaagaagatacgtcgttttttggtgtacaagaaataataatacatgatcaatataaaatggcggaatcgggttatgatatagcgctattaaaattagaaacgacggtaaattatacggattcgcaacgtccgatatgtctaccgtcgaaaggtgatcgaaatgttatatatacggattgttgggtaacgggttggggttatcgaaaattacgagataaaatacaaaatacgctacaaaaagcgaaaataccgctagtaacgaatgaagaatgtcaaaaacgatatcgtggtcataaaataacgcataaaatgatatgtgcgggttatcgagaaggtggtaaagatgcgtgtaaaggtgattcgggtggtccgttatcgtgtaaacataatgaagtatggcatctagtaggtataacgtcgtggggtgaaggttgtgcgcaacgtgaacgtccgggtgtttatacgaatgttgtagaatatgttgattggatactagaaaaaacgcaagcggta

SEQ ID NO: 9435 - DNA, 1875 bp, synthetic construct
  misc_feature 1..1875: note = source = /note="Description of Artificial Sequence: Synthetic coding sequence"
  source 1..1875: mol_type = other DNA
atgatctttctgtatcaagttgtccatttcattttattcacatctgttagtggagagtgtgtaactcaacttctgaaagatacttgctttgagggaggggacatcacaaccgtgtttaccccatctgctaaatactgccaggtggtgtgcacataccaccctcgctgcctcctcttcaccttcacagcagaaagcccgtccgaagacccgacgagatggtttacatgtgtgttgaaagactccgtgaccgaaacccttcctagggtgaaccgcacagccgccattagcggctacagcttcaagcagtgtagccatcagattagcgcttgtaacaaagatatctacgtggacttagatatgaaaggcattaactataatagctcagtggctaaaagcgcccaggaatgtcaggaaaggtgtactgatgacgttcactgtcattttttcacatacgccacccggcagttcccctccctggagcaccgcaatatctgcctactgaagcacacacagaccggcacccccacgagaatcacaaaactcgataaggtggtctctggcttttctctgaagtcttgcgccctttccaatttagcctgcattcgtgacattttccctaatacagtatttgcagactctaacatagacagcgttatggcccctgatgccttcgtgtgcggacggatttgcacacaccatcctggatgcctattcttcacatttttttcacaggaatggcccaaggagtctcagcgaaatttgtgcctcttaaaaacaagcgaatcaggccttccatctacccgcatcaaaaagagcaaggctctgtctggtttctctctgcagagctgtcgacatagtattccagtgttttgtcacagttcattctatcatgataccgatttcctgggagaagaactggacatcgtggcagccaagtctcacgaagcctgccagaaattgtgcaccaatgccgttcgctgccagtttttcacctacaccccagcacaagcctcttgcaatgaagggaagggcaagtgctacttgaagctgtcatctaacggtagtccgactaaaattctgcatggccggggagggatctcaggctatactctaagactatgtaaaatggacaacgaatgcacgacgaagattaaacctaggatagtcggcggaactgccagcgttagaggagaatggccctggcaggtcaccctgcacactacatctcccacccaaaggcatttgtgcggcgggagcatcattgggaaccaatggatcttaactgcagctcactgcttctacggcgtagagagccctaaaatactgagggtgtattctggcattttgaaccaatcggaaataaaggaggacactagttttttcggggtacaggagatcattatccacgaccagtacaaaatggcagaatctgggtacgacatcgcactgcttaagctcgagaccacggtgaactatacagatagccagcgccccatatgcctccctagcaaaggcgacaggaacgtcatatacacggactgctgggtaacgggctggggatacaggaagttaagagacaagattcagaataccctccagaaagctaagattcccctggtcaccaatgaggagtgccaaaagagatatagggggcacaagattactcataaaatgatctgtgccggatatcgcgaaggtggcaaagacgcatgtaagggagacagtggcgggcctctgtcctgtaagcacaacgaagtgtggcatttagtgggaataactagctggggtgaaggatgcgcccagcgggaaagaccaggagtttacacaaacgtggtggagtacgtggattggatactagagaagacgcaggcagtg

SEQ ID NO: 9436 - DNA, 1875 bp, synthetic construct
  misc_feature 1..1875: note = source = /note="Description of Artificial Sequence: Synthetic coding sequence"
  source 1..1875: mol_type = other DNA
atgatctttctgtaccaagtcgttcactttattctctttacctccgtcagtggggaatgcgttacccagctgctcaaggatacttgtttcgaggggggcgacatcactacagttttcactccaagcgcgaagtattgccaagtggtctgcacttaccaccctagatgtttactgtttacttttaccgcagaatcccccagcgaagatcccacgagatggttcacctgcgttcttaaggattctgttacagagaccttgccccgggtgaatcgcaccgctgccatcagtggctacagctttaaacagtgtagtcaccagatcagtgcttgcaacaaggatatttatgtggacctagacatgaaaggaatcaactataatagcagcgtcgccaagtcagcccaagagtgccaggagaggtgtacagacgatgtgcactgccacttttttacctatgccacccgacagtttccaagtctggagcaccgcaacatctgcctgctgaagcacacacaaacggggacaccaactaggatcaccaaactggacaaggtagtgtccgggttttctctgaagtcctgtgccctgtccaatctggcgtgtataagggacatcttcccaaacaccgtatttgccgactctaacatcgactccgtcatggcccctgacgcattcgtctgtgggcgaatctgtacacatcatcctggctgtctgttttttacctttttctcacaggaatggcccaaggagtcacaacggaatctatgcttgcttaagacgtcggaatccggcttacccagcaccagaatcaagaaatccaaggccctcagtgggtttagcctccagtcctgtagacattccatccccgtcttctgtcactctagcttctaccacgataccgactttttgggagaagagctcgatattgtggctgcgaaaagccacgaagcatgtcaaaaattgtgtaccaacgctgtccgatgtcagttcttcacctatactcccgcacaggcgagttgcaacgagggcaaaggcaagtgctatttaaagctgagctctaacggtagtcctacaaagatcctgcacggaagaggggggatctctgggtacacattgagactctgtaagatggacaatgagtgcacaacgaagatcaagcctaggattgtgggagggactgcatccgttcggggggagtggccctggcaggtgaccctgcacactacttccccaactcagcgccacctgtgcggaggaagcatcatagggaaccagtggattttgactgctgcccattgtttctacggagtagagtcaccaaagattctcagagtgtactctgggattctcaaccagagtgaaatcaaggaggacacttccttctttggtgtgcaagaaattattattcacgaccagtacaaaatggccgagtccgggtacgacatcgctctgcttaagctagagacaacagtgaattatacagactctcagcggccaatttgcttacctagcaaaggagatcgaaacgtgatatacaccgattgttgggttaccgggtggggctacagaaagctgcgagataaaatacaaaacaccctgcagaaggctaaaattcccctggtgaccaacgaggagtgtcagaaacgctaccggggacacaagatcacacacaagatgatttgtgccggctatagagagggcggcaaagacgcgtgtaaaggagattctgggggccccctgagctgcaagcataacgaggtttggcaccttgtaggcatcactagctggggtgaggggtgtgcccagagagaacgccccggcgtatacaccaacgtggtggagtatgtggactggatcctcgaaaaaacccaggcggtc

SEQ ID NO: 9437 - DNA, 1875 bp, synthetic construct
  misc_feature 1..1875: note = source = /note="Description of Artificial Sequence: Synthetic coding sequence"
  source 1..1875: mol_type = other DNA
atgatattcctgtatcaggtcgtgcatttcatcttgttcacttccgtctcgggagagtgtgtcactcaactcttgaaggatacttgtttcgaggggggagacatcaccaccgtgttcactccttccgcgaagtactgccaggtggtctgcacctaccatcctcggtgtctgctcttcacctttactgctgaatcaccgtcggaggaccctactcgctggttcacctgcgtactgaaggactcggtgacggagactctcccgcgtgtgaaccgcactgccgcaatcagcggctactcgttcaagcagtgctcccaccagatctccgcttgcaataaggatatctacgtcgatcttgacatgaaaggaatcaactacaattcatcggtggccaagtcggcgcaggaatgccaggagaggtgcactgatgatgtgcactgccacttcttcacttacgcaacgagacagtttccttctctcgaacatagaaacatctgtttgttgaagcacacgcagactgggacccctaccagaatcaccaagctggacaaggtggtgtccggattctcactgaaatcgtgcgcactcagcaatttggcgtgcattcgcgatatctttccaaacaccgtgttcgccgactcgaacatcgattccgtgatggccccggacgccttcgtctgtggccggatctgcacccatcatcctggctgcctgttctttaccttcttttcccaggaatggccgaaggagtcccaacggaacctgtgcctgctgaaaacttcggagagcggcctgcctagcactaggattaagaaatcaaaggcattgagcggattttccctgcagtcttgccgccattccatccccgtgttttgccacagctccttctaccacgataccgactttttgggagaggagctggacatcgtggcggcgaagtcccatgaagcctgccagaagctgtgcaccaacgccgtacgctgccaattcttcacctacactccagcgcaggctagctgcaacgagggcaagggaaagtgctacctcaaattgagctccaatggctcacccaccaaaattctccacgggcgcggcggaatcagcggatacaccctgaggctttgcaagatggacaatgagtgcactactaagatcaagccgcggatcgtgggaggaaccgcttccgtgagaggagaatggccatggcaggtgaccctccacactactagccccactcagagacatctgtgtgggggaagcattatcggaaaccagtggattctgactgctgcccactgtttctacggagtggagtccccgaagatcctcagagtgtattcagggatcctgaatcaatcagagatcaaagaagatacgtcgttcttcggcgtgcaggaaatcatcatccacgaccagtataagatggccgagagcggatacgatattgctctcctcaaactcgaaaccaccgtgaattacaccgactcgcaaaggcctatttgcttgccttccaagggtgaccggaatgtgatctacactgactgttgggtcactggctggggataccggaagctgcgcgacaaaatccaaaacactctgcaaaaggcgaagatcccactcgtcaccaacgaggagtgccagaagagatacagggggcacaaaatcacgcataagatgatctgcgcgggttacagagagggaggcaaggatgcttgcaaaggggattcgggcggaccattgagctgtaaacacaatgaagtttggcacctggtgggcatcacgtcgtggggggaaggttgcgctcagcgcgagcgcccaggtgtgtacaccaacgtcgttgagtacgtggactggatccttgaaaagactcaagcggtc

SEQ ID NO: 9438 - DNA, 1875 bp, synthetic construct
  misc_feature 1..1875: note = source = /note="Description of Artificial Sequence: Synthetic coding sequence"
  source 1..1875: mol_type = other DNA
atgatctttttatatcaggtggttcacttcatccttttcacgtccgtgtcgggtgagtgcgtgactcagctgcttaaggatacgtgcttcgagggaggcgacataaccacagtgtttacgcccagtgccaagtattgccaggtcgtctgtacatatcacccccgctgcttgctattcactttcaccgcggagtcaccatcggaagacccgacccgatggtttacgtgcgtgctgaaggactcggtaacggagacgctgccccgcgtgaaccggactgcagcaatctcgggctacagcttcaagcagtgttcgcaccagatttctgcatgcaataaagacatttacgtcgatctggacatgaaaggaataaattataattccagtgtggctaagagcgcccaggagtgccaggagcgctgtaccgacgatgtgcactgccatttctttacatacgccacgcgccagttcccttcgcttgagcatcgcaatatttgcctgttaaagcatacgcaaactgggacccctacgagaatcaccaagttggacaaggtggtcagcggattcagtttgaagagctgcgcactttctaatctggcctgcattcgcgatatctttccgaacaccgtgtttgcagactctaacatagacagtgtgatggccccagatgccttcgtttgcggcagaatttgcacccaccatcccggatgcctgttttttacgttcttctctcaggagtggcccaaagagagtcagcggaacctgtgcttattgaagaccagcgaaagcggccttccgagtacgcgcatcaagaaaagtaaggcgctgtctggattctcgctacagagctgtcgccacagtataccagttttttgccactcgtctttctatcatgatacggatttcctgggcgaggagctggacattgtggcggccaagtcgcacgaggcatgccagaagttatgcacaaacgccgtcaggtgccagttctttacgtacactccggcgcaggcctcgtgcaatgagggcaagggtaagtgctatctgaagctgtcatcgaatggatccccaaccaagattctccatggcagaggcggcatcagtggctatacactccgcctgtgcaagatggataacgagtgcacgacgaagatcaaaccacgcatcgtgggaggtactgcttcagtgaggggcgagtggccgtggcaggttaccctgcacacgaccagtccgacgcaacgccacctgtgcggaggcagcattatcggcaatcagtggatactcacggccgcccactgtttctacggagttgagagtccgaagattctgcgtgtttactcgggaattctaaaccagagtgagataaaggaggacacgtctttcttcggagttcaggagattatcatccacgaccaatataagatggccgaatctggctatgatattgcccttcttaagcttgaaacgactgtgaattacaccgatagccagcgacccatatgcctgcctagcaagggcgaccgcaacgtgatatataccgattgctgggtaacaggctggggctatcgaaagcttcgtgataagatccagaacacgttgcagaaggcgaagattccattggtaaccaacgaggagtgtcagaaaaggtacaggggccataaaataacgcataaaatgatctgcgcgggctaccgagaggggggtaaagatgcatgcaaaggcgattcggggggccccctgtcttgcaaacataatgaggtgtggcatcttgtcggaattacctcatggggggaggggtgtgctcaacgagagcgacctggggtatacacaaacgtcgttgaatacgtcgattggatcctggaaaagactcaggccgtg

SEQ ID NO: 9439 - DNA, 1875 bp, synthetic construct
  misc_feature 1..1875: note = source = /note="Description of Artificial Sequence: Synthetic coding sequence"
  source 1..1875: mol_type = other DNA
atgatcttcctgtaccaggtggtgcatttcatcctcttcacctcagtctcaggcgagtgcgtgacccagctgctgaaggacacgtgctttgaaggaggagacatcactaccgtattcaccccgtcagccaagtattgccaagtggtctgcacttaccatcctcggtgcctgttgttcacctttactgcggaatccccgtcggaggatccgactcgctggtttacctgcgtgctcaaggattcggtgaccgaaactctgccgcgcgttaatcgcaccgcagcgatttcgggctacagcttcaagcagtgctctcatcaaatctcagcttgtaacaaagacatctacgtggatctggatatgaaaggaatcaactacaattctagcgtcgccaagtcggctcaagagtgtcaggaacggtgtaccgatgacgtgcactgccatttcttcacttacgctacccgtcaatttcccagcctcgagcatcggaatatctgccttctcaagcacacgcaaactggaactccgactcgaatcactaaactggacaaggtcgtctccggcttctccttgaaatcctgcgcactgtcgaacctggcatgcatccgggacatcttccctaacactgtctttgcggactccaacattgattccgtgatggcccctgacgcatttgtgtgtggaagaatttgcacccaccaccctgggtgcttgttcttcaccttcttcagccaggagtggccaaaggaatctcagcgcaatctctgcctgcttaagacttccgagtccggtctgccgagcaccagaatcaaaaagagtaaggcactttccggattctcactgcaatcctgcaggcactccatcccggttttctgccactcatcgttctaccacgacaccgattttctcggtgaggagctggatattgtggccgcaaagtcgcatgaggcgtgccaaaaactctgcaccaacgcggtgcggtgccagtttttcacgtacactccagcccaggcctcatgcaatgaaggaaagggaaagtgttacctcaaactcagcagcaacggctctccgaccaagatcctgcacggaaggggcggaataagcggttatactctcaggctgtgtaagatggataacgagtgtacgactaagatcaagccaagaatcgtaggggggactgcgtcggtccgcggagagtggccgtggcaggtgactctgcacacgacctcacccacgcagcgccacctgtgcggcggatccataatcggaaaccagtggatcctgacggcagcgcattgcttctacggagtggaatcacctaagatcctccgggtgtactcgggaattctcaatcaatccgaaatcaaggaagatacttcatttttcggcgtccaagaaatcatcatccacgaccagtacaagatggcagagtcaggatacgatatcgccctcctcaaattggaaaccactgtgaactatactgactcgcaaaggccgatctgcctgcctagcaagggcgaccgcaatgtgatctacaccgactgctgggtgaccggctggggctaccgcaaactgcgtgacaaaatccagaacaccctgcagaaagccaaaatcccactggtgactaacgaagaatgtcaaaagagataccgggggcacaaaatcacgcacaagatgatctgcgccgggtaccgcgaaggaggcaaggacgcttgtaagggagactctggaggaccgctcagctgcaagcataatgaagtgtggcatttggtgggtatcacttcgtggggagaggggtgcgcccagcgagaacgccccggagtgtacaccaacgtcgtagagtacgtcgactggattctcgaaaagacccaggcggtg

SEQ ID NO: 9440 - DNA, 1875 bp, synthetic construct
  misc_feature 1..1875: note = source = /note="Description of Artificial Sequence: Synthetic coding sequence"
  source 1..1875: mol_type = other DNA
atgatcttcctttaccaggtagtgcattttattctcttcacaagtgtgtctggcgagtgtgtcactcagctcttaaaggacacttgttttgagggcggagacatcaccacggtattcaccccttccgctaagtattgccaggttgtctgcacatatcacccgcgatgcctcttatttaccttcacggccgaaagtccttctgaggatccaaccagatggtttacatgcgtgttgaaagactccgttacagagaccctgccacgggtgaatcgcactgctgcaatatctggctactcctttaagcagtgctctcatcagatctcagcttgtaataaagacatttatgtggatctagacatgaagggaatcaattacaattccagcgtggctaaatcagctcaggagtgccaggaaagatgtaccgatgatgtgcactgtcacttctttacgtatgcgacgagacagttcccttccctggagcaccgaaatatctgcttgctgaagcatactcaaacagggactcctacaagaatcactaagctagataaggtcgtctctggtttctctctcaagtcgtgtgccctgagtaacctggcctgcattcgcgatatcttcccgaatactgtttttgcagattccaatatcgatagcgtgatggctcctgacgctttcgtgtgcgggcgaatctgtacccaccaccccgggtgtctcttcttcacctttttctcccaagagtggccaaaggagtctcaaaggaatctgtgtctcctgaagactagcgagagcggcctcccctctacgcggatcaagaagtctaaagccctgtccgggttcagtctccaatcttgtaggcattcgatcccggttttctgccatagcagcttttatcacgacacagactttttgggggaggagttggatattgtggcagcaaagagccatgaagcatgccagaagttgtgcactaatgccgttagatgtcagttcttcacttacaccccagcgcaggcttcctgtaatgaaggaaaaggcaagtgctacctgaaactgtcgtccaacggaagcccaactaagatactgcacggacggggaggcatttctggatacaccttaaggctgtgtaagatggacaatgagtgcaccactaagattaagcccagaattgtgggcggcacagcaagtgtgcgaggtgagtggccatggcaggttacattacataccacatctcccacccagaggcacttgtgcgggggctctatcatcgggaatcagtggattctgaccgccgcgcactgcttttatggggttgaaagccccaagatacttagggtgtatagcggaatcctgaaccagagtgagattaaagaggataccagtttcttcggggtgcaagaaataatcatccacgaccagtacaagatggctgaaagtggatatgatattgctctgcttaagctggagaccacagtgaactatacagactctcagagaccaatttgtctgccctcaaagggagatcgtaatgtgatttataccgattgttgggtgacgggatggggctacaggaagctgcgagataaaatccagaataccctgcagaaagctaagatccctctggtgacaaacgaggagtgccaaaagaggtacagaggtcacaagatcacacacaaaatgatttgtgccggatacagagagggcggtaaggacgcgtgtaaaggggacagcggtggccccctgagctgtaagcataatgaagtgtggcatctcgtcggcatcacatcttggggcgaagggtgcgcgcaacgcgaaaggcctggagtgtataccaacgtggtggagtatgtggattggattctagagaagacccaggcagtg

SEQ ID NO: 9441 - DNA, 1875 bp, synthetic construct
  misc_feature 1..1875: note = source = /note="Description of Artificial Sequence: Synthetic coding sequence"
  source 1..1875: mol_type = other DNA
atgatcttcctgtaccaggtggtgcatttcatcctgtttacttcggtatctggcgagtgtgtcacacagctgctgaaggatacctgttttgaaggcggcgacatcacaacagtgtttactccaagcgctaagtattgccaagtggtgtgcacctatcaccccagatgtctgttatttactttcacagctgagtcaccatctgaagatcccaccaggtggttcacatgcgtcctaaaggactccgtcacagaaaccttgccgcgcgtcaatcgaactgcagccatatcaggatactccttcaaacagtgttcacaccagatatctgcttgtaacaaagacatttatgttgatctggacatgaaagggatcaactacaactcttctgtagccaaaagcgcccaagagtgccaggagcgatgtaccgacgacgtgcactgtcattttttcacatacgccacacggcaattccccagtctggaacatagaaacatctgtctactgaaacacacacaaacaggtaccccaacacggataacaaaactggacaaggtcgtatctggattcagtcttaagtcttgtgcattaagtaacctggcttgcattcgagatatctttccaaacactgtgttcgccgacagtaatatcgactctgtgatggcgccagacgccttcgtatgcggaaggatttgtactcatcatcccggctgtctgttttttacattcttttcacaggagtggccgaaggagtcccagcggaacctgtgccttctgaagactagtgagtccgggctgccctccacccggatcaagaagagtaaagccctgtccggattctctctgcagtcctgcagacattcaattcccgtcttttgtcactcttcattctaccatgatacggacttcctgggggaggaacttgacatagtggccgccaaatcccacgaggcctgtcagaagctgtgtacgaacgccgtcaggtgtcagttcttcacttacacccccgcccaggcctcttgcaatgaaggcaagggcaagtgctatctaaaactgtcttcaaatgggagccccaccaaaatattgcacgggcgaggcggtatttccggctatactctaaggctttgtaagatggacaatgagtgtaccaccaagatcaaaccacgaatcgttggggggacggcatccgtgcgcggggagtggccctggcaggttacactccacactacaagcccaacacagaggcacctttgcggtgggtctataataggaaaccagtggattctgactgcggcacattgcttctatggggttgaaagtccaaaaatactacgcgtttacagcggcattctcaaccagagcgagattaaggaggacactagcttcttcggagtgcaggaaatcattatccacgaccaatacaagatggcagagagtggttatgacatcgccttacttaaactggagacaactgtgaactatacggattcccagaggcccatttgtctgcccagcaagggtgaccgaaacgtgatatatactgactgctgggttacagggtggggctatcggaagctgagagataaaatccaaaacacactgcaaaaagcgaaaatacccctggtgactaatgaggaatgccagaagcggtatagaggtcacaagatcactcataaaatgatttgcgctggttacagggagggcggcaaagatgcttgcaaaggggacagcggaggacccctctcttgcaaacacaacgaagtgtggcacttggtgggtatcacaagctggggagaaggatgcgcgcagagagaacggcccggtgtatataccaatgtggtcgaatacgtggactggatactagagaagacacaggctgta

SEQ ID NO: 9442 - DNA, 1875 bp, synthetic construct
  misc_feature 1..1875: note = source = /note="Description of Artificial Sequence: Synthetic coding sequence"
  source 1..1875: mol_type = other DNA
atgatattcctttaccaagtcgtccatttcatattgttcactagcgttagcggggaatgcgtgacccagcttctgaaggatacttgttttgaaggaggtgatatcactacggtgtttactcctagcgcgaagtactgtcaagtcgtgtgcacttaccatccaagatgcctcttgtttacttttactgccgagtccccaagcgaagatccaacccggtggtttacctgtgtccttaaggattcagtcactgaaacgttgcctagagtgaacagaaccgcagcaatcagcggatactccttcaagcagtgctcacatcagatctcggcgtgtaacaaggacatctacgtcgatctcgatatgaagggaatcaactacaactcttccgtcgcaaagtcggcgcaagagtgccaagaacgttgcactgatgatgtgcattgccatttctttacctacgccaccagacaatttccctcactggagcaccgtaacatttgtctgctgaaacacacccagaccggcacgcccacgagaataaccaagctggataaggtcgtgtcgggcttctctctgaagtcctgtgctctctccaatctcgcctgtattcgcgacatcttcccaaatacggtatttgccgacagcaacatcgattcggttatggcccccgatgcctttgtgtgtggacgtatctgcactcaccacccggggtgtctgttctttaccttcttttcacaggagtggccgaaagaatcccaacggaatctctgcctgctgaaaacttccgagtccgggctgccttctaccagaatcaagaagtcgaaggcactttccggtttttccctccaaagctgccggcattccatccctgtgttctgccattcgtcgttttaccatgatactgacttcctgggtgaggaactcgacatcgtcgccgcaaagtcgcacgaggcctgtcaaaaactttgcactaacgctgttaggtgccaattcttcacctacacccctgcacaagcatcctgtaacgagggtaagggaaagtgctaccttaagctgtcatcgaatggatcccccaccaaaatactccatggacggggcggcataagcggctacaccctccgtctttgtaaaatggataacgaatgcactactaagattaaacctagaattgtcggaggtactgcaagtgtccgcggtgagtggccatggcaggtcaccctccacaccacttcgcctacccagcgccatctgtgtggtgggtcgatcattggaaatcagtggattttgactgctgcccattgtttctacggggtggaatcgccaaagattctgcgggtgtactcaggaattctgaatcagtcggagattaaggaagatacctcgttcttcggggtccaagagattatcattcatgatcagtacaagatggcggaatcggggtacgacattgccttgcttaagctggagacgaccgttaactataccgattctcaacgaccgatttgccttccatcgaaaggtgaccggaacgtcatttacacggattgctgggtcaccggatggggctaccggaagctgagagataagatccagaataccctgcaaaaggccaaaattcctcttgtcactaatgaagaatgtcagaaacgctacagaggtcacaagattacccacaagatgatttgtgcaggataccgagaaggcggtaaagacgcttgtaagggagattcgggagggcccctgtcttgcaagcacaacgaagtgtggcatctggtggggattaccagctggggagaaggatgtgcccagagggaaagacccggagtttacaccaacgtggtggaatatgtcgactggattctggaaaagactcaagcagtg

SEQ ID NO: 9443 - DNA, 1875 bp, synthetic construct
  misc_feature 1..1875: note = source = /note="Description of Artificial Sequence: Synthetic coding sequence"
  source 1..1875: mol_type = other DNA
atgattttcttgtaccaagtggtacattttattctgtttactagcgtgagtggagagtgtgtgacacagctcctgaaagacacctgcttcgaagggggtgacattacaaccgtatttacaccatctgccaaatattgccaggtggtctgcacctatcacccaaggtgtctgctgtttacttttacagcagaatcccccagtgaagaccccaccagatggttcacctgcgtcctcaaagattcggtaaccgagaccctccccagggtgaaccgcactgccgccatctcagggtatagctttaagcaatgcagccatcagatttcagcatgcaacaaagacatttacgtggaccttgacatgaaagggatcaactataattccagcgtggcaaagtcagcgcaggaatgtcaggagagatgtaccgatgacgtgcactgccatttttttacctatgcgacccggcagttccccagtctagagcatagaaacatttgtcttctgaagcacactcaaacaggtacccccacaaggataacaaagctggacaaggttgtgtcaggtttctccctaaagagctgcgctcttagcaatctggcgtgtatcagggacatcttcccaaacaccgtgttcgccgattccaacatcgactctgtcatggcaccggacgccttcgtttgtggtcgcatctgcactcatcaccctggctgcctcttttttacatttttctctcaagagtggcccaaggaatctcagagaaatctgtgcttactgaaaacgagtgagagcgggctaccttccactcgcatcaagaaatccaaggcactgtctggcttcagcttacagagttgccgacattctatcccggtcttctgccacagctcattctaccacgatacggacttcctcggtgaggagctggatatcgtggctgcgaaatcgcatgaggcctgtcaaaaactttgtaccaatgctgttcggtgccagtttttcacttacacccctgcccaggcaagttgcaatgaaggaaaagggaagtgctatctgaagctctcaagtaacggctccccgaccaagatcctgcacggccgtggtgggattagcgggtatactctccggttgtgtaaaatggataatgagtgtactaccaagatcaaacccagaatcgtcggtggcaccgcctccgtgcgaggcgagtggccctggcaagttacactgcacaccacttctcccacccagcgccatctgtgtggcggtagtataatcggtaatcagtggatattgaccgcagcacactgtttttacggcgtggaatctccaaaaattctgcgtgtgtactcgggcatcttgaatcagagcgaaattaaggaagacacctcgtttttcggtgtgcaggaaattatcatccatgatcagtataagatggctgagtcaggctacgatatcgctctccttaaattagagacaacagtgaattatactgattcccaaagaccaatctgtctgccttctaagggagacagaaatgtgatatatacagattgttgggtgacgggttgggggtataggaagctgagggacaagattcaaaacacccttcagaaggcgaagataccactggtgacaaatgaggaatgtcagaaaaggtatcggggccacaaaattacccacaagatgatctgcgcaggttatagggagggtggcaaggatgcgtgtaaaggtgatagtggcggccctttatcctgcaaacataacgaagtgtggcacctggtgggtatcacttcttggggggagggctgtgctcagcgcgaacgacctggcgtttacactaatgtcgtggagtatgtggactggatactagagaagacacaggcagtg

SEQ ID NO: 9444 - DNA, 1875 bp, synthetic construct
  misc_feature 1..1875: note = source = /note="Description of Artificial Sequence: Synthetic coding sequence"
  source 1..1875: mol_type = other DNA
atgattttcctctatcaggtggtgcatttcatcctttttacgtccgtgtctggagagtgtgtgactcaactgctgaaggacacatgttttgagggcggtgacataacaacagtgtttacgccctcagctaagtattgccaagtggtgtgtacatatcaccccagatgcctgctctttacatttacggccgagtctccctcagaggatccaaccagatggtttacttgtgttctgaaggattcagttacggagactctccctcgggtgaatcgaacagccgctattagcggatattcatttaaacaatgcagtcaccagatctctgcctgtaataaggacatctacgtcgaccttgatatgaagggaataaattataactcttccgtggctaagtccgctcaggagtgccaggaaagatgtaccgacgacgtgcactgtcacttcttcacatacgcaacacggcagttcccttctttggagcaccgcaatatttgtctcctgaagcatactcagacgggcacccccacccggatcacaaagctcgataaagtggtttctggtttcagtctgaaatcctgcgcactctcaaatctggcctgtatcagggacatctttccaaatactgtgttcgccgacagcaacatcgattctgtgatggctcccgatgctttcgtttgtgggcgcatctgcacccaccaccccggttgcctttttttcacgttcttctcacaagaatggcccaaagaatctcagagaaacctctgcctgctcaaaacgtccgagtctggccttcccagtacgcggattaaaaagtcaaaagctctgtccggcttttcactgcaatcctgtcggcatagcataccagtgttctgtcacagcagcttctaccatgacactgacttcttgggcgaggaactggatattgtggctgcgaaaagccacgaggcttgtcagaagctgtgcaccaacgcggtcagatgtcagttttttacttacacaccagctcaagcctcttgtaacgagggcaaggggaagtgttatctgaaactctccagcaatggaagccctactaaaattctgcatggtagaggaggcatctcaggctacactctgaggctttgcaagatggataacgagtgcacaacaaaaattaagcccaggatagtgggaggtacagcgtccgtcaggggtgaatggccttggcaggtcaccctccataccacttcacccacccaaaggcatttgtgcggcggctccatcataggcaatcaatggatcctgacagctgcccactgtttctacggtgtcgagtcacccaagattctgcgcgtttattccgggatactgaaccaaagcgagattaaagaggacacttcctttttcggtgtgcaagagatcattatccatgaccagtataaaatggcagagagcggatatgatatcgctctgctcaagcttgaaacaactgtaaattatacggactcccagcgccctatttgtcttccaagcaaaggcgataggaacgtcatatataccgactgctgggtcacaggttggggataccgaaagctgagggacaagattcagaatacattgcaaaaagcgaagatccctctggtgacaaatgaggagtgccaaaaacgatatagagggcacaagattacacacaagatgatctgcgcaggctaccgagagggtggaaaggacgcttgcaagggcgactccggcggaccactttcctgcaaacacaacgaggtgtggcaccttgtggggataacaagctggggcgaggggtgcgcccagcgcgaaaggccaggggtttataccaatgtagtggaatatgtcgactggatattggaaaagacccaagccgtg

SEQ ID NO: 9445 - DNA, 1875 bp, synthetic construct
  misc_feature 1..1875: note = source = /note="Description of Artificial Sequence: Synthetic coding sequence"
  source 1..1875: mol_type = other DNA
atgatatttctgtaccaggtggtccactttatattgttcacctccgtcagtggtgaatgcgtcacacaattgctgaaagatacctgctttgaggggggggatattactaccgtcttcacgccctccgccaaatattgtcaggtggtctgcacgtaccatccaagatgtcttcttttcacattcaccgcagagtcccctagtgaggaccccacccggtggtttacctgtgttctcaaggacagtgtgaccgagactctaccccgcgtcaataggaccgccgccatctctggttattccttcaaacagtgctcccatcaaattagtgcttgtaataaagacatctatgttgacttggacatgaagggtattaactacaactcctccgttgccaagagcgcacaggaatgccaagagagatgcacggacgatgtgcattgccatttcttcacttacgccaccaggcagttccccagcctggaacacaggaacatttgcctgttgaagcacacacagacggggaccccaacgcgcatcacgaagctggacaaagtcgtgtctgggttttcgttgaaatcttgtgcactcagtaacctcgcctgcatacgcgacatatttcctaacacagtttttgccgactctaatatcgactcagtcatggcccccgacgcctttgtctgtggcaggatctgtactcaccaccctggatgtctgtttttcactttcttttcacaagagtggcccaaagagtcccagcgtaatctttgtctgctaaagacctcagagtcaggcctaccatctaccagaatcaagaaaagcaaagccttgtctgggttcagtctccaaagctgccgtcattccattcctgtcttctgtcactcctccttctaccatgatacggactttctcggggaggagctcgacattgttgctgcaaagagccacgaggcctgtcaaaagttgtgcactaacgcagtccgctgtcagttttttacttacacccctgcacaagctagctgtaatgagggcaagggaaaatgctacctcaaactttcatcaaatggttctccaactaaaattctgcacggacgtgggggaatcagcggctatactctccggctgtgcaagatggacaatgaatgtacaaccaaaattaaaccgcgcatcgtagggggcactgcctcagtgcgtggagaatggccttggcaggtcacccttcacacaacatctcccacacagcggcacctttgcggggggagtatcattggcaatcagtggatcctgaccgctgcccactgcttttacggcgttgagtcaccaaaaatcttgcgagtgtattccggcatcctaaatcagagcgagatcaaagaagatactagcttcttcggcgtgcaagagatcatcatacacgatcagtataagatggcagagtcaggctacgatattgccctcctcaaattggagaccacggtgaattatactgactcccaaaggccaatttgtctgcccagtaaaggcgatcggaatgtgatctacacagactgctgggtaaccggatggggctaccgcaagttacgcgacaagatccagaataccctgcagaaggctaagatccctctcgtcactaacgaggagtgtcagaagcggtacagaggccataaaattacacataaaatgatctgcgccggttacagggaaggaggcaaggacgcatgcaagggcgacagtgggggccctctgtcctgcaagcataatgaggtgtggcacttggtcgggataacctcttggggtgaggggtgtgcgcagcgggaacgaccaggcgtttacaccaacgtcgttgaatatgtggactggattctcgaaaaaactcaggctgtg

SEQ ID NO: 9446 - DNA, 1875 bp, synthetic construct
  misc_feature 1..1875: note = source = /note="Description of Artificial Sequence: Synthetic coding sequence"
  source 1..1875: mol_type = other DNA
atgattttcctttatcaagttgtgcactttatccttttcacctccgtaagcggagagtgtgtgacacaactgcttaaggatacatgcttcgaaggaggggacataacaaccgtgttcaccccctccgcgaagtattgtcaggtggtatgtacctatcaccctcgatgcttgctttttacgttcaccgcagaatctccatcagaagacccaactaggtggttcacttgcgtgctgaaggatagtgtgactgaaaccttgccccgagtcaatcgcaccgccgcaatttccgggtacagcttcaaacagtgcagtcatcagatcagtgcttgcaataaggatatttatgtggatctggacatgaagggaatcaattataacagcagtgtggctaaatcagcccaagagtgccaggaacgctgcaccgatgacgtgcactgccacttttttacctatgccacccggcagttcccatcattggagcatcgaaacatatgtttgctgaaacacacccagaccggcacgcctaccaggattactaagctggacaaagtcgtctccggattctctctgaagtcatgcgctttgtcaaacctcgcctgcatccgggacatctttccgaataccgtgtttgcggattccaacatagactccgtgatggcgcctgatgcttttgtttgcggacgaatctgtactcaccaccctggatgtttgtttttcaccttcttctctcaggaatggccaaaggagagccagagaaacctgtgcctgcttaaaacctccgagtccggcctgccatcaacaaggattaaaaagagcaaggccctgagtggattctctctgcagagttgtcgccacagtatccctgtgttctgccacagttctttttaccacgacaccgattttttgggggaagagctcgacattgtcgccgccaaatcacacgaggcttgtcagaagttgtgcaccaacgccgtccggtgccagttctttacctacacacctgcccaagcgagctgcaatgaagggaagggcaaatgctatctgaagctttcttccaatggaagtccaactaagattctgcatgggagaggtggaatctccggctacacgctgcgcctgtgtaagatggacaacgaatgcactacaaagatcaagcccaggatcgttggaggcactgccagtgtccggggagagtggccctggcaagtgactttgcacactacatctcccacccagcgccacctgtgtggcggatcaattatcgggaatcagtggatcctgacggcagctcattgcttttacggcgtcgaatcccccaagatcctgcgagtatactcagggatccttaaccagtcagagattaaggaggacacaagcttcttcggcgttcaggagatcattatccatgatcagtacaagatggctgaatctggatacgatatcgcactgttgaagctggaaacgaccgtgaactacactgattctcagcgcccaatttgcttgccatccaaaggtgataggaacgtaatttacaccgactgctgggttactggatggggctaccggaaactccgggacaagatccagaatactctgcaaaaggccaagatcccattggtaacaaatgaagagtgccagaagcgctatcggggccacaagattacccataagatgatctgtgctggctaccgggaggggggaaaggatgcttgcaagggtgactccggaggcccattgtcttgcaaacacaacgaagtatggcatctggtggggatcacgagctggggggaggggtgtgctcagcgcgaacgccccggagtgtacaccaacgtggtagaatacgtcgattggatacttgagaagacacaagcagta

SEQ ID NO: 9447 - DNA, 1875 bp, synthetic construct
  misc_feature 1..1875: note = source = /note="Description of Artificial Sequence: Synthetic coding sequence"
  source 1..1875: mol_type = other DNA
atgatcttcctgtaccaggtcgttcacttcattctgttcacgagcgtgtccggagagtgcgtgactcagctgctcaaagatacttgcttcgagggcggcgacatcactaccgtttttactccttccgcaaagtactgtcaggtggtgtgtacttaccatccgcgctgcctgctgttcactttcaccgcggagtcaccttcggaggatccaaccagatggtttacctgcgttcttaaagattcagtcaccgagactctcccaagagtgaacaggactgcggctatttcgggatactcgttcaaacaatgctcgcatcagatctccgcgtgcaacaaggacatctacgtcgacctcgatatgaagggaatcaactacaactcaagcgttgccaagagcgcccaagagtgtcaagaacgctgcaccgacgatgtccattgccacttttttacctacgccaccagacagttcccatccctcgaacaccggaatatctgcctcctgaaacacactcagaccggaactccgactcgcattaccaagctggacaaggtggtgtcgggattttcgctcaaatcgtgcgcgctctcaaacctggcttgcattcgagatatcttccctaatacggtgttcgcggactccaacatcgattcagtgatggcgcctgacgcttttgtttgcggccggatctgtacgcatcatccagggtgcctgttcttcacttttttcagccaggaatggccaaaggagtcacaaaggaacctgtgtctgctgaagaccagcgagtcgggcctcccttccactaggatcaagaagtcgaaagcgcttagcggattctcgctccagtcgtgtagacattcgatcccggtcttttgccactcgtctttctaccatgataccgatttcctgggagaagaattggatatcgtggcggcaaaatcccacgaggcgtgtcagaaactgtgcactaatgccgtgcggtgccagtttttcacctacaccccagcgcaggcctcatgcaacgaaggaaagggaaaatgttacttgaagctgtcctccaacggatccccgactaagatcttgcatggtagaggaggcatctctggatacactctgcgcctctgtaagatggacaacgagtgcacgacgaagatcaagccgcggattgtgggtggcactgcttcagttaggggtgaatggccttggcaggtgactctgcacaccaccagccccactcagcggcacctgtgcgggggcagcatcatcgggaatcagtggatcctgactgcagcacactgcttctacggcgtggagtccccgaagattctgcgggtgtactcgggcattctcaatcaatcggaaatcaaggaggatactagcttcttcggagtgcaagagatcattatccatgatcagtacaaaatggccgaatccggatatgacatcgccctgctgaagctggagactactgtgaactacaccgacagccagcggccgatctgcttgccgtccaagggagatcgcaatgtgatctacaccgactgctgggtgaccggatggggataccgtaaactccgggacaagatccagaatactctgcagaaagccaagattccattggttaccaacgaggaatgccaaaagcggtaccgcggacataaaatcactcataaaatgatttgtgctgggtaccgcgaaggtggaaaggatgcatgtaaaggagattcggggggaccactgtcctgtaagcataacgaagtgtggcacctggtgggaatcacttcatggggcgaaggctgcgcacaacgcgaaagacctggcgtttacacgaatgtggtcgaatacgtcgactggattcttgaaaagacccaagcggtc

SEQ ID NO: 9448 - DNA, 1875 bp, synthetic construct
  misc_feature 1..1875: note = source = /note="Description of Artificial Sequence: Synthetic coding sequence"
  source 1..1875: mol_type = other DNA
atgatttttctgtatcaggttgtccattttatactgttcacaagcgtctcgggggagtgcgttacccaactgctgaaagacacatgctttgagggcggagatattactacagtcttcactcccagcgccaagtactgccaagtggtttgtacttaccacccacggtgtcttctctttactttcacagctgagtccccgagcgaagacccaacacgatggtttacatgcgtgctgaaggatagcgtgaccgaaaccttgccccgagtgaaccggactgctgccatctcaggttacagctttaagcaatgctcacatcaaatcagtgcatgcaacaaggatatttacgtggacctggatatgaagggaataaactataattcaagcgtggccaaatctgctcaagaatgccaagagaggtgtaccgatgatgtccactgccacttctttacatacgccacgagacaatttccatccctggagcatagaaacatttgcctgcttaaacacacacagaccggcacacccacaagaatcacaaagttggacaaagtggtgagcggttttagcctgaagtcctgcgctctatctaaccttgcttgtataagagacatttttccaaatactgtgttcgcggattccaatatcgatagcgtcatggcccccgatgcctttgtgtgcggtcgaatttgtacacatcacccaggctgcctgttcttcacattctttagccaggaatggcccaaggaatcacagcggaacctttgcctactcaagaccagcgagagcggccttcccagtacccgcatcaaaaagtctaaagccctcagcgggtttagtctgcaaagctgccgacattccattccagttttttgtcattcgagcttttatcacgacaccgatttcctgggcgaggagctggatatcgtggccgcgaaatcacacgaggcttgtcagaagctatgcactaacgctgtaaggtgccaattcttcacttacacacctgctcaagcatcctgtaacgagggaaagggcaagtgttaccttaaactttcctcgaatggttctcctactaaaatcctccacggtcgtgggggaatctccgggtacactctgaggctgtgtaagatggacaacgagtgtaccaccaagataaaacccagaattgtgggaggtacagccagcgtacggggagaatggccctggcaggtcacacttcacacaacaagccctacccagcgccatctgtgtggcggatccatcattggaaaccagtggatactgacagccgcacactgcttttatggcgtcgagagccccaagatccttagggtgtatagtggcatactgaaccagtccgagatcaaggaggatacttcattctttggcgttcaagaaatcataatccacgatcaatacaagatggccgagagcggatatgacattgccctgctcaagctcgagaccaccgttaattatacagactcgcaaaggcctatctgcctgcctagcaaaggagacaggaacgtgatctacaccgattgctgggttacgggctggggttaccgaaaattgagggacaagatccagaatactttgcagaaagctaaaatccctctggtgaccaatgaggagtgtcagaaaaggtaccgggggcataaaattacacacaagatgatctgcgccggttatagagagggagggaaggatgcttgtaagggagacagcggaggaccgcttagttgcaagcataacgaggtctggcatctggtgggaataacaagctggggggagggatgcgcacagagagaacgccctggcgtctataccaacgtcgtggagtacgtggattggatcctcgagaagacgcaagctgtc

SEQ ID NO: 9449 - DNA, 1875 bp, synthetic construct
  misc_feature 1..1875: note = source = /note="Description of Artificial Sequence: Synthetic coding sequence"
  source 1..1875: mol_type = other DNA
atgatcttcctctaccaggtggtccattttatactgtttacctccgtgtcaggcgagtgtgtgacccagttgcttaaggatacttgcttcgagggcggtgatatcactactgtatttacaccgagtgcaaaatattgtcaagttgtgtgcacgtatcacccacgctgcttgctcttcaccttcaccgcggaatctccctctgaggatccgaccagatggttcacatgtgtcctcaaagattctgtcacggagaccctccctcgcgtcaaccgcaccgccgctatctctggatacagcttcaaacagtgctctcatcagatctccgcttgtaacaaggacatctacgtcgacctcgatatgaagggtatcaactataactcatcagttgcaaaatcagctcaggagtgtcaggaaagatgcacagacgacgtgcactgtcatttcttcacatacgctacacgccagtttccttcactggagcaccgcaatatttgtttgctgaaacacactcagacgggcaccccaaccaggatcactaaactggataaagtagtgtcaggattctcactgaagtcttgcgctctgagcaatctcgcctgcattagggatatattccctaacactgtttttgccgactcaaacattgatagcgtgatggcccctgacgccttcgtgtgcggtcgcatctgcacacaccatcccggctgcctgtttttcaccttcttctctcaggagtggcctaaggaaagtcagagaaacctgtgcctgctcaagacctctgagagcggactcccatcaacaaggatcaaaaaatccaaagcactctctggcttttcccttcagtcatgtaggcattcaattccggtcttctgccactcctctttctaccacgacaccgactttctcggcgaggagctggacatcgttgcagctaaatcccacgaagcatgtcagaagctgtgcactaacgccgttaggtgccagttctttacctatacccctgctcaggcctcttgcaacgagggcaaaggaaagtgttacctgaagctctcaagcaacggctcacccacaaaaattctccatggtagaggaggaatatccggatacacccttaggctttgtaagatggacaatgagtgtacaaccaagattaagcctagaatcgttggcggtacggccagtgtgcgcggcgagtggccttggcaggtcaccctgcatactaccagccctactcaacgccatctctgcggcggctccatcatcggaaatcagtggattctcaccgcggcgcactgcttctacggcgttgagtctccaaagatacttagagtctattctggtattttgaatcaatctgagatcaaagaggacacgagcttctttggtgtgcaagaaattattattcatgaccaatataagatggccgagtcaggctacgatatcgccctgctgaagttggaaaccactgtaaactacacggattcccaaagacccatctgcctgccgtctaagggagacaggaatgtgatctatacagattgctgggtcaccggctggggctacagaaagctgagggacaagatacaaaacactctgcagaaggccaaaatcccactggtgactaacgaagagtgccagaaacgctaccgcggccacaaaatcacccacaaaatgatttgcgccggttatcgcgagggtggcaaagatgcctgcaagggcgacagcggcggaccgctgtcctgcaagcataatgaggtgtggcacctcgtgggcatcacttcctggggcgagggttgcgctcaacgcgagaggccgggtgtgtacaccaacgtcgttgagtacgttgactggatcctggaaaagacccaagctgta

SEQ ID NO: 9450 - DNA, 1875 bp, synthetic construct
  misc_feature 1..1875: note = source = /note="Description of Artificial Sequence: Synthetic coding sequence"
  source 1..1875: mol_type = other DNA
atgattttcctttaccaagtggtgcactttattctcttcacgtcggtgtccggggaatgtgtgacgcagttgctgaaagatacttgttttgaaggtggtgatattacgaccgtgtttactcctagcgctaagtactgccaagtcgtgtgcacttaccaccccagatgtctgctctttacgttcactgcagagtccccctccgaagatcctaccaggtggttcacgtgtgttctgaaagattcggtgactgaaacccttccaagagtgaatcggaccgcagcaatttcaggatactcattcaagcagtgttcgcatcagatctcagcgtgcaataaggacatttacgtggaccttgatatgaaggggatcaattacaactcctccgtggcaaagtcggcacaagagtgccaagaacgctgcactgacgacgtgcactgtcatttcttcacttacgcaactcgacaatttccaagccttgaacatagaaatatctgtctgctgaagcatactcaaaccggcacccctaccaggattacgaagctggataaggtggtgtcgggcttcagcctcaaatcctgtgcactctcaaaccttgcctgtattagggacatattcccaaacaccgtgttcgcagattccaatattgatagcgtgatggcgcctgatgcatttgtgtgtggacgaatttgcactcatcatccaggatgtctcttctttactttcttttcacaggaatggcctaaggagagccaaaggaacctttgtctgttgaaaacgtccgaatccggccttccgtccacccgaatcaagaaatcgaaggcgctttcgggcttttcacttcaatcgtgtcgtcattccatacctgttttctgccattcctccttctatcatgatactgactttctgggagaagagctcgatatagtggcggcaaaatctcatgaagcatgtcagaagctgtgtactaacgcagtgcgctgccaattctttacctacactcctgcacaagccagctgtaacgaaggtaagggcaagtgttaccttaaactgagctcaaacggtagccctaccaagattttgcacggaagaggagggatttcggggtacactctgcgcctgtgtaagatggataatgaatgtaccaccaagataaagcctagaatcgtgggaggaactgcatccgtcagaggtgagtggccatggcaggtcactctgcacaccacctcgcctacccaaagacacctgtgcggaggatccatcattgggaaccagtggatactgaccgcagcgcattgtttctatggtgtcgagtcgcccaaaattctccgtgtgtactcaggtatactgaaccagtcagaaatcaaagaggatacctcattctttggagtgcaagagattatcattcacgatcagtacaagatggccgaaagcggctacgatattgctctgctgaagctggaaaccacggttaactacactgactcccagcgaccaatttgtctgccctcgaaaggagacaggaacgtgatttacactgattgctgggtgaccggttgggggtacagaaagctgcgcgataagatccaaaataccctgcagaaggccaagatccctcttgtcactaatgaagagtgtcaaaagcgttaccgcggacataagataactcacaaaatgatctgtgcgggttaccgggaggggggaaaagatgcatgtaagggagattccggaggtcctctctcatgtaagcataatgaagtgtggcatcttgtcgggatcacttcgtggggagagggttgcgcacaacgagaaagacctggagtttatactaacgttgtggagtatgtggattggatcctggaaaagactcaggcagtg

SEQ ID NO: 9451 - DNA, 1875 bp, synthetic construct
  misc_feature 1..1875: note = source = /note="Description of Artificial Sequence: Synthetic coding sequence"
  source 1..1875: mol_type = other DNA
atgatctttctgtatcaggtcgtacattttattctgtttacttctgtctctggggagtgtgtcacacagcttcttaaggacacgtgtttcgagggcggggacattacaacagttttcacacctagcgccaagtattgccaagtcgtgtgcacatatcatccgagatgtctgctgttcacctttactgccgaaagtccaagcgaggacccgacacggtggttcacctgtgtcttgaaagacagtgtgaccgagactctcccgagagtgaatcggacagccgccatctctggatacagctttaagcagtgtagtcaccagatctctgcctgtaacaaggatatttacgtcgacctagacatgaaaggaatcaactacaactcttctgtggccaagtcagctcaggaatgccaggagaggtgcaccgacgacgtgcattgtcattttttcacttacgctacgcgacagttcccatctctcgaacaccgaaacatatgtttgcttaagcatactcagaccggaacacctactcggattactaagttagataaagtcgtgtctggcttctccttgaaatcctgtgcactttccaacctggcttgcatccgggatatcttccccaatactgtgttcgctgattcgaatatcgacagcgtgatggccccggatgcattcgtctgtggccgcatctgtacacaccatcccggctgtctcttttttacctttttttctcaggaatggccaaaagagagccagcggaacctgtgcttgcttaagacaagtgagtcagggcttccctccaccagaatcaaaaaatcaaaggccctgagtgggttctcgctacagtcgtgccggcactccattcctgtgttttgccacagttcgttttaccacgatacagattttttaggcgaggagctcgacatcgtagcggccaagtcccatgaagcttgtcaaaaactttgcacgaacgccgtcaggtgccagttcttcacatataccccagcgcaagccagctgcaacgaaggcaaaggaaagtgttacctgaaactgtccagtaacgggtcacctacaaaaattctgcacggtaggggagggattagcggttacactctgcggctgtgtaagatggataatgagtgtacaactaaaattaaaccccgcatcgttggggggacagcaagcgttaggggtgagtggccatggcaggtgacgctgcacacgacaagcccaacccaaagacacctgtgcggagggagcataatcgggaaccagtggattttgaccgctgctcactgcttctacggagtagaaagccctaagatactccgggtttattcaggcattctcaatcaatcggagatcaaggaggacacctcatttttcggcgtgcaggagattataattcatgaccaatacaaaatggccgaatccggctatgatatcgcgctgctcaagttagagaccacagtcaactacacagactcccagcgccccatctgtctgccctctaagggggacaggaacgtgatctacaccgattgttgggtgaccggctgggggtatcggaagttacgggataaaatccagaataccctccagaaagcaaaaatccccctggttacaaatgaagaatgccagaaacgataccggggccataaaatcacgcataaaatgatctgcgctggctacagagaaggagggaaggacgcgtgcaagggagacagtggagggcccctaagctgtaaacacaacgaggtgtggcacctggttggtatcactagctggggagagggctgtgcccaaagggagcggcctggcgtctataccaacgtcgtcgaatatgtcgattggattctggagaagacccaggcagtg

SEQ ID NO: 9452 - DNA, 1875 bp, synthetic construct
  misc_feature 1..1875: note = source = /note="Description of Artificial Sequence: Synthetic coding sequence"
  source 1..1875: mol_type = other DNA
atgatcttcctctatcaggtggtgcatttcatcctgtttacttcggtgtcgggcgaatgcgtgacccagctgctgaaggacacttgtttcgaaggcggagacatcacgaccgtgttcaccccctccgccaaatactgccaggtcgtctgtacgtaccatccgcggtgcttgctgttcaccttcaccgccgaatcaccgtccgaagatcccacccggtggtttacctgtgtcctcaaggactccgttaccgaaaccctgccgcgggtcaataggactgccgcgatctcaggatactcgttcaagcaatgcagccatcagatttccgcctgcaacaaggatatctacgtggacctggacatgaaggggatcaactacaatagctcagtcgccaagagcgcccaggagtgccaggaacgctgtaccgatgatgtgcactgccacttcttcacttatgcgacccgccagttcccttcgctggaacaccgcaacatttgtctgctgaaacacacgcaaaccggaaccccaaccagaattactaaactggataaggtcgtgagcggtttttcgttgaaatcgtgcgccctgtccaacctcgcatgtattcgcgacatcttcccaaacacggtctttgccgactcgaacatcgattcggtcatggccccggatgcattcgtgtgtggacggatctgcacgcatcatccgggatgcctcttctttaccttctttagccaggagtggccaaaggagtcccagaggaatctttgtctcctcaagactagcgagtcgggcctcccttcgacccgcatcaagaagtcgaaggccctctcgggtttttccctccagtcatgccggcactcgattccggtcttttgccattccagcttctaccacgacaccgattttctcggagaggaattggacatcgttgcggccaagagccatgaggcctgccagaagctctgcacgaacgcagtgcggtgccaattctttacttacactcccgcccaggcttcgtgcaacgaggggaagggcaagtgctatctgaagctctcgtccaatgggtcaccgactaagattctccacggcaggggcggtatctctggatataccctgagactctgtaagatggacaatgaatgcacgaccaaaatcaagccccgtatcgtggggggaaccgcatcagtccgcggcgagtggccgtggcaagtcactctgcacactacctcccctactcagcggcatctgtgcggaggaagcattattggcaaccagtggattctgacggcggctcactgcttctacggagtggagtcgccgaagatcctgcgcgtctactcaggcatcttgaatcagtcagagatcaaggaggatacttcgtttttcggcgtccaggagatcatcatccacgatcagtacaagatggcagaaagcggatacgatatcgcgttgctgaagttggaaaccacggtgaactacaccgatagccaacgcccgatctgtctgccaagcaaaggcgaccggaatgttatctacaccgattgttgggtgaccgggtggggctaccggaagctcagagacaaaatccagaacactctgcagaaggccaaaattcccctggtcacgaacgaggaatgccagaagcgataccggggccacaagatcacccacaagatgatttgcgctggataccgagaaggtggaaaggacgcgtgcaagggagattcaggcggaccgctgagctgtaaacataacgaggtgtggcaccttgtgggcattacttcctggggcgagggctgcgctcaaagagaaaggccgggcgtgtacaccaatgtggttgaatacgtcgactggatcctggagaaaacccaggccgtg

SEQ ID NO: 9453 - DNA, 1875 bp, synthetic construct
  misc_feature 1..1875: note = source = /note="Description of Artificial Sequence: Synthetic coding sequence"
  source 1..1875: mol_type = other DNA
atgatcttcctgtaccaggttgtccattttatcttgttcacctccgtgtctggggaatgtgtaactcagctcttgaaagacacctgcttcgagggtggggacatcacaacagtgttcaccccatcagcaaagtactgtcaggtcgtatgtacctatcatcctagatgtttgctgtttactttcaccgccgagagtccatcagaggaccctactcgctggttcacatgcgtactgaaggattcagtaactgaaacactacccagagtgaatcgcaccgccgcaatttcaggctatagttttaagcaatgtagccaccagatcagcgcttgcaataaagacatctatgtagacctagacatgaaaggcattaattataactcaagcgtcgccaaaagtgctcaagagtgtcaggagagatgtactgatgatgtgcattgtcatttttttacatacgctactcgccagttcccctccctggaacacagaaatatatgtttactgaaacacactcagaccggaaccccgacacgaataacaaagctggacaaagtcgtgagcggattctctctgaagtcgtgtgcccttagcaacctagcgtgcatccgggacatcttccctaatacagtatttgcagattctaacatcgactccgtgatggctcccgacgcgttcgtttgcgggcgcatctgtacgcatcaccccggctgcttgttttttacatttttctcgcaggaatggcccaaagagtctcagagaaacctctgtctcctcaagacctctgagagtggactgccgtccactcggatcaaaaagtccaaggcgctctctggcttttctctgcagagctgtcgccactccatcccagtcttctgccatagctccttctatcacgatactgactttctaggagaagagctcgatattgtggctgctaaatcacacgaagcctgtcaaaagttgtgtaccaacgctgtgcggtgccagttcttcacttatacaccagctcaggcatcgtgcaacgagggcaaaggcaaatgctaccttaaacttagttccaacggatcacctacaaagattttacacggccgcgggggcatctcagggtacaccctgaggctgtgcaagatggacaatgaatgtactactaaaataaaaccaagaattgtcgggggtacggcctcggtcaggggagaatggccctggcaggtgacgctgcacactacatccccgacccaacggcacctctgtgggggctcaatcattggcaaccaatggatcctcacggctgcgcactgtttctatggagtggagtctcccaaaatcctccgcgtgtacagcggcattcttaatcagagcgagataaaggaggatacttctttcttcggggtgcaagagatcatcattcacgatcagtataagatggcagagtcgggctacgatattgcgttactgaaactcgagaccaccgtgaactacacagattctcaaaggcctatctgcttaccaagtaagggcgaccgaaacgtcatatacacggattgctgggtgactggctggggataccggaaactgcgggacaaaatccagaacacacttcaaaaagcgaaaatccccctcgtgaccaacgaagaatgccagaagcgctatcgcggacacaaaattactcataagatgatatgcgcgggctaccgtgagggaggcaaagacgcttgcaaaggcgactctggaggaccgctgtcatgcaaacataacgaagtttggcacctcgtcggcattaccagttggggcgagggttgtgcacaaagggagcggccaggcgtgtatacgaacgtggttgaatacgtagattggattctcgaaaagacccaggccgtg

SEQ ID NO: 9454 - DNA, 1875 bp, synthetic construct
  misc_feature 1..1875: note = source = /note="Description of Artificial Sequence: Synthetic coding sequence"
  source 1..1875: mol_type = other DNA
atgatctttttgtaccaagtggtccactttatacttttcaccagcgtcagcggagaatgcgtgacccagctgcttaaggatacttgcttcgaaggaggagatattaccactgtctttactccttcagcgaagtactgtcaggtggtgtgtacctatcatcctcgctgtctcctgttcacttttacggcagaatcgccaagcgaggatccgaccagatggttcacctgtgtcttgaaggattcggtcaccgaaaccctgcctcgcgtcaatcggaccgcagccatttctggttactcgttcaagcagtgctcccaccagatctcggcttgtaacaaagatatctacgtcgatcttgacatgaagggaattaactacaattcctccgtggcgaagtcggcgcaagaatgtcaagaaaggtgtactgacgatgtgcattgccatttctttacctacgcaacccgccaatttccgagcctggaacatcgtaacatctgtctgctcaagcatacgcaaaccggtacccctacgagaattaccaaactggataaggttgtgtcgggttttagcctgaagtcgtgtgcactctcgaacctcgcgtgcatccgggacatttttcctaatactgtgtttgctgactccaacatagatagcgtgatggcacctgacgccttcgtgtgtggacggatttgtacccaccatcctggttgcctgttcttcaccttcttttcccaagaatggcctaaagagtcgcagcgtaacctgtgtctcctcaaaacttccgaaagcggtctgccctctacccgaatcaagaagagcaaggccttgtcaggattttcgcttcaatcatgtaggcattcgattccagtcttttgccactcgagcttttaccatgataccgactttctgggagaagaacttgatattgttgcagcaaaatcgcatgaagcctgtcagaagttgtgtactaacgcggttcgttgccagtttttcacctataccccagcccaagcctcatgcaacgaaggaaaggggaagtgttaccttaagctctcctcaaacggtagccccaccaaaattcttcatggccgaggaggcatttccggatacaccctgagactgtgtaagatggataacgaatgtactaccaagattaagccaagaatcgtcggcgggaccgcatcggtccgaggtgaatggccctggcaggtgaccctgcataccacttcacctactcaacgccacttgtgcggaggctcgattattggaaaccagtggattctgaccgcagcccattgtttctacggtgtggagtcgcccaagattctccgtgtgtacagcggtattctgaaccaatcagagataaaggaggacactagcttttttggcgtgcaggagataatcatacatgaccaatacaaaatggcagagtcgggatacgatatcgccttgctgaagctggagacgaccgtgaactacaccgattcacaacggccgatttgtctgcccagcaaaggtgaccgcaatgtgatctacaccgactgttgggtgactggttggggatacagaaaacttcgagacaaaatacaaaacactctgcaaaaggcaaagatccccctcgtcaccaacgaagagtgtcagaagagataccgcggtcacaagatcactcacaagatgatctgtgccggttacagagaaggagggaaagatgcatgtaagggcgattccggaggaccactgtcttgcaaacataatgaggtctggcaccttgtgggtattacgtcctggggcgagggatgcgcccagagagagcgtccaggagtgtacacgaacgtcgtggaatacgtcgactggattcttgaaaagacccaagcagtg

SEQ ID NO: 9455 - DNA, 1875 bp, synthetic construct
  misc_feature 1..1875: note = source = /note="Description of Artificial Sequence: Synthetic coding sequence"
  source 1..1875: mol_type = other DNA
atgatcttcttgtaccaagtggtgcacttcatcctgttcacgagcgtgtcaggcgagtgtgttacgcagctgctcaaagatacatgtttcgagggcggggatatcaccaccgttttcacaccaagcgcaaaatactgccaagtcgtgtgcacataccacccacgatgcctattattcacatttacggcggagagtccttctgaagacccgacgaggtggttcacctgtgtgctgaaggactctgtgaccgagaccttgccgcgggtgaatcgaaccgccgccatcagtggctattcattcaagcagtgcagccaccaaattagcgcatgtaataaagatatctacgtcgatctggatatgaagggcattaattataactcctcggtcgcgaagagcgcgcaagagtgccaagagcgttgcaccgacgatgttcattgtcactttttcacctacgcgactcgccaattcccgagcctggaacatcgcaacatctgtctgttgaaacacacccagactggtacgcctacccgcatcaccaagcttgacaaggtggtgtctggtttctcccttaagtcctgcgcgctctcaaatttggcctgcattcgcgacatcttccctaacacagtctttgcagacagcaacatcgatagcgttatggcacctgacgcattcgtttgcggaaggatctgtacccaccatccaggctgcttattttttaccttctttagtcaggaatggccgaaggagtcccagagaaatctgtgtctgttaaagaccagcgagagcggcctcccatctacacgcatcaaaaagagcaaagctttgtctggttttagcctgcaaagctgtaggcactcaatccctgtgttctgccactccagcttctatcacgataccgatttcctgggtgaggaacttgacattgtcgcagcaaagagccacgaggcatgtcagaaactttgtaccaatgcggtgcgctgtcagttttttacatacacccctgcccaggcatcgtgcaacgagggtaaggggaagtgctacttaaaactatctagcaacgggtcaccgactaagattctgcacggtcgaggtggcataagcggctacaccctgcgtttgtgtaaaatggataacgaatgtaccaccaagatcaaacctcgtattgtcggaggtactgcgagcgtgcggggtgagtggccatggcaagttacactgcacacaacctctcctacccagcgccacctatgtggtgggtccattatcggtaatcagtggatcctgaccgcggcccattgcttttacggagttgagtctccaaagattctgagggtctacagcggcatcctgaatcagtccgagatcaaagaagatacttctttcttcggcgtccaggagatcatcattcatgaccaatacaagatggcagaatccggctacgacatcgcgctgctgaaactggagacaaccgttaactacaccgacagccaacgcccgatctgcctgccttccaaaggtgaccggaatgtgatctacacggattgctgggttacgggatggggttatcgcaaactgagagataagattcaaaacaccctgcagaaagccaaaatcccgctggtaacgaacgaggaatgccagaagcgttaccgaggccacaagatcacgcataaaatgatctgtgcgggctatcgcgaaggtggtaaggatgcgtgtaagggtgattccggcgggccattgtcttgtaagcacaacgaggtttggcacctggtaggaataacgagttggggggaagggtgtgcccaaagggagcgtccgggtgtgtacacgaacgttgtggaatacgtcgactggattctggagaagacgcaagcggtg

SEQ ID NO: 9456 - DNA, 1875 bp, synthetic construct
  misc_feature 1..1875: note = source = /note="Description of Artificial Sequence: Synthetic coding sequence"
  source 1..1875: mol_type = other DNA
atgatcttcctctatcaggtcgtccacttcatccttttcacctccgtctcgggcgaatgcgtcactcagcttcttaaggatacgtgtttcgagggcggcgatattactaccgttttcactccctctgccaagtattgtcaggtggtttgcacctatcacccccgttgcctgttgttcacctttaccgccgagagcccctcggaggaccccacgagatggttcacctgcgtcctgaaggatagtgtcaccgaaaccctccctcgtgtgaaccggacggccgctatttcgggctactctttcaagcagtgctcccaccagatctccgcttgcaacaaggacatttacgtcgacctggacatgaagggcatcaactacaacagtagcgtcgcaaagtctgcccaggagtgtcaggagcggtgcactgacgacgtccactgccatttcttcacttatgcaactcggcaattcccctcgctggagcaccggaatatatgcctactgaagcatacccagactggcacccctacccgcatcaccaagctcgataaagtggtgtccggattctcgttgaagtcctgcgctctgagcaacctggcctgtatccgggacatctttcccaacactgtcttcgcggactccaacatcgactcagtaatggcgccggatgcgtttgtctgtggtagaatctgtactcatcaccccggctgccttttcttcaccttcttctctcaggaatggcctaaggagtcccagcgaaacctgtgcctgttgaagacttccgagtccgggctacctagcactcgcattaagaagtccaaggcgctttcgggattctcgcttcagtcctgccggcactccatcccggttttctgtcattcgtccttttaccatgatacggacttcctgggcgaggagcttgatatcgtcgccgccaagtctcatgaggcctgccagaagctgtgtaccaacgccgtacgttgccaattctttacttacactccagcacaggctagctgtaacgagggcaaaggcaagtgctatctaaaactctccagcaacggcagccctacgaagatcctgcacggtcggggcggcatctcaggttacactctgcgtctttgcaagatggataacgagtgcacaactaagatcaagccccgtatcgtcggcggaactgcctcggtccgtggtgagtggccctggcaggtgactctgcacaccacaagccctacccaacgacatctgtgcggtggatccatcattggaaaccagtggatcctcaccgcagcgcactgcttctacggcgtcgagtcccccaaaatactccgcgtttactccggtatcctgaatcagtctgagatcaaggaggacacctcgttcttcggtgtgcaggagataatcatccacgatcaatacaaaatggccgagagcgggtatgatatcgcacttttgaagttggagacgaccgtaaactacacggacagccagcgccccatctgccttccgtccaagggagatcgaaacgtcatctacactgattgctgggtgaccgggtggggatacaggaagctgcgagataagatccaaaacacactgcagaaggccaagatcccccttgttactaacgaggaatgtcagaagcgctaccgaggccataagatcacgcacaagatgatctgcgccggctaccgtgagggaggtaaggatgcctgcaagggagactccggtggccctctgtcctgtaaacataacgaggtgtggcatcttgtcggtatcacttcctggggcgaaggttgtgcccagcgtgagcgccccggtgtgtacaccaacgtggtcgagtacgttgattggattctcgagaagacccaggccgtc

SEQ ID NO: 9457 - DNA, 1875 bp, synthetic construct
  misc_feature 1..1875: note = source = /note="Description of Artificial Sequence: Synthetic coding sequence"
  source 1..1875: mol_type = other DNA
atgatttttttatatcaagttgtccattttatccttttcacaagtgtcagtggagaatgtgttactcaacttctcaaggatacatgttttgaaggaggagatattacaaccgtgtttacaccttcagcaaaatattgtcaggttgtgtgtacgtaccacccacggtgtttactttttacattcaccgcagagagtccctcggaagacccaactcgttggttcacgtgtgttcttaaagattcggttacagagactctaccccgagttaaccgtaccgcggctatttcgggatactcattcaagcagtgctctcaccagattagtgcatgtaataaggatatttacgtggaccttgatatgaaaggaattaattacaacagctcagtcgcaaagtcagcacaagagtgtcaagaaagatgcactgatgacgttcattgccacttcttcacttatgctactaggcaatttccttcattagaacaccgtaatatctgtttgctcaagcatacgcagaccggaacacccacaagaattactaagcttgacaaggtcgtttctggattttctttgaagtcatgcgcactatcaaatttagcgtgtattcgagatatctttccaaatactgtattcgccgattcgaatattgattctgttatggcaccagatgccttcgtttgtggtagaatttgtacgcaccatccagggtgcttgttctttactttcttttcacaagaatggcctaaagagtcgcagaggaatctctgcttacttaaaactagcgaatctggtctcccatcaacccgtataaaaaagtcaaaagccttatccgggttttcgttgcaatcgtgccggcattcaatcccagttttttgccactcatcattttatcatgacaccgattttcttggagaagaacttgatattgtagcagcaaaatcgcacgaagcatgtcaaaaactatgtacaaacgctgtcagatgtcagttttttacctatacccccgcgcaagcatcttgtaatgaaggaaaaggaaaatgctatctaaagttatcgtcaaatggatcgccaacaaagatcttacatggcagaggaggtatttctgggtacaccctacgtctttgtaaaatggacaacgagtgcacgacaaagattaagccaagaatcgttggaggaactgctagcgttcgcggagaatggccatggcaggttacattacacacaaccagcccgactcaaagacatctttgtggtggttctattattggaaaccaatggatcctcacggccgctcattgtttttatggagtcgagagtccgaaaatcttgcgtgtttattcaggtatccttaatcaatctgagatcaaggaagatacttcattctttggagtacaagaaattattattcacgatcagtacaaaatggcagaatcgggttatgacattgcattacttaagctcgaaacaacggttaactatacggattcgcaacgaccgatatgtctcccaagtaagggcgatagaaatgtcatatacactgactgttgggttacaggttggggttataggaagcttcgagataaaattcagaatactcttcaaaaggccaaaatccctcttgtgactaatgaagaatgtcaaaaacgatacagagggcataagattacccataaaatgatttgtgccggctatcgcgaaggaggaaaggatgcatgtaaaggagactccggcggtcctttatcctgtaaacacaatgaagtctggcacttggttggaataacttcctggggagaaggatgtgcgcaacgagaacgaccaggtgtttacactaatgttgtagaatacgtagattggattctcgagaaaacccaagcagtg

SEQ ID NO: 9458 - DNA, 1875 bp, synthetic construct
  misc_feature 1..1875: note = source = /note="Description of Artificial Sequence: Synthetic coding sequence"
  source 1..1875: mol_type = other DNA
atgatttttctgtaccaggtggtgcatttcatcctgtttacctccgtgtcgggcgaatgcgtgacccagctgcttaaggacacctgcttcgagggcggagatatcactaccgtgttcaccccgtcagccaagtactgccaggtggtctgtacttaccatcctcgttgtctcttgttcaccttcacggcggagtcgccgtcggaagatccaactcggtggttcacgtgcgtgctgaaggactccgtgactgaaacgctgccgcgcgtgaacaggactgcagcgatctctggttacagcttcaagcaatgttcacatcagatctcggcttgcaataaagatatctacgtggacctcgatatgaagggaatcaactacaactcgagcgtcgccaaatcggctcaggagtgccaggaacgctgcaccgatgatgtgcattgtcatttctttacgtacgccacccggcaattccccagcctggagcatcggaacatttgcttgctgaagcacactcaaacgggcactcctaccagaatcaccaagctcgataaggtcgtgtccggattctcactgaagtcctgtgccttgtcaaacctcgcgtgtatccgggacattttcccgaacaccgtgttcgctgactctaacattgactcagtcatggccccggacgccttcgtctgcggcagaatttgtacccaccatccgggctgccttttctttacctttttctcacaagaatggccaaaagagtcccaacggaacctctgcctcttgaaaacgtccgagtcgggactgccaagcactagaatcaagaagtcaaaagccctgtccgggttttcgctccagtcatgccgccactccatccccgtgttctgccactcatccttctaccacgacaccgacttcctgggggaggaattggatatcgtggcagccaagtcgcacgaagcatgccaaaagctctgcaccaacgccgtgcgctgccagttcttcacgtataccccggcccaggcaagttgcaacgaagggaaaggaaagtgctatctgaagctgtcaagcaatggaagcccaaccaaaatcttgcacggacgcgggggaatctcgggttataccctccgcctctgcaaaatggataatgaatgtacgaccaagatcaagccacgcatcgtgggaggcaccgctagcgttagaggagagtggccgtggcaagtgacgttgcacaccacctcacctactcaacgtcatctttgcggtggatccatcatagggaaccagtggatcctgaccgctgcgcattgcttctacggggtcgaatcgcccaagatcctccgggtctatagcggtattttgaatcagagcgagattaaggaggatacttcctttttcggcgtgcaggaaatcattatccacgaccagtacaagatggcagaatctggctacgatatcgcccttcttaagctcgaaaccactgtgaactacactgatagtcaaagacccatctgtctgcctagcaaaggagacagaaacgttatctatactgactgctgggtgactggatggggctataggaagttgagggacaagattcaaaacaccttgcaaaaggcgaagatcccactcgtgaccaacgaggaatgtcagaagagataccgaggccacaaaatcactcacaagatgatttgtgcgggatatcgggaaggaggaaaagacgcctgcaagggtgactctggtggaccgctgtcttgcaagcataatgaggtatggcacctggtcggcatcacttcgtggggcgaaggatgcgcgcagcgggagcgcccgggggtgtacaccaacgtggtcgagtacgtcgactggatcctggagaaaacccaggctgtg

SEQ ID NO: 9459 - DNA, 1875 bp, synthetic construct
  misc_feature 1..1875: note = source = /note="Description of Artificial Sequence: Synthetic coding sequence"
  source 1..1875: mol_type = other DNA
atgatttttctttaccaggttgtgcactttatcttattcacctccgtgagtggcgagtgcgtcacccaactgctaaaggacacttgctttgagggtggggacattactacagtgtttaccccaagtgccaaatattgccaagtagtatgcacctatcacccccggtgtctcctattcacgttcactgccgagagcccctcggaagaccccacacgatggtttacttgtgtactgaaagactctgtgaccgagaccttgccaagagtaaatcggactgcggcaattagcggctactctttcaagcagtgcagtcatcaaatcagtgcctgtaataaagacatttatgtggacctcgatatgaaggggatcaactacaattcttcagtggcaaaatccgcacaggaatgtcaggaaaggtgtacggatgatgtgcactgtcacttctttacctatgccaccaggcagtttcctagtcttgaacacaggaacatctgtcttctgaagcacacacagaccggtacgccaacaagaataactaagttggataaggttgtaagtggtttcagtctcaaatcctgcgccctgtccaatttggcttgcatccgcgacatattcccaaatacagtctttgcagattccaatatcgattctgtgatggctcccgatgcttttgtgtgcggccgaatatgcacacaccacccaggatgtctgttttttaccttcttcagccaggagtggcccaaggagagtcaacgtaatttgtgcctgctcaagacaagcgaatcaggcctacccagtacccggattaaaaaatccaaagccttgtccggcttctcactgcagagttgtcgccacagtattcccgtgttctgtcactcttcattctaccatgacaccgacttcctaggagaagaactcgatatcgtcgccgctaagtcccatgaagcatgccagaaactctgtactaatgctgtgcgttgccaattttttacatacacaccggcgcaggcatcatgcaatgagggcaagggcaagtgctacctcaaactatcttcgaacggaagccctactaaaatcctgcatggtcgaggaggaatctctggttataccttaagactgtgcaagatggacaatgaatgtacaactaaaatcaagccccgaatcgtcgggggtacggcttctgtccgaggagagtggccatggcaagtaacattgcacacgaccagccctacacagagacacctctgcggaggatcaatcattgggaaccaatggatcctgacggccgcgcactgtttttacggcgtggaaagtccgaagatcctacgggtctattccggtattttgaatcagagcgaaataaaagaagacacgtctttcttcggagtccaggagatcatcatacacgaccagtataaaatggccgaaagcggatacgacatagcactgctgaagctcgaaactactgtgaactataccgattcccagagacccatttgtctgccgagcaagggagacaggaacgttatttataccgactgttgggtcaccggctgggggtatcgaaagctgagagataagatccagaatacccttcagaaggctaaaatcccattggtgactaatgaagagtgccagaaacgttatcggggacacaaaataacccataaaatgatctgtgcgggatacagggaaggcggcaaagatgcttgcaagggggacagcggcggacccctttcttgcaaacacaatgaagtgtggcatctggtcggtataacctcatggggcgaggggtgtgcccagagagaacgtcccggcgtttacaccaacgtggtggagtacgtcgactggatcctggagaagacccaggctgta

SEQ ID NO: 9460 - DNA, 1875 bp, synthetic construct
  misc_feature 1..1875: note = source = /note="Description of Artificial Sequence: Synthetic coding sequence"
  source 1..1875: mol_type = other DNA
atgattttcctgtatcaagtggtacattttatacttttcacatctgtgtctggagaatgtgttactcagctcctaaaagatacatgtttcgaaggaggagatataacaacagtgtttacgccttcagctaaatactgtcaagtggtctgcacatatcatccaagatgtcttttattcacatttactgcagaatctcccagtgaagatccaactaggtggtttacatgtgttctgaaagatagtgttacagaaactctcccacgcgtcaacaggactgcagcaatctcgggatattcatttaaacagtgctctcatcagatttccgcctgtaacaaagatatatatgtggacctcgacatgaaaggaataaactataactcctctgtggcaaaatccgctcaggaatgtcaggaacgttgcacagatgacgttcattgtcattttttcacttatgccacaaggcagtttccctccctggagcatcggaacatctgtctcctgaaacatacacagactgggacaccaacaaggatcactaagcttgataaagtggtgtctggattctcgctgaagtcgtgtgcactgtctaaccttgcttgtatcagggatatcttccccaatacagtatttgcagattccaatatcgacagtgtgatggctccagatgcttttgtctgcggacgaatctgtactcaccaccccggatgtctattttttacgtttttctcacaggaatggcctaaagagtctcagcggaacctctgtttgctgaaaacatcagaaagtggactgccttccacaaggataaaaaaatcgaaagcactgagtggattctctcttcagtcttgccgccattcaatcccggtgttttgtcactcctctttctaccatgatacagacttcttaggggaggaactagatatagtcgcagccaaatcccacgaagcgtgccagaaactctgtacaaacgcggtaaggtgccagttcttcacttacactcccgcacaggcctcatgtaacgaagggaaggggaaatgttatctgaaactctcttctaatggatccccaactaaaatcctacacgggcggggggggataagtgggtacactcttaggctttgtaaaatggataacgagtgtacgacaaaaatcaaacctagaatagtgggaggaactgcatcggttcggggagaatggccatggcaggtcacacttcatacaacttctcctactcagcgccatctctgtggaggatctataatcgggaaccaatggattctcacagcagctcattgtttctacggggtcgaaagtcccaagatcctgcgggtgtatagtggaatactaaaccagtctgagataaaagaagacacttctttttttggggttcaagaaattatcatccatgatcagtacaaaatggctgaatccgggtatgatatcgccctactaaaactggaaactacagtcaactatactgactcccaacggccaatctgtctcccatcgaaaggagatagaaatgttatttatacagattgctgggtgacagggtgggggtatcgcaaactgagagataaaatccagaatactctacagaaagccaaaatacccctcgtgacaaacgaagagtgtcagaaaaggtatagaggacacaagatcacacataagatgatctgtgcaggatatagagaagggggaaaagatgcatgcaaaggagattcaggaggacccctgtcatgtaaacacaatgaggtgtggcatttagtgggaataacttcttggggggaagggtgcgctcagagggaacgaccaggagtctacactaacgttgtcgagtatgtcgattggattctggaaaaaactcaggcagtg

SEQ ID NO: 9461 - DNA, 1875 bp, synthetic construct
  misc_feature 1..1875: note = source = /note="Description of Artificial Sequence: Synthetic coding sequence"
  source 1..1875: mol_type = other DNA
atgatctttctgtaccaggtggtgcactttattctgtttacctctgtgagcggcgaatgtgttacccagctcctcaaggatacctgcttcgaggggggcgatattacgaccgtgttcactccatccgccaagtactgtcaggtggtgtgcacgtaccatcctagatgcctgctgtttactttcaccgcagaatcgccctccgaggaccctactcgttggtttacctgcgtgctgaaggactcggtgactgaaaccttgcccagagtcaaccggactgcagcaatctcgggatactcctttaaacaatgtagccatcagatcagcgcctgtaacaaagatatctacgttgatttggacatgaagggaatcaattacaattcgtccgtggcaaagtccgcgcaggagtgccaggaaaggtgcaccgatgatgtccattgccactttttcacttacgcaaccaggcaatttccgtcgttggagcacaggaacatttgtctgcttaagcatacccagaccggaacccccaccagaatcactaaactcgataaggtggtgtccggattttcacttaaatcatgtgcacttagcaacctcgcatgtattcgagatatcttccctaacactgtgtttgcggactccaacatcgatagcgtcatggcgcctgacgctttcgtgtgcggaaggatctgtactcatcatccaggttgcctgtttttcacttttttctcgcaggaatggcctaaggaatcgcagaggaacctttgtctgctcaagacttcggaatccggcctcccctccacccgaattaagaagtcgaaggccctgtcaggattttcactgcagtcatgtcgacattcgatcccagtcttttgtcattcgtcattttaccatgacaccgactttcttggagaagaactggatatagtcgctgcaaagtctcatgaggcctgccagaagctgtgtaccaatgcggtgagatgtcagttctttacttacacccctgcccaggcctcctgcaacgaaggaaaaggtaaatgctaccttaaactttcgtcgaacggttcgccaactaagattcttcatggccgcgggggtataagcggatacaccctgcgcctctgtaagatggataacgaatgtaccaccaagattaaaccacgcatcgttggagggaccgcgtcagtccggggggaatggccctggcaggtgaccctccatacgacctcgccaactcaacgccatctgtgcggtggatccattataggtaaccagtggattcttactgcagcccactgcttttacggagtggagtccccgaagatacttagggtgtactccggcatccttaaccaatcggaaatcaaggaagatacctcgttcttcggagtccaggaaatcatcattcatgaccaatacaagatggcagaatcaggttatgatattgcactcctcaaacttgaaacgactgtgaactacaccgatagccaacgcccgatctgcctgccctctaaaggagacagaaacgtgatatacacggactgttgggtgactgggtggggctaccgcaagctgcgtgacaaaattcaaaacaccctccaaaaggctaagataccgttggtgaccaatgaagaatgtcagaagcgatatcgtggacacaagattactcacaagatgatttgtgcaggctaccgcgaaggaggtaaggacgcatgcaagggtgactcgggcggcccattgtcctgtaaacataacgaagtgtggcatcttgtgggcattacttcgtggggtgagggctgcgcacaacgcgaaagaccaggcgtgtacaccaacgtggtggaatacgtcgactggatcctggaaaaaacccaggctgtg

SEQ ID NO: 9462 - DNA, 1875 bp, synthetic construct
  misc_feature 1..1875: note = source = /note="Description of Artificial Sequence: Synthetic coding sequence"
  source 1..1875: mol_type = other DNA
atgatttttctgtaccaagttgtgcacttcattctgtttacctcggtcagcggagaatgcgtcactcaactcctgaaggacacttgttttgaaggtggcgacataactaccgtctttactccatctgcgaaatactgtcaagtggtgtgtacctaccaccctagatgtctgttgttcacctttacggcagagagcccttcggaggacccaacccgatggtttacgtgtgtgctgaaggattctgtgacggagacgttgcctcgtgtgaaccggaccgccgctatctccgggtactcattcaagcagtgttcgcaccaaatttccgcatgtaacaaggacatctacgtcgatcttgatatgaagggcataaactacaactcctccgtggcaaagagtgcacaagagtgtcaggagcgctgcactgatgacgtgcattgccacttctttacctacgcaaccagacagtttccatccttggaacacagaaacatctgcctgcttaagcatacccaaaccgggactccaacccgcattaccaaacttgataaggtggtgtctggattctcgcttaagtcgtgtgcgctctccaatcttgcatgtattcgagacattttcccaaatactgttttcgcagactctaatatcgactcggtgatggcaccagatgcatttgtctgtggacgtatttgcacccatcatccagggtgtctgttctttacctttttcagccaggagtggcctaaggaaagccaacgcaacctgtgtctgctcaagacgagcgaatcaggcctcccttccacccgcataaagaaatcgaaagcccttagcgggttctcgcttcaatcatgtcgccacagcattcctgtgttctgtcattcctcattctaccatgacactgactttctgggcgaagagcttgatattgtggccgcaaagtcacatgaagcctgccaaaaactctgtactaatgcggtgaggtgtcagtttttcacctatactcccgcacaggccagctgtaatgaaggaaagggaaaatgttaccttaaacttagcagcaacggatccccgaccaaaatcctccatgggcggggtggcatttccggatacactctgagactgtgtaagatggacaacgagtgtactactaaaatcaagccaagaattgtgggagggaccgcatccgtgagaggcgaatggccatggcaagtgacgcttcacactactagcccgacgcaaagacatctgtgtggtggatccatcattgggaaccaatggatcctgactgcagcgcactgtttttacggggtggaatcaccaaagatccttcgcgtgtacagcggaatcctgaaccagtccgaaatcaaggaggacacttcattctttggagtgcaagaaatcattatccatgatcagtacaagatggcagagtcaggatatgacatcgcactgctcaagctcgagactaccgtgaactatactgattcgcagcgccctatttgcctccctagcaagggagatcggaacgtgatctataccgattgttgggtgactggttggggttacaggaagctccgggataagattcaaaataccctgcaaaaggcgaagattccgttggtgaccaacgaggaatgtcagaagagataccggggtcacaagatcactcataagatgatctgtgcaggctaccgggagggaggaaaggacgcgtgcaagggtgattccggtggtcctctgagctgtaaacacaatgaagtgtggcatctggtaggaattacttcctggggggagggatgtgcacagagggagcgtccgggtgtctacacgaatgtcgtcgaatatgtggactggattctggaaaagactcaggcggtg

SEQ ID NO: 9463 - DNA, 1875 bp, synthetic construct
  misc_feature 1..1875: note = source = /note="Description of Artificial Sequence: Synthetic coding sequence"
  source 1..1875: mol_type = other DNA
atgatctttctgtatcaagtggtgcactttatcttattcacttctgtaagtggggagtgtgtgacccagttactgaaggatacatgttttgaaggtggcgatatcaccaccgtattcacgcctagtgccaagtactgccaagtggtgtgtacttaccacccaaggtgtctcttgttcacctttactgccgagtccccctcggaagaccccactcgctggtttacttgtgtactgaaggatagcgtaaccgagaccctcccacgcgtaaatagaactgcagctatttctgggtatagtttcaagcagtgtagccaccagatttcagcttgcaataaggatatttacgtggatttagatatgaagggaatcaattataatagtagcgttgccaagtccgctcaagagtgtcaagagcgttgtacggatgacgtgcactgccatttttttacatatgctacaagacaatttccctccctagagcacaggaacatctgtctcctcaaacacacgcaaacagggaccccaaccaggatcaccaaactggacaaagttgtatcgggcttctccctgaaaagctgtgccttgtccaacctcgcttgcatccgggacatctttccaaacaccgtgtttgcagattcaaatatcgattccgtgatggcgccagatgctttcgtgtgtggtcggatttgcacacaccaccccgggtgtctgttttttacgttcttctctcaagaatggcccaaagagtcacagcgcaatctttgcctactcaagacctccgagtccggcttaccaagcacccgtattaaaaagtcgaaggccctatccggcttcagcctgcaatcatgcaggcacagcatcccagtgttctgccacagcagcttttaccatgataccgactttcttggcgaagagttggatatcgtggccgccaaatcccacgaggcctgccagaaactttgcaccaatgcggtgcggtgtcagttcttcacatatactcccgcccaggcatcttgtaacgaggggaagggcaagtgctatttgaaattatctagtaatgggagtcccactaaaatattgcacggcagaggcggaataagtggctacactcttagattgtgtaagatggacaatgagtgtacaacaaagatcaaacccaggatcgtgggtgggacagccagcgtgcggggcgagtggccttggcaggtgacactgcacacaacttcaccaacccagagacatttgtgtggcggttctataattggaaaccaatggattctgacagccgcacactgcttttatggcgtggaaagtcccaagattctcagggtgtactctgggattctcaaccaaagcgagataaaagaggacacgagcttttttggagtccaggaaatcattatacacgaccagtacaagatggccgaatcgggttatgacatcgccctgttgaagctggagaccaccgtgaattacacagatagccagagaccaatctgtctgccctctaagggggacagaaacgtaatctatacagattgctgggtgaccgggtggggctacaggaaactccgtgacaagatccagaacaccctgcagaaggccaaaatcccattggtgacaaatgaagaatgtcagaagcgttatagaggacacaaaatcacacacaaaatgatctgtgctgggtatagggagggtggtaaagatgcatgcaagggcgattctggtgggcctttatcctgtaagcacaacgaagtttggcatctggtggggataacatcgtggggtgaggggtgtgcccaaagggagagacccggcgtgtataccaacgtcgtcgagtatgtggactggatactggaaaaaacacaggctgta

SEQ ID NO: 9464 - DNA, 1875 bp, synthetic construct
  misc_feature 1..1875: note = source = /note="Description of Artificial Sequence: Synthetic coding sequence"
  source 1..1875: mol_type = other DNA
atgatttttctctaccaggtggtacactttatcctgttcacttcagtctcgggtgagtgcgtgacacagctcctcaaggatacttgttttgagggcggagacatcactactgtgttcactcctagtgctaaatactgccaggtggtgtgcacttatcacccacggtgtctgcttttcacattcacagcagagtctccttctgaggacccaaccaggtggttcacctgcgtgctaaaagacagcgtcaccgagacgcttccccgtgtgaatagaactgccgccatcagcggctattcgttcaaacagtgcagccaccaaatatctgcctgtaataaagatatttacgttgatctggacatgaaagggataaactacaattcttccgtggcaaaatccgcccaagagtgccaggagcgttgtaccgacgacgtgcattgtcatttctttacatacgcaaccaggcagtttccctccctagagcatcggaatatttgtctgctcaagcacacacagacaggcacaccaacaaggattacgaaactagacaaagttgtctcgggtttctctcttaagagctgtgcccttagcaaccttgcatgcattcgcgacatcttcccgaacaccgttttcgctgacagtaacatcgattcagtcatggcgccagatgcctttgtctgtggacgaatttgcacccatcatccgggctgcctcttcttcacattcttttcccaggagtggcccaaggaatctcagcgcaacctttgtctgctcaaaacaagcgagagtggcctaccctctacccgcatcaagaagtctaaggccctgagcggatttagtctacagtcatgcaggcactctatcccggttttttgccactcatcattctaccacgacactgacttccttggcgaagagctggacattgtagcagctaagagccacgaagcttgtcaaaagctgtgtacgaacgctgtaagatgccaattcttcacttacactcctgcacaagctagttgcaacgaagggaaggggaagtgttatttaaagctgagctctaatgggtctcctactaagatactgcatggccgcggaggaatttcaggatacacgttacggttgtgcaagatggacaacgaatgcacaacgaagattaaaccaagaattgtggggggaacagcatctgtgcggggcgagtggccttggcaggtaactctccatacaactagtcctacccaaaggcatctgtgtggaggaagcatcatcggtaaccagtggatcctgacagctgcacattgcttttacggtgtggagtcacccaaaatccttcgagtctattctggaatcctgaatcagtccgagataaaggaggacacttctttcttcggggtacaggagatcataatccacgaccagtacaagatggccgagtcgggctacgacattgcgctgttgaaactggaaacgacagtgaactacaccgattcacagaggcccatatgtctgccctcaaagggggaccgcaatgtcatctacaccgactgttgggtcaccggatggggctaccgtaaattgcgcgataagattcaaaacacgcttcaaaaggctaaaatcccactcgttacaaacgaggaatgtcaaaaaaggtaccgcggccataaaatcacgcacaagatgatctgtgcaggctatagagaagggggaaaggacgcgtgcaaaggcgattctggaggcccattgtcttgcaagcacaatgaggtttggcatttggtgggaatcacatcctggggggagggctgcgcccagcgcgagaggcctggggtatacaccaatgttgtcgaatacgtagattggattctggaaaaaactcaggccgtg

SEQ ID NO: 9465 - DNA, 1875 bp, synthetic construct
  misc_feature 1..1875: note = source = /note="Description of Artificial Sequence: Synthetic coding sequence"
  source 1..1875: mol_type = other DNA
atgatctttctgtaccaggtggtgcatttcatcctgttcaccagtgtgtcaggagagtgcgtgacccagctgctcaaagacacctgtttcgaaggaggcgatatcactactgtctttactccgtcagcgaagtactgtcaagtcgtttgtacttaccacccgcggtgtttgctcttcactttcactgcagaatccccgtcggaagatccaacccgctggtttacttgcgtgctcaaggattccgtgactgaaaccctcccgcgcgtgaaccgcaccgccgccatctccggttactcattcaagcagtgctcgcatcagatcagcgcctgcaacaaagatatctacgtggacctggacatgaaaggcatcaattacaatagcagcgtcgccaaaagcgcccaagaatgccaggagagatgtactgatgacgtccactgccatttctttacctacgcaacgcgccagttcccgtccctcgaacatagaaacatctgcctgctgaagcatactcagacggggactccgacgcgcatcaccaagctcgacaaggtggtcagtggattcagtctgaagtcctgcgctctcagcaatctggcctgcatccgggacattttcccaaataccgtgttcgcagacagcaacatcgactccgtcatggctccagacgcattcgtgtgcggacgcatctgcacccaccacccggggtgtctgttctttaccttcttttctcaggagtggccgaaggaatcacaacggaatctctgcctgctcaagacttccgagtcggggctcccgagcacccgcattaagaagagcaaagccctttcaggattctcgctgcagagctgtagacattcgatcccggtgttttgtcactcatcgttctaccacgacaccgacttcctcggggaagaactggacatcgtggccgcgaagtcgcacgaggcttgccagaaattgtgtactaacgctgtgcggtgccagtttttcacttatactcctgcgcaggcgtcatgcaatgaaggaaaggggaagtgctacctgaagctctcgtcaaatggcagcccgactaaaatcctgcacggacgtgggggaatttcgggatacaccctgagattgtgcaaaatggataacgagtgcacgacgaagattaagcccagaatcgtgggcggaactgcgtcggtgcgcggcgaatggccttggcaggtcactttgcacaccacctcgccaactcaacgccatctgtgcggtgggtccatcatcggtaaccagtggatcctgaccgcggcgcactgcttctatggcgtggagtccccaaaaatcttgcgggtgtacagcggaattctcaatcagtccgaaatcaaggaggatacgagcttcttcggtgtgcaagagatcatcatacatgaccaatacaagatggcagaatcaggatacgacatcgcactcctcaagctcgaaaccaccgtgaactacaccgattcgcagcgacctatctgcctgccgtccaaaggggaccgaaatgtgatctacactgactgttgggtgactgggtggggttaccgcaagttgagggataagatccaaaataccctccaaaaggcaaagatcccactggtgactaatgaagagtgccaaaagcggtaccgagggcacaagattacccataagatgatctgcgctggataccgggaaggaggaaaggatgcgtgcaagggcgactcggggggaccacttagctgcaaacataatgaggtgtggcacctcgtcggcatcaccagctggggggaaggatgtgcgcagagggagcgcccaggagtttacactaatgttgtggagtacgtggattggattctggaaaagacccaggccgtc

SEQ ID NO: 9466 - DNA, 1875 bp, synthetic construct
  misc_feature 1..1875: note = source = /note="Description of Artificial Sequence: Synthetic coding sequence"
  source 1..1875: mol_type = other DNA
atgatattcctgtatcaagtcgttcactttattctcttcacatccgtgtctggggaatgcgttacccagttacttaaagatacgtgtttcgaaggtggtgatatcactaccgtcttcactccctctgccaaatactgtcaggtcgtatgcacctaccatcctcgatgtcttctgttcacatttaccgccgaaagcccttccgaagaccccactcggtggttcacctgcgtactaaaggactctgtcacggaaaccttgcctcgtgtcaaccgcaccgccgccattagcggttatagtttcaagcagtgtagccaccagatcagcgcttgtaacaaggacatttatgtggatctcgacatgaagggcatcaattataactcctccgtggctaagagcgcccaggagtgtcaggaacgctgtacagacgacgtacattgccattttttcacgtacgcaactaggcagttcccgtccctggagcacagaaacatttgtctactgaaacacacgcagacggggacccccacaaggataaccaagctggataaggtggtcagtggcttttcccttaaaagctgcgccctctccaatttggcgtgtattcgggacatatttccaaataccgttttcgctgattctaacattgacagcgtgatggcacctgatgcctttgtctgtggcaggatttgtacccatcacccagggtgtctgttttttaccttttttagccaggaatggcctaaggaaagtcagagaaacctatgcttgcttaaaactagcgagtcaggcctcccctcgactaggatcaagaagtcaaaggctctctcaggattctctctccagagttgccgacacagcattcctgtcttctgccatagttccttttaccacgatacagacttcctgggggaggagttggatatcgtggcggcgaagtctcatgaggcctgccagaagctctgtacaaatgcagttagatgtcagttttttacttatacgccagcccaggcaagctgtaacgagggcaaaggcaaatgttacttaaagctgtctagtaatgggagccctacgaaaattttgcatggccgcggcgggattagtgggtatactttgagattgtgcaagatggacaatgaatgcacgacaaaaattaaaccgcgaatcgttggcggcaccgctagcgtgcgaggagagtggccttggcaagtgacactgcacactacctctccgacacagagacacctttgcggcggatcaatcatcggaaaccagtggattctcaccgccgctcactgtttctacggagtggaaagccccaagatactgagggtgtactcgggcattctcaaccagagtgagataaaagaggatacttctttcttcggcgtgcaagagattatcatacacgatcagtataaaatggcggagtctgggtatgatattgcacttctgaagctggaaactacagtaaattacacagacagccaacgcccaatatgcctcccaagtaaaggggatcgcaacgttatttacacagactgctgggtaactgggtggggctatcgaaagctgcgggacaagatccagaataccctgcagaaggccaaaatccccctggttacaaacgaggaatgccagaaacgatatcgtggccataagattacccataagatgatatgcgcgggttaccgcgaaggtggtaaggacgcatgtaagggcgattcaggcggtcccctttcttgcaaacacaacgaggtctggcatctagtaggcattacttcgtggggggagggttgtgcccagcgcgaaagacccggggtttatacaaacgtggttgagtatgtcgactggatccttgagaaaacccaggctgtt

SEQ ID NO: 9467 - DNA, 1875 bp, synthetic construct
  misc_feature 1..1875: note = source = /note="Description of Artificial Sequence: Synthetic coding sequence"
  source 1..1875: mol_type = other DNA
atgatcttcctgtaccaagtggtccatttcatcctgttcaccagtgtgtccggagagtgtgtgacccagttgctgaaggatacctgtttcgagggaggagacattactaccgtgttcactccgtcagcgaaatactgccaagttgtgtgtacctaccatccgcgctgtctcttgtttacttttactgccgagtcgccttcggaggacccgactcggtggttcacctgcgtgcttaaggattcggtcactgaaaccctgccgcgcgtcaatagaaccgccgcgattagcggttattcgttcaaacaatgctcacatcagatttctgcctgcaacaaggacatctacgtcgatttggatatgaagggaatcaactacaactcctcagtggccaagtcggctcaagaatgccaggaacgctgtactgacgacgtgcattgccatttctttacctacgctacgcgtcaatttccctcactggagcatcgaaacatctgccttctcaaacacacccaaactggaactcccacccgcatcaccaaactcgacaaagtcgtctcaggattctcgctcaagtcatgcgccctcagcaaccttgcatgcatccgggacatttttccgaataccgtgttcgcggactcaaatatcgatagcgttatggccccagatgctttcgtgtgcggcagaatctgcacgcaccacccgggctgcctcttcttcactttcttttcgcaggaatggcctaaagaatcgcagcgtaatctctgcctcctgaaaacctcggagtcaggattgccaagtactcgcatcaagaagtcaaaagcgctttccggcttcagcctgcaatcctgtcgccactcgatcccggtcttttgccattccagcttctaccacgacactgactttctgggcgaggaactggatattgtggcggcgaaatcgcacgaagcctgccagaagttgtgtaccaacgccgtgagatgccagttctttacgtatactcctgcccaggcgtcatgcaatgagggcaagggtaagtgctacctgaaactctcttccaatggttcgccgaccaagatactgcatggccgcggagggatctccggatacaccttgcggctgtgcaagatggacaacgagtgtactactaagatcaagccacggatcgttggagggactgcctccgtcaggggagaatggccgtggcaggtgacccttcataccacctccccaacccagcggcacctgtgtggagggtcgatcattggtaatcagtggatccttactgcagcccattgcttctacggagtcgaaagcccaaagatcttgcgcgtttactcggggatcctgaaccagagcgaaatcaaggaggatacgtcgttcttcggagtccaggaaatcattattcatgaccaatacaagatggcggaatcgggttacgatatcgcactgctgaaactggaaactactgtgaactataccgattcgcagcgcccgatctgcctcccgagtaagggcgaccggaatgtgatttacaccgactgctgggtcaccggatggggatacagaaaacttagggacaagatccaaaataccttgcagaaggcaaagatcccacttgtgaccaacgaggaatgccagaaaaggtaccgcgggcacaagatcacccataagatgatttgcgcaggctatcgcgagggaggaaaggacgcttgcaagggcgactccggcggtccactttcctgcaagcataacgaggtgtggcatctggtgggaatcacttcatggggagaaggttgtgctcagcgggaaagaccgggagtctacaccaacgtggtggagtacgtggattggatccttgaaaagacgcaagccgtg

SEQ ID NO: 9468 - DNA, 1875 bp, synthetic construct
  misc_feature 1..1875: note = source = /note="Description of Artificial Sequence: Synthetic coding sequence"
  source 1..1875: mol_type = other DNA
atgatatttctttaccaggtggtgcactttattctctttacttccgtgagcggggagtgtgtgacgcagctgttgaaggatacctgttttgagggaggagacattaccactgtgtttaccccttcggcaaagtattgccaggtcgtgtgtacctaccatcctcgttgcttgctgtttacgtttaccgctgaatctcccagcgaagatccaactcggtggttcacttgcgtcctgaaagacagcgttactgaaacgctgccacgtgtgaacagaaccgcggcaatttccggatactcgttcaagcaatgctcgcaccaaatttctgcatgcaacaaagacatatatgtggacctggacatgaaggggattaactataactcctccgtcgcaaagtcggcacaggagtgtcaagagcggtgtactgatgatgtccattgccatttctttacttacgcgactcggcaattcccttcccttgaacataggaacatatgtctgctgaagcatactcagaccggtactcctacccggattaccaaattggacaaggtcgtgtcgggatttagccttaagtcgtgtgctctgtctaacctggcatgtattcgagatatcttcccaaataccgtgttcgcggattcaaacattgactcagtaatggcgcctgatgcctttgtgtgtggaagaatctgtactcatcaccccggctgtttgtttttcaccttcttttcgcaagaatggccgaaggaatcgcagcgcaacttgtgccttcttaagactagcgaatccggacttccatcaactcgcattaagaagtctaaggccctttcaggctttagccttcagtcgtgtagacattcgattcctgtgttttgccactcatccttttaccatgacactgactttctgggtgaggaactggacatcgttgcagctaaaagtcacgaggcatgtcagaaactgtgcaccaacgcagtgcgctgccaattcttcacttacaccccagcacaggcatcatgtaacgaaggaaaagggaagtgctatcttaagctcagctcaaatggatcgcccaccaagattctgcatgggagaggtggcatctcgggttacacgctgcgattgtgcaagatggataatgaatgtaccactaaaatcaagcctcggatcgtgggaggaactgcctccgtaagaggagaatggccctggcaggtcaccttgcatacgactagccctactcaaagacacctctgtggcgggtccattattggaaatcaatggatactgacggcagctcattgtttctacggcgtggagagcccgaaaatactccgtgtgtactcggggatcttgaaccaatcggagattaaagaggatacttcgttcttcggtgtccaagagataatcatccatgatcagtacaaaatggccgagagcggttacgatattgccctgctcaaactcgaaactactgtcaattacacggattcccaacgccccatctgcttgcctagcaaaggagataggaacgtcatatacacggactgctgggtgactggttggggctaccgtaaacttagagataagatacaaaatactctgcaaaaggcgaaaattccacttgtcaccaatgaagaatgtcagaagcggtaccgaggacataagattactcacaagatgatctgtgcaggatacagagagggaggtaaggatgcatgcaagggagactcaggggggccactcagctgtaagcacaatgaagtgtggcatctcgtgggcatcacttcttggggcgagggatgcgcgcaaagggaacggcccggagtgtacaccaacgtggtggaatacgtcgattggatcctggaaaagacccaggcagtg

SEQ ID NO: 9469 - DNA, 2196 bp, synthetic construct
  misc_feature 1..2196: note = source = /note="Description of Artificial Sequence: Synthetic coding sequence"
  source 1..2196: mol_type = other DNA
atgtcagagacttctcgcacagcttttggtgggcgacgtgcagtgcctccaaataacagcaacgccgcagaggatgacttgccaactgtcgagctgcaaggcgtcgtcccccggggcgtgaacctgcaggagttcctgaacgtcacatctgtgcatctgttcaaagagcgctgggataccaataaagtcgaccaccatacagataagtacgaaaacaataagctgattgtgcgccgaggtcagtctttctacgtgcagatagatttctctaggccttacgatccgagaagggatctgttccgtgtcgagtatgtgatcgggcgttatccccaagagaataaaggcacctatataccagtgcccatcgtctctgagcttcaaagcggaaaatggggtgcgaagattgttatgcgggaagaccgcagtgtcagactctctattcagagtagccctaagtgcatcgtggggaagtttcgaatgtatgtagctgtgtggactccctatggcgtgcttcggacatcaaggaatccggagaccgacacatatatactcttcaacccgtggtgcgaggatgacgctgtttatctcgataatgagaaggaaagggaggagtatgttttgaatgacatcggcgttatcttctacggagaggtgaacgacattaaaaccaggtcatggtcctacggtcagttcgaggatggcattctggacacatgtctctatgtcatggacagagcccagatggacctgtcaggtcggggtaacccgataaaggtgtccagggttgggagcgctatggttaacgccaaggacgacgagggcgtcctggtggggagctgggacaatatctatgcttatggcgtgccacccagcgcctggacgggatctgtcgacattctcctggagtataggtcgtctgagaacccagtccggtatggccaatgttgggtcttcgccggcgtgtttaatacctttttgcgctgcctgggtatcccagctagaatagtcacgaactattttagtgctcacgacaatgacgcaaatctgcagatggacatttttcttgaggaagatggaaatgtcaattctaaactgacgaaagattccgtgtggaactatcattgttggaatgaagcctggatgactagaccggatctgcccgtgggttttggtggatggcaggcagtcgactctacaccccaagaaaactcagacggcatgtatcgctgtggacccgcctccgtgcaagccatcaaacacggtcacgtatgtttccagttcgacgctccgttcgtttttgctgaggtgaacagcgacctgatctatattacagcgaaaaaagacgggacacatgtcgtagagaacgtggacgccacacacatcggaaaattgattgtgacgaagcagatcgggggggacggcatgatggacattaccgacacatacaagtttcaagaaggccaagaagaggaaaggcttgcactggagacagctcttatgtatggtgcaaaaaagccactgaacacggaaggcgtgatgaagtctagaagcaacgtggacatggatttcgaggtagagaacgccgtacttggcaaggacttcaagctttcaattacatttcgaaataatagccacaacaggtatacaattaccgcgtacctgtctgccaatattacattttacaccggtgtgccaaaagcagaatttaagaaggaaactttcgacgtgactctggaaccgctcagcttcaagaaagaggcagtcctgatccaggcaggcgaatatatggggcagctgttggaacaggctagtttacatttctttgtgaccgccaggatcaacgagactagggatgtcctggctaagcagaaaagtactgttcttactattcctgagattatcatcaaggtgcgggggacccaggtggtagggagcgacatgacggtgacagtacagttcactaacccactgaaagaaaccctcagaaacgtttgggtccatctagacggccccggcgttacacggcccatgaaaaaaatgtttcgtgaaattcggcctaattcaaccgtgcaatgggaggaggtatgcaggccctgggtgagtggtcacaggaagcttattgcgtccatgtcttcggattcactaagacatgtctacggagagttggacgtccaaattcagagacggcctagtatg

SEQ ID NO: 9470 - DNA, 2196 bp, synthetic construct
  misc_feature 1..2196: note = source = /note="Description of Artificial Sequence: Synthetic coding sequence"
  source 1..2196: mol_type = other DNA
atgagcgagacctcaaggaccgccttcggtggccgtcgtgctgtgccgcctaataattcaaacgccgccgaagatgatttgccgacagtggagctacaaggtgtggtcccccgaggagtgaatctgcaagagttcctgaatgtgacgtcggtacatctgttcaaggaacgttgggatacaaacaaggtggatcatcacacggataaatatgagaacaacaagctgatcgtccgtcgcggccaatcattctacgtgcaaattgacttttctcgaccgtacgatccccgtcgagacttgtttcgggtggagtacgtcattggacgctatccacaggagaacaaaggaacgtacattcccgtccccattgtgagtgagctacagtcgggaaaatggggcgcaaagattgtaatgcgcgaggaccgctcagttcggctgtcgatacagtcctcaccgaaatgcatcgtgggcaagtttcgcatgtacgttgccgtgtggaccccgtacggtgttttgcgcaccagccgaaatcccgagacagatacttacattctgtttaatccttggtgcgaagatgacgcggtctatctagacaacgagaaggagcgagaagaatacgtcttgaatgacatcggtgtgattttctacggcgaagtcaatgacatcaagaccagatcgtggtcgtatgggcagtttgaggacggcattctggacacttgtctgtatgtcatggaccgtgcccagatggacttatcgggaagaggtaatccaatcaaggttagtcgcgtgggcagcgcgatggtgaatgcaaaagacgatgagggtgtgctggtgggtagctgggacaatatctacgcgtatggagttcctccaagtgcttggaccggctcggttgacattttgctagagtaccgttcatccgagaatcctgtgaggtacgggcagtgctgggtttttgccggcgtgttcaatacgtttttgcgatgcctgggcatacccgctcgtattgttactaattacttctccgcccacgataatgacgccaatcttcaaatggatatatttctcgaggaggacggtaacgtgaattccaaactaaccaaagactccgtctggaactaccactgctggaatgaggcctggatgacgcgtcccgacttaccggtgggattcggcggatggcaggccgtggattcaacaccgcaggagaactccgatggcatgtaccgctgcggcccagccagtgtgcaggccattaagcatggccatgtgtgcttccagtttgacgctccgtttgttttcgcagaagtgaattctgatctcatatacattaccgcgaagaaggatggtacccacgtggtggagaacgtggacgccacccatataggaaagctgatcgtgacaaagcaaatcggaggggacgggatgatggatattacagacacatacaagttccaagagggtcaggaggaagagcgactagccctcgagaccgcgctgatgtatggcgctaaaaagccacttaacaccgagggcgtgatgaaaagtcgaagtaatgtcgatatggattttgaagtggaaaatgccgtgctcggaaaggatttcaagctctcgattacctttagaaacaactcccataaccgttatacgattaccgcgtacctgtcggctaatatcactttttacaccggcgtcccaaaggcagagtttaagaaggagacttttgacgtgacattggaaccgctttcctttaagaaggaggctgtgctgattcaggcgggtgagtatatgggccaattgctcgagcaagcctccctgcattttttcgttacagcccgcatcaatgagacaagggatgtattggctaagcaaaagtccacagttctaacgattcccgagattattataaaggttcgcggcacgcaggtcgtgggatcggatatgacagtgaccgtccagttcactaatccactgaaggagacgctgcgtaacgtatgggtgcatctggatggcccgggcgttacacgacccatgaaaaagatgttcagggaaattcggcccaactctacggtgcagtgggaagaggtgtgccgaccgtgggtctcgggacaccgcaagttgatcgcgtctatgtcttccgactccttacgtcacgtttacggggaactggatgtccaaatccagcgtcggcccagcatg

SEQ ID NO: 9471 - DNA, 2196 bp, synthetic construct
  misc_feature 1..2196: note = source = /note="Description of Artificial Sequence: Synthetic coding sequence"
  source 1..2196: mol_type = other DNA
atgagtgagacctccagaaccgcttttggtgggagacgcgccgtcccaccgaacaactctaatgcggctgaggacgatctgccaactgtggagctgcagggagtcgtgccacgaggcgtgaatctgcaggaattcctgaacgtcactagcgtgcatcttttcaaagagaggtgggacaccaacaaagtcgaccaccatactgacaagtatgagaacaataaacttatcgttaggcgcgggcaaagcttctacgtccaaatagacttttcaaggccgtacgacccgcgcagagatctcttcagagtggagtatgtgattggacgctacccccaggagaacaaggggacttatatacccgtaccaatcgtgtcagagctgcaaagtggaaaatggggcgcgaaaatagtgatgcgcgaagaccgatccgtgcggctcagcattcagagcagtccaaagtgcatagtagggaagttcaggatgtacgttgccgtgtggacaccatatggggtgctgaggacaagtcgcaacccagagacagatacttacattttgtttaatccctggtgtgaggacgacgctgtatacctcgacaatgaaaaggagagggaagaatatgtgctgaacgatatcggcgtgatattctatggcgaagtgaacgatatcaagaccaggtcttggagctacgggcagttcgaggacggaatcctggacacctgtctgtatgtgatggatagggctcagatggatctctcagggcggggcaaccctattaaagttagtagagttggaagtgctatggttaacgcgaaggatgatgaaggtgtgctcgtgggatcatgggacaacatctacgcctacggagtcccacctagtgcttggactggatccgtggacattttgcttgagtataggagcagcgaaaacccggtgagatatggacagtgctgggtgtttgccggagtcttcaatactttcctcagatgcctcggcattcctgctagaattgttacaaactatttctcagcccatgataacgacgctaacctgcagatggatatctttttggaggaggacgggaacgtcaacagcaagcttaccaaagactcagtgtggaactatcattgttggaatgaggcctggatgacgagacccgacctgccagtcggttttggtgggtggcaggcagtggacagcacaccccaggagaatagtgatggaatgtacaggtgcgggcctgccagcgtgcaggcaatcaagcatggtcatgtgtgtttccaattcgatgctccatttgtgtttgccgaggtaaattccgatctgatctacattaccgctaagaaagatggaactcacgtggttgagaatgtggacgctactcacattggtaagctgatagtgacaaagcagattggtggtgacggaatgatggatatcaccgacacatataagttccaggagggacaggaggaggagcgactcgctctggagactgccctgatgtatggtgcgaagaaacctttgaacaccgagggggtaatgaagtctaggagtaatgtggatatggactttgaggtggagaacgcagtactcggtaaggatttcaagctcagcatcacatttcgcaacaactcacacaaccgctatactatcacagcctatctttcagccaacataacattttacactggcgtgcctaaagcggagttcaagaaggagacgttcgacgtgactttggagccccttagctttaagaaggaggcggtgctcatccaggctggcgagtatatgggtcagttgctcgaacaggccagtctccatttctttgttactgctagaattaacgaaacaagggacgttctggctaaacagaaatcaacagttctgactattcccgaaatcatcataaaggttcgaggcacccaggtggtgggctccgatatgacagtaactgtgcagttcacgaacccgctgaaggaaactttgcgaaacgtgtgggtgcatctggacggccccggagttactcggccaatgaaaaagatgttcagagagatcagacccaattcaactgtgcagtgggaagaagtatgtcggccgtgggtttcaggacacaggaaactcatcgcgagcatgtcttccgactctttgcgccacgtgtacggcgagctcgatgtccagattcaaaggcgaccatccatg

SEQ ID NO: 9472 - DNA, 2196 bp, synthetic construct
  misc_feature 1..2196: note = source = /note="Description of Artificial Sequence: Synthetic coding sequence"
  source 1..2196: mol_type = other DNA
atgagcgagactagccgcacggctttcggaggtcgccgcgccgttccacctaacaatagcaacgcagctgaagacgatctacctaccgttgaactgcaaggagtcgtccctcgtggcgttaacctgcaagaatttctgaatgtgacatccgtgcacctgtttaaggaaaggtgggacaccaataaggtggatcaccatacggacaagtacgagaacaataagctgattgtccgtcgcggtcaatcgttttatgtccagatcgatttcagccgcccttatgacccacggcgcgacctgttcagagttgaatacgtgattggccgctacccacaggaaaataagggcacttatatccccgttccaatagtgtctgagctgcagagcggaaaatggggcgccaagatcgtcatgcgcgaagacagatcggttcggctgtcaattcaatcgagcccgaaatgtattgttggcaaattccgtatgtatgtagccgtttggacgccgtatggtgtcctacgaactagccgcaaccctgagaccgacacctatattctattcaatccttggtgtgaagacgacgcagtttacctggataatgagaaggaacgtgaggaatatgtgctgaatgacattggcgtcatcttttacggcgaggtcaacgatatcaaaacgagaagctggagctacggtcagttcgaggacggcattctggacacctgcctgtatgtaatggatcgtgcacagatggacttaagcgggagggggaatccgattaaggtgagcagagttggttccgccatggtaaatgctaaagacgatgaaggcgtgctagttggtagctgggataatatttacgcatatggggtgccaccatctgcatggaccggctcagttgatatcctgttagagtaccgtagcagcgaaaatcctgttcgttacggccagtgttgggtgttcgcgggtgtcttcaacacattcctgcgttgcctgggcatacccgcgcgaatagtgaccaactattttagcgcgcatgacaatgatgccaacttacagatggacatcttcctggaggaagacggtaatgtgaacagcaaactgacgaaagactctgtgtggaactatcattgttggaatgaggcttggatgaccagaccagatttgccggtgggttttggcggttggcaggcagtggattcaactccacaagagaatagcgatggcatgtaccggtgcggccctgctagcgttcaagcgatcaagcacggtcatgtgtgttttcaatttgatgcacctttcgtttttgctgaggtgaatagcgacctgatctatattaccgcgaagaaagacggtacgcacgttgttgagaacgtcgacgccacacacatcggtaaattgattgttaccaagcagatcggtggcgacggaatgatggacattacggacacctacaagtttcaggagggtcaagaagaggagcgcctggcactggagaccgcactgatgtacggcgcgaagaagccgctaaataccgagggggtgatgaaaagccgctccaatgttgacatggactttgaggtcgaaaacgcagttttgggaaaagactttaagctcagcatcaccttccggaacaacagccacaaccgttacaccattacagcgtatctgtcggccaatatcactttctatacgggtgtccccaaggctgagttcaagaaggaaacctttgacgtgaccttagaaccgcttagttttaaaaaggaagcagttctaatccaagccggggagtatatggggcaactgttggagcaggccagcctgcatttctttgtcacggctagaattaacgaaacccgcgacgtgctggcaaagcagaaatcgaccgtgctcaccatcccggaaatcatcattaaggtgcgcggcactcaggttgtgggtagcgatatgacggtgactgtccaattcactaacccactgaaagaaaccttgagaaacgtttgggttcatctggacggccctggtgtcacgcgcccaatgaagaaaatgtttcgcgaaattcgcccgaactctactgttcaatgggaggaggtctgccgtccatgggtgtccggccaccgaaaattgatcgcatctatgagctctgattccctgagacatgtttacggcgagctggatgtgcagatccaacgcaggccaagcatg

SEQ ID NO: 9473 - DNA, 2196 bp, synthetic construct
  misc_feature 1..2196: note = source = /note="Description of Artificial Sequence: Synthetic coding sequence"
  source 1..2196: mol_type = other DNA
atgtcagagacttcgaggactgccttcggcggtcgcagagccgtgccgcccaataacagcaacgctgccgaggatgacctgccaactgtggaactgcaaggagtggtgccgcggggagtgaacctgcaggagtttctgaacgttacctccgtccacctcttcaaagagcgctgggataccaacaaagtggaccatcacaccgacaaatacgagaacaataagctgatcgtgcggcggggccagtcattctacgtgcaaatagacttctcacgaccttacgatcccagacgcgacctctttcgcgtcgagtacgtcatcggacggtaccctcaagaaaacaaggggacctacatcccagtgccaatcgttagcgaactgcaaagcggaaagtggggagccaagatcgtgatgcgcgaagatcggtccgtgagattgtcgatccaatcttccccgaagtgtatcgtgggtaagtttcgcatgtatgtggccgtctggactccttacggcgttcttcgcacgtcgagaaacccggaaaccgacacttatatcctcttcaatccatggtgcgaggacgatgctgtctacctcgacaatgagaaggaacgggaagaatacgtgctcaatgacatcggcgtgatcttctatggggaggtcaatgatatcaaaactcgcagctggtcctacgggcagttcgaggacggaattctcgacacctgcctgtacgtcatggacagagctcagatggacctgagtggtagaggtaaccctattaaggtgtcccgggtcggatcggccatggtcaatgcgaaggacgacgagggagtgctcgtgggatcatgggataacatatacgcctacggagtccctccgtcggcatggacgggctccgtggacatcctgctcgagtaccggtcgtccgaaaacccagtccgctacggccagtgctgggtgttcgccggcgtgttcaatacgttcctcaggtgccttggaatccctgcccggatagttaccaattacttcagcgcacacgacaacgatgcaaatctgcaaatggacatcttcctggaggaggacggaaacgtcaactccaagctgaccaaagattcggtctggaattaccactgttggaacgaagcctggatgactaggcccgatctgccagtcggatttgggggatggcaggcagtggactcgacccctcaggagaactccgacggcatgtaccggtgcggcccagcgtccgtgcaagcaattaagcacggacacgtgtgcttccagtttgatgccccattcgtgttcgcggaagtgaactccgacctgatctacatcacggccaagaaggatggaacccacgtggtggaaaacgtggatgcgacccatatcggcaaactgattgtaacgaagcagatcggcggagacggaatgatggacatcactgatacctacaagttccaggaaggacaggaggaagagagactggcactcgaaaccgccctcatgtatggagcgaagaagcctctcaacaccgaaggtgtcatgaagtcgagatccaacgtggacatggactttgaagtcgaaaacgcggtcctcggaaaggacttcaagctgagcatcactttccggaacaacagccacaatcgatatactatcaccgcatacctgtcggcgaacattacgttctacacgggcgttccaaaggccgagtttaagaaggaaaccttcgatgtgactttggaacctctgtccttcaagaaggaagcggtcctgatccaggcaggtgaatacatgggtcaactgctcgaacaagcatcactgcacttcttcgttaccgcgcggatcaacgaaactcgcgatgttctggctaagcagaagtcaactgtccttaccattccggaaatcatcatcaaggtgcgcggaactcaggtggtggggagcgacatgaccgtgaccgtgcagttcactaacccgctcaaggagactctgcggaacgtctgggtccacctggatgggccaggcgtgactagacctatgaagaagatgttccgcgagatccggccgaacagcaccgtgcagtgggaggaagtctgcagaccatgggtcagtggacataggaagctcatcgcgtccatgtcgtccgattcgttgcgccatgtatacggagagcttgatgtccagatccaaaggcgcccatccatg

SEQ ID NO: 9474 - DNA, 2196 bp, synthetic construct
  misc_feature 1..2196: note = source = /note="Description of Artificial Sequence: Synthetic coding sequence"
  source 1..2196: mol_type = other DNA
atgtcggagacttcccggactgcgttcggagggcgccgggctgtgcccccgaacaactcaaacgcggcggaggacgacctgcctaccgtggagctgcagggagtcgtgccccggggagtgaatctgcaggagtttctgaatgtgacttccgtgcaccttttcaaggaacggtgggataccaataaagtcgaccatcacactgacaaatacgaaaacaataagctgatcgttcggaggggccaatccttctatgtgcagatcgactttagccgcccgtatgatccgcgcagggacctcttccgcgtggagtacgtgatcggacgctaccctcaggagaataaaggaacttatatcccggtccccattgtctccgaacttcaatccggaaagtggggggctaagatcgtcatgcgcgaggaccggtcggtgaggctgtcaattcagtcctcgccaaaatgcatcgtggggaaatttcgcatgtacgttgccgtctggaccccgtacggcgtgctgcggactagcagaaatcctgagactgacacttacatcctgtttaatccatggtgcgaggacgatgccgtgtacttggacaatgagaaagaaagggaggaatacgtgttgaacgatatcggagtgatcttttacggtgaagtcaacgacatcaagactagatcgtggagctacggacagttcgaggacggcattctggacacctgcctgtacgtcatggaccgggctcagatggacctgtcgggaaggggcaacccaatcaaagtgtccagggtcggatccgccatggtgaacgctaaggacgacgaaggtgttctggtgggatcatgggacaatatctacgcatacggtgtgccaccgtccgcgtggacgggctcagtggacatcctcctggaatacagatcgagcgagaacccagtccggtacgggcagtgctgggtgttcgcaggagtgttcaatactttcctgagatgtttgggaatcccggcccggatcgtgactaactactttagcgcacacgataacgatgccaaccttcagatggacatttttctggaggaagatggaaatgtgaattcgaagctcactaaggactcagtgtggaactaccactgctggaatgaagcgtggatgacgcgcccagaccttccagtgggatttggaggttggcaagccgtcgacagtaccccgcaggagaactcggacggcatgtaccgctgcggacctgcttccgtgcaagccatcaagcatggacatgtctgtttccagttcgatgcacctttcgtgtttgccgaagtgaactccgacctgatctacatcaccgccaaaaaggatggaacccacgtggttgagaatgtggacgccacccacatcgggaagctgatcgtgaccaaacagatcggcggagatggcatgatggacatcaccgacacttacaagttccaggaaggccaggaagaggaaaggttggcattggaaaccgcactcatgtacggcgcgaagaaaccgctgaacactgaaggcgtgatgaagtcgcgatccaacgtggatatggacttcgaagttgagaacgcagtcctgggtaaggactttaagctgtccatcaccttccgcaataactcccataacaggtacaccatcacggcctacctttcggcaaacattaccttttacacgggagtgccgaaggccgaattcaagaaggaaaccttcgatgtcactctggaaccattgagctttaagaaggaggccgtgctgatacaagctggagaatacatggggcagcttttggaacaggcttcgttgcacttcttcgtgaccgcgcggatcaatgaaacccgcgatgtcttggccaagcagaagtcgaccgtgctcactatcccagagattatcatcaaggtgcgcggtacccaggtcgtcggaagcgacatgactgtgactgtgcaatttactaacccacttaaagaaactttgaggaacgtgtgggttcacctcgacggaccaggagtcaccaggccaatgaagaagatgttccgggagatcagaccgaatagcacggtgcagtgggaagaagtgtgccggccgtgggtgtcaggacaccggaaacttatcgcctcaatgagctcggattcgctgcgccatgtgtacggtgaattggacgtgcagatccaacgtcgcccttcgatg

SEQ ID NO: 9475 - DNA, 2196 bp, synthetic construct
  misc_feature 1..2196: note = source = /note="Description of Artificial Sequence: Synthetic coding sequence"
  source 1..2196: mol_type = other DNA
atgtcagaaacctcacggaccgcgtttggcgggagacgagccgtgccaccgaacaattccaacgcggctgaggatgatctgcccaccgtggagctgcagggtgtcgttccccgcggagtgaacttgcaagagttcctcaacgtgactagcgtgcacctcttcaaggaaaggtgggacaccaacaaagtcgatcatcataccgacaagtacgagaacaataagctcatcgtgcgccgggggcagtccttctacgtccagatcgatttctcacggccgtatgatcccaggcgcgacctgttccgcgtggagtacgtgatcggacgctacccccaggagaacaagggaacctatataccggtcccgattgtcagcgagttgcaatctggcaagtggggcgctaagattgtgatgcgcgaggaccggtccgtcagattgagcatccaatcttcacccaagtgcattgtggggaagttcagaatgtacgtcgccgtgtggactccgtacggcgtcttgagaacctcaagaaacccagaaaccgacacctacatcctgtttaatccttggtgcgaggacgacgccgtgtacctggacaacgaaaaagaaagagaagagtacgtgctcaatgacatcggtgtgatcttctacggagaagtgaatgacattaagactcggtcatggagctatggccaattcgaggatgggatcctggacacttgtctgtatgtgatggatcgggcacagatggatttgtcgggcagaggcaacccaatcaaagtgtcgcgggtgggatccgcaatggtgaacgcgaaggatgatgaaggagtgcttgtggggtcctgggacaacatctacgcatacggtgtgccgccgtcagcctggacgggctcggtcgatatcctgctggaatacagaagctcagaaaatcctgtccggtacggacagtgctgggtctttgctggggtgttcaacacctttctgcgctgtctggggatcccggctcgcatcgtgactaattactttagcgcccacgataatgatgcaaacctgcagatggatatctttcttgaagaagatgggaacgtgaactcgaagctgactaaggactcggtctggaattaccactgttggaacgaggcgtggatgactcggccagacctgccggtgggattcggaggatggcaggccgtggattcgactccccaagagaattcggatggaatgtaccgatgcggaccggcctccgtccaggccatcaagcacggccatgtctgcttccaattcgacgccccgttcgtgttcgctgaggtgaatagcgacttgatctacatcactgcaaagaaagatggaacccatgtggtcgaaaacgtggatgccacccacattggaaagctgattgtgactaaacagatcgggggagacggtatgatggacatcactgacacttacaagttccaggagggtcaggaggaagagcgcttggcgctcgaaaccgccctgatgtacggcgccaagaaaccgcttaacactgagggagtcatgaagtctcggagcaacgtggatatggacttcgaagttgagaacgcggtgctcggaaaggatttcaaactgtccatcaccttccggaacaacagccacaatcgctacactattactgcgtacctgagcgcgaatatcaccttctataccggagtgccgaaggcggagttcaaaaaagaaaccttcgacgtgactcttgagccattgagcttcaagaaggaagcagtgctgatccaggcaggggagtacatgggacaacttctggagcaagcaagcctgcatttctttgtgactgcgcgcattaatgaaactcgagatgttctcgccaagcagaaatcgaccgtcctcactatcccggagatcattatcaaggtgcgtggcacgcaggtcgtggggtccgatatgactgtgaccgtccagttcactaacccactgaaagagactctgcgcaacgtctgggtgcaccttgacggacctggcgtgactaggcctatgaagaagatgttcagagagatccggcctaatagcactgtccagtgggaggaagtctgccgcccatgggtgtcgggtcataggaagctgatcgcctccatgtcctcagactccctgaggcacgtctatggagaacttgacgtccagattcagcggcggccgtcaatg

SEQ ID NO: 9476 - DNA, 2196 bp, synthetic construct
  misc_feature 1..2196: note = source = /note="Description of Artificial Sequence: Synthetic coding sequence"
  source 1..2196: mol_type = other DNA
atgagtgagacaagccgaactgcattcggaggcaggcgtgccgtgccaccaaacaattccaacgccgctgaagacgatctgccaactgtcgagctacagggagtggtaccgaggggcgttaatctgcaagagttcctaaacgtgacatcagtgcatctgttcaaggagagatgggacactaacaaggtagaccatcatacagacaagtatgagaataacaagctcattgttcggaggggccagagtttctatgtccaaatcgacttcagccgaccttacgatcccaggcgggatcttttccgagttgagtacgtgatcggcaggtacccccaggagaataagggaacttacattcccgtgccaatagtctcggaacttcagagcggaaagtggggtgccaagatcgtgatgcgggaagatcggtctgtgaggctgagcatccagtccagtcccaaatgtatcgtggggaagtttcgcatgtacgtggcagtgtggaccccctatggggtcctgaggaccagccgcaatcccgagactgacacctacatcctattcaatccttggtgcgaagatgatgctgtatacctagacaacgagaaagagcgggaagagtatgtcctcaacgacatcggagtcatcttctacggggaagttaacgacatcaagacgcggtcctggagctatggccagttcgaggatgggattctggacacatgtctctacgtgatggaccgggcgcagatggacctgagcggcaggggaaatcccatcaaagtgagccgggtcggatcagccatggtcaatgctaaggatgacgagggcgtgctggtgggaagctgggataacatatacgcctatggagtgcccccatccgcttggaccggaagtgtggacatcctgctcgagtataggtccagcgaaaacccagtgcgctacgggcagtgttgggtgttcgctggcgtgttcaatacctttttaaggtgtctcggaattcccgcccgcattgtgacaaactacttcagcgcccacgacaacgatgccaacctgcagatggacatcttcctggaagaggatggtaacgttaattcaaagcttacgaaggactcagtgtggaactatcactgttggaacgaagcatggatgactagacctgacctgcccgtgggatttgggggttggcaggccgtggattctaccccccaggagaactccgatgggatgtacaggtgtggccctgcctctgtgcaggccattaagcatgggcacgtgtgctttcaatttgacgcacccttcgtgttcgctgaggttaacagcgacttaatttatatcaccgcgaagaaggacggtactcacgtggtcgagaatgtggatgccactcacataggaaagctcattgttacgaaacagatcgggggcgatggcatgatggacattaccgatacgtacaagttccaggagggccaagaggaggagcgtcttgcattggagacagcattaatgtacggcgctaaaaaaccgctgaacacagagggagtaatgaagagtagatccaacgtggatatggacttcgaggtggaaaatgctgtgcttggaaaggacttcaaactgagtatcacctttcgcaataacagccataatcggtacaccattactgcctatctgagtgccaacataaccttctacactggcgttcccaaggctgaattcaaaaaggaaacctttgacgttaccttagagccgctttcctttaagaaagaggcggtgcttattcaggctggagagtacatgggacagctgctggagcaggcaagcttgcatttcttcgtgacagcccggatcaacgaaactagggatgtcctggcgaagcagaagagtacagtcctcacaattccagaaatcattatcaaggttagggggacccaggtcgttgggtctgacatgacagtaacagtgcaatttactaacccgttaaaagaaaccctccggaacgtctgggtacacctcgacggacccggtgtgacccgcccgatgaagaagatgtttcgcgaaatcaggcctaatagtacggtgcagtgggaggaggtctgtaggccatgggtgtcagggcataggaagctgatcgcctccatgtcctccgacagtctcagacacgtgtacggggagttggatgtgcagattcaaagaagacctagcatg

SEQ ID NO: 9477 - DNA, 2196 bp, synthetic construct
  misc_feature 1..2196: note = source = /note="Description of Artificial Sequence: Synthetic coding sequence"
  source 1..2196: mol_type = other DNA
atgtcagaaactagcaggaccgctttcggagggaggcgagccgtgccacccaataactccaatgcagccgaggatgacttaccaaccgtagagcttcagggtgtcgtgccgagaggagtcaatctgcaagagttcctgaacgttaccagcgtccacttgttcaaagagcgttgggacacgaataaagtggaccaccacacagataagtatgagaataacaaactcatcgtgagacggggtcagagtttttacgtgcagattgatttctcccgcccctacgacccgagacgcgacctatttcgcgttgagtacgtcattggacgctacccccaggagaacaaaggcacttatatccccgtcccaattgtttcagagctgcagagcggcaagtggggagcaaaaatcgtgatgcgggaagacagaagtgtgcggttgagtatccagtcttctcccaagtgcattgtagggaaatttaggatgtatgtcgcagtttggaccccatacggggtcctacggactagccgtaatcccgaaactgacacgtacatcctgttcaacccttggtgcgaggacgacgccgtgtacctcgataacgagaaggagagggaagaatatgtgctcaacgatataggtgtaatattttacggggaggttaatgatataaagacccggtcatggtcctacggtcaattcgaggatggaatcctagatacttgtctgtacgtgatggatagggctcagatggacctatccggacgggggaatcccattaaggttagccgtgtgggatcggccatggtcaacgccaaagacgatgaaggggtgctggttgggtcttgggacaacatctatgcttatggtgttccaccttctgcatggactggttctgtggatatcctactggagtatcgctcttctgagaaccccgtccgttacggtcagtgctgggtgttcgcgggagtgtttaacacatttttgcggtgtctgggtatcccggcacgaatcgtgactaactattttagcgctcacgataatgacgcaaatctccagatggatatttttctagaagaagacggaaacgtgaattccaaattgaccaaggactctgtgtggaattatcactgttggaatgaagcctggatgacccgaccagaccttcccgtcgggtttggtggttggcaggccgtagacagcactccacaggagaacagtgacggcatgtacaggtgcggtcctgcgagcgttcaggcaataaagcacggccacgtgtgttttcagttcgatgctcccttcgtgttcgctgaggttaactcggatctgatatacattaccgcaaagaaagacggtacacacgtggtagaaaacgtggacgccacccacatagggaagctgattgtcaccaaacagattgggggcgatggtatgatggatattacggacacttataagtttcaggaggggcaggaagaagaaaggctggcgcttgagactgccctcatgtacggggcaaaaaaaccactgaacaccgaaggagttatgaaatctcgcagcaacgttgatatggatttcgaagtggagaacgctgtattaggaaaggatttcaagttgtctattacttttcgcaataactcgcataataggtacacaataactgcttacctgagtgcaaatataaccttttacacgggggtaccaaaggcagagtttaagaaagagaccttcgatgttaccttggaaccactgtcattcaagaaagaggcagttctaatccaagccggcgagtacatgggccagttgctggagcaggctagcctgcacttcttcgtcaccgcaaggattaacgagacgagggatgttctggccaaacaaaagtctactgtcttaactattcctgagataatcattaaggtcagagggacacaggttgtcggatcagacatgacagtcactgtgcagttcaccaaccccctgaaggagacgctgagaaatgtgtgggtgcatcttgacggccctggagtgacgcggccgatgaagaaaatgttcagggaaatacgcccaaactccacggtgcagtgggaggaagtatgtcggccatgggtcagtggacaccgcaagctgattgcatccatgtctagcgactccttaaggcacgtgtacggcgaactggacgtacaaatccagaggagaccttcgatg

SEQ ID NO: 9478 - DNA, 2196 bp, synthetic construct
  misc_feature 1..2196: note = source = /note="Description of Artificial Sequence: Synthetic coding sequence"
  source 1..2196: mol_type = other DNA
atgtctgaaacttccaggactgcgtttggaggcagacgagctgtcccaccaaacaattccaacgccgccgaggacgacttgcctactgtggagctgcagggggtggtacctcgaggtgtgaacctccaggagttcctcaatgtaacctccgtacatttgttcaaggagcgctgggatacaaataaggtggaccaccacaccgataaatacgaaaataacaaactaattgttaggaggggacagtcattctacgtccagatcgacttttctcgcccatacgaccctcgacgcgatctattccgggtcgaatacgttattggccgttacccccaggagaataaggggacatacatccctgtgcccatcgtctcagagttgcagtctggtaaatggggcgccaaaatcgtaatgcgcgaggacaggagcgtgaggctgagcatccaatctagccccaagtgcatcgtggggaaatttcgtatgtacgttgcagtgtggaccccttacggagtgctgaggacttctcggaaccccgaaacagacacatacattctgttcaatccctggtgcgaagacgatgctgtctaccttgacaatgagaaagagcgcgaggagtatgtgctgaatgacatcggcgtaattttttatggcgaagtgaacgatatcaagacgcgctcttggagctatggccaattcgaggatggaatacttgatacctgcttatacgttatggaccgagcacagatggacctctcaggccgtggaaatcccatcaaagttagtcgcgttggctcagctatggtcaacgcaaaggatgacgagggagtgttggtgggtagctgggataacatctatgcctacggggtgcccccatcagcatggaccggatcggtagatatactcctcgaatatcggtccagcgagaatccagtacgatatgggcagtgttgggtattcgccggcgttttcaacaccttcctcagatgtctcggcatcccggcccgcattgtaaccaactattttagtgctcacgacaacgacgccaatttgcagatggatatcttccttgaagaagacggcaatgtgaattcaaaactgactaaggactcagtgtggaattaccattgttggaacgaggcctggatgaccaggcctgatttgcctgtggggtttgggggatggcaggcagttgactccactccccaggaaaacagtgacgggatgtacagatgcgggcccgcgtctgtgcaagccatcaagcacgggcatgtatgctttcagttcgacgccccctttgtcttcgcagaagttaatagcgatcttatttacatcactgcgaaaaaggatgggacacatgtggttgaaaacgtggacgcaacacatatcggaaaactcattgtgaccaagcaaattggaggcgatggtatgatggatatcacggacacgtacaagttccaagaaggccaagaagaggaaagactggccctagaaactgcgcttatgtatggcgcaaagaagcccctgaacacggaaggagtcatgaagtcccgcagcaacgttgatatggactttgaagttgagaatgcggttcttggaaaagacttcaaactcagtatcacttttcggaacaattcacacaatagatacaccattactgcgtatttgtcagctaatattactttttataccggtgttccaaaggcggaatttaagaaagagacgttcgacgtcacactcgaaccactgagcttcaaaaaagaggcggtactcatccaagccggcgagtatatgggtcagctgcttgaacaggctagtctccatttttttgtgactgccagaattaatgagacccgcgacgtattggctaagcagaaatcaaccgtgctcacaatacctgaaattatcatcaaagtccgcggtacacaggtagtaggtagtgatatgacagtcaccgtccagtttacaaacccactgaaggaaactttgcggaacgtgtgggtgcacctggatggacccggtgttacccgccccatgaaaaaaatgtttagagaaatacggccaaactcaacagtgcagtgggaagaggtgtgccgaccctgggtctcagggcatagaaagctgattgcctccatgtcttctgatagtctgaggcatgtctacggagagcttgacgtccaaattcagcggagaccttctatg

SEQ ID NO: 9479 - DNA, 2196 bp, synthetic construct
  misc_feature 1..2196: note = source = /note="Description of Artificial Sequence: Synthetic coding sequence"
  source 1..2196: mol_type = other DNA
atgtctgagactagtcgcaccgcctttggcggccgcagagcagtgcctcccaacaactcaaacgccgccgaggatgaccttcctacagttgagctgcaaggtgtagtgccaaggggtgtgaatctgcaggagttcctgaatgtcacctcagttcacttgttcaaggagcgctgggacaccaacaaggtagaccaccatactgataaatacgagaataacaagctaattgtgcgaagaggacagtccttttatgttcagatcgatttcagccgcccctacgatccccgccgagacctgttcagagtggaatatgtaattggcaggtacccccaggaaaacaagggcacctatattccagtgcctattgtgtccgaactgcagtctggaaaatggggcgccaagatagtgatgagagaagacaggtctgtgcggctttctattcaatcttctcctaagtgcatagtgggtaaattcaggatgtatgtagccgtgtggaccccctacggagtcttgagaactagtcgaaaccctgagactgatacttatatactgtttaatccctggtgtgaggacgacgctgtttatctagataacgaaaaagagcgtgaagagtatgtgctgaacgatattggtgtgatcttttacggcgaagttaacgatattaaaacaagatcctggtcctatggacaattcgaggacggtatactggacacctgtctgtacgtcatggatcgtgcccagatggacctttccgggaggggaaacccaattaaagtgagccgagtcgggtccgctatggtgaacgctaaagatgatgagggagtattagtgggaagttgggataacatatacgcctacggcgttcccccaagcgcttggacaggctctgtagacatcctgctagagtacagaagtagtgaaaatcccgtgcgctacggacagtgctgggtgttcgctggcgtcttcaatactttcttacgatgcctgggaatccccgcccggattgtgactaactacttctctgctcacgacaatgacgccaatctgcagatggacattttcctggaggaagatggtaatgttaacagcaagctaactaaggatagcgtttggaactaccactgctggaacgaagcatggatgacacgtcctgatctgcccgtcggattcggcggctggcaggccgtggactctaccccccaggagaactctgatggcatgtaccgatgcggcccagcatccgtgcaagccataaaacacggtcatgtttgcttccagttcgatgctcccttcgtcttcgccgaggtgaatagtgacctgatctacataacagcaaagaaggacgggacacatgtggtggagaatgttgatgccacacacataggaaagcttatcgttacaaaacagataggcggggatgggatgatggatatcactgacacttataaattccaggagggtcaggaggaggagcgactggctctggagaccgctctgatgtatggagccaagaaacccctgaatactgagggcgtgatgaaaagccggtctaatgtcgacatggatttcgaagttgagaatgccgttctaggcaaagattttaagctctctatcacattcaggaacaatagccacaaccggtacactattaccgcctacctgtctgcaaacattactttctacaccggggttcctaaagccgagttcaaaaaggagaccttcgatgtgacactggagccactctcattcaagaaggaggccgtgcttatacaggctggcgaatacatgggccaactgctcgagcaggcaagcctgcacttctttgtgaccgctcgcataaacgagaccagagatgtgcttgcaaagcagaaaagcacagtgttgaccattcccgaaattattattaaggtgcgaggcactcaagttgtgggctctgatatgactgtcaccgtgcagttcaccaatcctctaaaagagaccctgcgaaacgtgtgggtgcacctggacggacctggagtgacacgtcctatgaaaaaaatgtttcgggagatccgccctaactctacagtccagtgggaggaggtttgtcgaccctgggtttctggccaccgtaagctgatcgcctctatgtcctctgatagccttcgtcatgtttacggcgagctggacgtgcagatccagaggaggccctccatg

SEQ ID NO: 9480 - DNA, 2196 bp, synthetic construct; identical to SEQ ID NO: 9476
  misc_feature 1..2196: note = source = /note="Description of Artificial Sequence: Synthetic coding sequence"
  source 1..2196: mol_type = other DNA

SEQ ID NO: 9481 - DNA, 2196 bp, synthetic construct
  misc_feature 1..2196: note = source = /note="Description of Artificial Sequence: Synthetic coding sequence"
  source 1..2196: mol_type = other DNA
atgtcagaaacttcccggactgcatttggtggtagacgtgccgttcctcccaacaattccaacgccgcagaagatgatctgccaactgtggaactgcagggtgtggtgcctagaggagtgaacttgcaagaattcctgaacgtcactagcgtgcatctgtttaaagaacggtgggacaccaataaggtcgatcatcacactgataagtacgaaaacaacaagctcattgtgaggcgcggccagagcttttacgtgcagatcgatttttcaagaccctacgatccgcggagagatctcttccgagtggaatacgtcatcggtcgatacccacaagaaaacaagggcacctacattcccgtccctatcgtttcggaacttcaaagcggaaagtggggagccaaaattgttatgagagaagatcgctcagttcgcctctcgatccaatcctcacctaagtgtatcgtgggaaagttcagaatgtacgtggctgtgtggactccttacggagtgttgcgcacctcgcggaaccccgaaactgatacctacattcttttcaacccatggtgtgaagatgatgcagtctacctggacaatgaaaaggagcgtgaagaatacgtgttgaacgatataggcgtgattttctatggcgaagtgaatgacattaagactcgttcttggtcatacgggcaattcgaggacggcattctggatacttgtctttacgtgatggatagagcacaaatggatctttcgggcagaggcaaccccatcaaggtgtcccgggttggttcggccatggtgaatgcgaaagatgacgaaggggtcctcgtcggttcgtgggacaacatatacgcttatggtgtccctccttcagcctggaccggttcggtggacattctgctcgaataccgttcgtccgagaacccagtgagatacggacagtgttgggtgttcgctggagtgtttaacacttttctgaggtgccttgggatccctgcgcggatcgtgactaactacttctccgcacacgataacgacgcaaacctgcagatggatatctttctcgaagaagatgggaacgtcaattcaaaactgaccaaggattcggtctggaattatcattgttggaatgaagcatggatgactcgacctgaccttcctgtgggatttggaggctggcaagcggtggatagcactcctcaggagaacagcgacggaatgtatagatgcggacctgccagcgtgcaagctatcaaacacggacatgtgtgtttccaattcgatgcaccatttgtctttgccgaagtgaattccgatctcatctacatcactgcaaagaaggacggaactcatgtcgtggagaatgtcgatgcgactcatatcggcaagctcatcgtgactaagcagataggaggcgacggtatgatggatatcaccgatacgtacaagtttcaagaggggcaagaagaagaacgactggcactcgaaactgccctgatgtacggagcaaagaagccactgaatactgagggagtgatgaagtcaagaagcaacgtggatatggactttgaagtggaaaacgcagtgctggggaaggactttaagttgtctattacttttaggaataactctcacaaccgctacaccatcaccgcatacttgtccgcaaatatcacgttttacaccggggtccctaaggctgagtttaagaaagagacttttgacgtgaccctggaacctctttcgtttaagaaggaagccgtcctgattcaagctggagaatacatgggacagctgctcgaacaggcctcgctgcacttctttgtgaccgcaagaataaacgaaacgcgagacgtgcttgcaaagcaaaagagcaccgtgcttaccattccagagattatcattaaggtgcgcggcacccaagtggttggaagcgatatgacggttactgtgcagttcaccaatcccctcaaggaaaccctgagaaacgtgtgggtgcatctggacggacctggagtcacccgccccatgaaaaagatgtttagagaaatcagaccaaactccaccgtccaatgggaagaagtgtgccgaccttgggtgtcaggccataggaagctcattgcttctatgtccagcgactccctgagacacgtgtacggcgagctggatgtgcaaattcaacgcagaccaagtatg

SEQ ID NO: 9482 - DNA, 2196 bp, synthetic construct
  misc_feature 1..2196: note = source = /note="Description of Artificial Sequence: Synthetic coding sequence"
  source 1..2196: mol_type = other DNA
atgagcgagacgagcaggacggccttcggcggaaggagagcggtccctccaaacaattccaacgccgccgaggatgacctgcctacagtagagctccagggtgtcgtgccaagaggcgtgaacctgcaagagtttttgaacgtaacctctgtgcacttgtttaaggaaaggtgggacacaaataaggtggaccatcacacagacaagtacgagaataacaaactgattgtgagacgcggtcaaagtttctatgttcagatcgacttttctagaccttatgacccgcgccgcgacctctttcgcgtggaatacgtcattggtcgctatccgcaggagaataagggcacctatatcccagtgccaatcgtgtcagagttgcagtcaggtaaatggggagcaaaaatagtgatgagggaggacagaagcgtcaggctcagtatccagtcctctcctaagtgtatcgtgggaaagtttaggatgtacgtggctgtgtggacaccatatggtgtcttgagaactagcaggaatcccgaaacagacacctatatccttttcaatccatggtgcgaagatgacgctgtatacctcgacaacgagaaggagagggaggagtacgttcttaacgatattggcgtcatattctatggcgaagtaaacgatattaagacccgctcttggagttacggccagtttgaggatggaatcctcgatacctgtttgtatgtaatggatagagcccagatggatctgagtggtcgcggcaatcctattaaagttagtcgcgtgggctctgcaatggtgaacgccaaagacgatgaaggcgtgttggtcggttcatgggataatatctatgcatacggagtgccacctagtgcgtggacaggaagcgttgacattctgctcgaatatagatcatccgagaaccccgtaaggtacggtcagtgctgggtgttcgccggcgtgtttaatacctttctccgctgtctcggcatcccagctaggatagtgaccaactactttagcgctcatgacaatgacgccaatctccaaatggacattttcctggaggaagatggcaacgtaaattccaagctcactaaggatagcgtctggaactatcattgttggaacgaggcctggatgacgaggcccgaccttcccgtgggtttcggcggatggcaagctgtcgactctaccccgcaagagaatagcgacggcatgtatagatgcggaccggcctctgtgcaggccatcaagcatggacacgtatgcttccaatttgatgctccctttgttttcgcggaagttaatagtgacctgatctatatcaccgctaagaaagacggcacccacgtggtcgaaaacgtggacgccacccatatcggcaagctgatcgtgacgaagcagataggcggagacggaatgatggacatcacagatacatataagttccaggagggccaggaagaagaacgcctcgcgctcgaaactgccttgatgtacggtgccaagaagccgctcaacaccgagggtgtcatgaagagtaggagcaacgtcgacatggacttcgaggtggaaaacgctgttctgggtaaggactttaagctttctattacgttcagaaacaatagtcacaacagatatactatcacggcatacctttccgccaacatcaccttttatacaggcgtgccaaaagccgaattcaaaaaggagacattcgacgttacactggaaccccttagctttaagaaggaagccgtactgattcaggcaggcgagtacatgggccaattgttggaacaagcaagcctgcatttcttcgtgaccgcacgcatcaacgagaccagagacgtgcttgccaagcagaaaagtactgtgctcacgatacctgagattataataaaggtgcgcggcacccaggtcgtgggcagcgacatgaccgtgacggtccaattcaccaatccgctcaaggagacgctcagaaacgtctgggttcatcttgatggcccaggagttacaagacctatgaagaaaatgttcagggaaatccgcccgaatagcacagtgcagtgggaagaggtatgcagaccttgggtgtccggacatcgcaaacttatcgcatcaatgtcttctgattccctgaggcacgtctatggagaactggacgtacagatccagaggagacccagtatg

SEQ ID NO: 9483 - DNA, 2196 bp, synthetic construct
  misc_feature 1..2196: note = source = /note="Description of Artificial Sequence: Synthetic coding sequence"
  source 1..2196: mol_type = other DNA
atgtcagaaacctcgagaactgcatttgggggtcgcagagcggtgccacccaataactcgaatgcggctgaagatgacctgccgactgtggagctgcaaggagtggtgccgcggggagtcaacttgcaggagttcctgaacgtaacctctgtccaccttttcaaggagcggtgggatacgaacaaagtcgatcatcatacggacaagtatgagaacaataagctcatcgtgcgccgcggtcaatcgttttacgttcagatcgatttctctcggccgtacgatccgcgcagagatctcttcagggtggaatacgtgatcggaagatacccccaggagaataagggcacttatatccccgtcccaatcgtctcagagctgcagagcggaaagtggggcgcaaagattgttatgcgggaagatcggtcggtgcggctgtctatccagtcctcgccaaaatgcattgttggaaagttcagaatgtatgttgctgtgtggactccttacggagtgttgcgaacttcaagaaatcctgaaaccgatacgtatatcttgttcaatccgtggtgcgaggacgatgctgtctacctcgataacgaaaaggaacgcgaagagtacgtgctgaacgacatcggagtcatcttttacggcgaagtgaatgacataaagactcgctcctggtcatacgggcagttcgaggacggaatcctcgatacgtgcctgtacgtcatggaccgagctcagatggacctcagcggacgcggtaacccaatcaaagtgtccagggtgggttcggccatggtgaatgcgaaagacgacgaaggcgtcctggtgggatcgtgggacaacatttacgcctacggagtcccaccgagcgcttggaccggatccgtggacattctgctggagtacaggtcctcggaaaatccggtgcgctacggccagtgctgggtctttgcaggggtgttcaatactttcctccggtgtctgggtatcccggcaagaattgtgaccaactactttagcgcacatgataacgacgcaaacctgcagatggatatcttcttggaagaggacgggaacgtgaactcgaagctgaccaaagattcagtgtggaactaccattgctggaacgaggcctggatgacccgccctgaccttccggtgggattcggaggctggcaggccgtggactcgactcctcaagaaaacagcgatggaatgtaccggtgtggaccagcttcagtccaggccatcaagcatggacacgtgtgttttcaattcgacgcgccgttcgtgtttgcagaggtgaattcagatctgatctacataaccgctaagaaggatgggactcatgtggtggaaaatgtggatgcgactcacatcggaaagctgatcgtcactaaacagatcggaggcgacggaatgatggacattaccgacacctacaagttccaagagggtcaggaggaagaacgtctcgccctggagacggcgctcatgtacggagccaagaaacccctgaatactgaaggagtcatgaagtcacgcagcaacgtggacatggacttcgaggtggaaaacgcagtactgggcaaggacttcaagttgtcgattaccttcaggaacaactcgcacaaccggtacaccatcaccgcctatctgtccgccaacatcactttctacaccggggtgcctaaggcggagtttaagaaagagacttttgacgtcacgctggaaccgctctccttcaaaaaagaggcggtgctgatccaggccggtgagtacatggggcagctgctcgaacaggcgtccctccatttctttgtgacggccagaatcaacgaaacgcgggatgtgcttgcgaagcaaaagagcacggtgctgaccatcccggaaatcattatcaaagtcagaggaacccaagtggttggatccgacatgaccgtaactgtgcagttcaccaatccgctgaaggaaactctgcggaacgtgtgggtccacctggacggtcccggagtcactagaccaatgaagaagatgttcagggaaattcgcccgaattcgaccgtgcaatgggaggaagtgtgcagaccgtgggtatctggccatcgcaagctcatcgcatcaatgtcgtcggattccctccggcacgtttacggggagcttgacgtacagattcaacgtcgaccttcgatg

SEQ ID NO: 9484 - DNA, 2196 bp, synthetic construct
  misc_feature 1..2196: note = source = /note="Description of Artificial Sequence: Synthetic coding sequence"
  source 1..2196: mol_type = other DNA
atgagtgagacttcaaggactgcattcggtggacgtagggccgtccctcctaataacagcaacgcagccgaagacgacctgcccactgtcgagctccagggcgttgtcccacgcggcgtcaatctgcaggagttcctgaacgtgactagcgtgcacttgtttaaagaacgctgggataccaacaaggttgaccaccatactgataagtatgagaataataagctcatcgtgaggaggggccagtccttctacgtacaaattgacttcagcagaccctacgatcctcgtcgcgacctgttccgtgttgaatacgtgataggtcgttacccccaggaaaacaagggaacctatattcccgtgcctatcgtgagcgagttgcagagtggcaaatggggtgcaaagatagtgatgcgtgaggatcgtagtgtgagattgagcattcagtcctctcccaagtgcatcgtcggaaagtttcgcatgtacgtagcagtttggactccctacggcgtgctgagaactagtaggaatccagagacagacacctacatcctgttcaacccttggtgcgaggacgacgctgtgtacttggataacgaaaaggaacgtgaggaatatgtactgaacgacatcggagtgatcttctatggagaggtgaacgatatcaaaaccaggtcatggtcatacggccagtttgaggatggaattcttgatacatgtctgtacgtaatggatagggcccagatggatctgtccggtcgtggtaacccaataaaggtctccagggtcggctccgccatggtgaacgctaaagacgacgagggtgtcctggtgggttcttgggataatatctacgcctacggcgttcctccctctgcatggaccggtagcgtcgatatcctgctggaatatcgctcatcagagaacccagtgaggtacggtcagtgctgggtattcgctggtgtattcaatacatttctgcgttgccttggaatcccagcccgcatcgtgactaactacttctctgcacacgacaacgacgccaaccttcagatggacatatttctggaggaagatggaaatgtaaactcaaaattgacaaaggattctgtgtggaactaccattgttggaacgaagcctggatgacaaggccagatctgcctgttggtttcggaggctggcaagccgtggactccaccccccaagagaactccgatggaatgtatcgttgtggccctgcctctgttcaggccatcaagcatggccacgtatgtttccaattcgacgctcccttcgtgttcgctgaggtgaactcagacctcatctatatcactgctaagaaggatggcactcacgtggtggagaacgtcgatgctacacatattggaaaactcattgtcactaagcagatcggtggagacggaatgatggacatcaccgatacctacaagtttcaagagggccaagaagaggagagactggccctggaaaccgccctcatgtacggtgcaaaaaagcccctgaacactgaaggcgtaatgaagtctcgctcaaacgttgatatggattttgaagtggagaatgctgtcctgggcaaagactttaagctgtcaatcaccttccgcaataacagtcacaatcgctatacaataactgcttacctgagtgccaacattaccttttacaccggcgtccctaaggccgaattcaagaaagagacctttgatgtaaccttggaacctctgtcttttaagaaggaggccgtcttgatccaggctggcgaatacatgggtcaattgctcgaacaagcctccctccatttctttgtaactgctaggattaacgagactcgcgatgttttggctaagcaaaaatctacagtattgaccatccctgaaatcatcatcaaagtgagaggcacacaggtcgtgggttccgatatgactgtgaccgttcagttcaccaaccccctgaaagaaactctccgtaacgtatgggtgcacctggacggtccaggtgtcaccaggcccatgaagaagatgttcagggagatccgccccaactccaccgtacagtgggaggaagtttgtagaccttgggtgagcggtcacagaaagctcattgcatccatgagcagtgattcccttaggcacgtatacggtgagctcgatgtccagatccagcgtagaccctccatg

SEQ ID NO: 9485 - DNA, 2196 bp, synthetic construct
  misc_feature 1..2196: note = source = /note="Description of Artificial Sequence: Synthetic coding sequence"
  source 1..2196: mol_type = other DNA
atgagcgagacttccagaactgcatttggaggccgccgtgcagtgcctcccaacaattcgaacgccgccgaagatgaccttcctactgtcgaactccaaggagtggtgccgagaggtgtcaaccttcaggaatttctcaatgtcacttcagttcatctgttcaaggaacgctgggacaccaacaaagtggatcaccacacggataagtacgagaataacaagctgatcgtaagaagaggacaatccttttacgtgcaaatcgatttttcccggccatacgatccaagacgggatctgttccgagtggaatacgtgattggcagataccctcaagaaaacaaaggcacctacatacctgttccaattgtcagcgagctccagtcgggaaaatggggggcaaagatagtgatgcgcgaggatcgcagcgtcaggctttcaattcaaagctcacctaagtgtattgtgggtaaattcagaatgtacgtagccgtgtggactccgtacggggtgcttcggactagcagaaatcctgaaacggacacctacattttgtttaatccttggtgtgaggacgatgcggtgtacctcgataatgagaaggaaagagaggaatatgtcctcaacgatattggcgtgatcttctacggtgaagtaaacgacatcaagaccaggtcctggtcttacggacaatttgaagatggtattctggatacgtgcctgtacgttatggatcgggcacagatggacctttccggtagggggaaccctattaaggtcagtagggtgggaagtgcaatggtaaatgcaaaggatgacgaaggtgtgttggtagggtcatgggataacatctatgcatacggagtgccaccctcggcttggaccggatcggttgatatcctgcttgaataccgctcgtcggagaacccagtcagatacggacagtgttgggtgtttgcaggagttttcaatacttttctccgatgtttgggaattccggcacgtattgtgaccaactatttctcggcccatgataacgatgctaaccttcaaatggacattttcttggaagaggacggaaacgtgaacagcaagctcaccaaagattccgtgtggaactaccattgctggaacgaagcctggatgactcgaccggaccttccagtcgggttcggcggttggcaagcagtggactcaacgcctcaagagaactcggatggaatgtaccggtgtggtccggcatcggtgcaagcgataaagcacggtcatgtgtgcttccagtttgatgcacctttcgtctttgcggaggtgaatagcgatctgatttacattaccgccaagaaagatggaactcatgtggtcgaaaatgtggacgcaacgcatataggtaagctgattgtcaccaagcagataggcggtgatggaatgatggatattaccgacacgtacaaatttcaagaaggtcaggaggaagaaaggctggcacttgaaaccgctcttatgtacggagctaagaaaccactgaacaccgaaggggtgatgaagtccagatcaaatgtggatatggactttgaagtggagaacgcagtgctgggcaaggatttcaaactttcgattaccttccgcaacaactcacacaaccggtacactattaccgcatacctgtctgccaatatcactttctacactggcgtcccaaaggcagaattcaagaaggagacttttgacgtcaccctcgaaccccttagctttaagaaagaagcggtgctgatccaagcgggtgagtatatgggacaacttctggagcaggcatccctccactttttcgtgactgcacggattaatgaaacccgcgacgtgctggccaagcagaagtcaactgtgctgactatccccgaaatcatcataaaggtgagggggacccaggttgtcggaagcgatatgaccgtcactgtgcaatttaccaatcctcttaaagaaaccttgcgtaatgtctgggtgcatctggacggacctggcgtgactcgcccaatgaagaaaatgtttcgtgaaatcagacctaactcaaccgtccaatgggaagaagtgtgtcgaccatgggtgtccggccatcggaaattgatcgcctccatgtcgtccgactcactccgccatgtctacggggagcttgacgtccagatccagaggcgcccatcgatg

SEQ ID NO: 9486 - DNA, 2196 bp, synthetic construct
  misc_feature 1..2196: note = source = /note="Description of Artificial Sequence: Synthetic coding sequence"
  source 1..2196: mol_type = other DNA
atgtcagaaactagcagaactgcttttggaggcagacgcgccgtgccacctaacaatagtaacgccgctgaagatgacctcccgactgtggaactgcagggcgtggtcccgcgcggcgtgaacctgcaagagttcctcaacgtcacgtcggtgcacctgttcaaggaacgctgggacactaataaggtcgaccaccacactgacaaatacgagaacaataagctgatcgtccggcggggacagtccttctacgtgcagattgattttagccgaccatacgacccgagaagagatctgttcagggtcgagtacgtgatcggccggtacccgcaagagaataagggaacctacatcccggtgccgatcgtgtcggaacttcaatcggggaaatggggcgccaagattgtgatgcgcgaggatagatcggtgcgcctgtccatccagtccagcccaaaatgcattgttggaaagttccgcatgtacgtggcggtttggaccccttacggagtcttgcggacttcccgcaatccagagactgatacttatatccttttcaacccgtggtgtgaggatgacgcggtgtacttggacaatgagaaagaacgggaagagtacgtcctgaatgacatcggcgtgatcttctacggagaagtcaacgatatcaaaactagatcctggtcatacggacagttcgaagatggaatcctggatacgtgcctctatgtgatggatcgagcacaaatggacctgtccggcagggggaacccaatcaaagtgtcgagagtgggttccgccatggtgaatgccaaggatgacgagggagtgcttgtgggctcctgggataacatctacgcctacggcgtgcctccgtccgcctggaccggttccgtggatatcttgctcgaatacaggtccagcgagaatccagtgcgctacggacagtgctgggtctttgccggcgtattcaacaccttcctgaggtgcctgggaatcccagcccggatcgtcactaattacttctcggcccatgacaatgacgccaaccttcaaatggacatcttcctggaggaggacggcaacgtgaattccaagctgaccaaggattccgtgtggaattaccactgctggaatgaagcgtggatgaccagaccagatctgccagtgggattcggaggatggcaggccgtcgatagcactccgcaggaaaactcagacggcatgtaccggtgtggcccagcctccgtccaagctatcaagcacggacacgtctgtttccaattcgatgccccctttgtctttgccgaggtcaactcagacctgatctacattaccgccaagaaagacggcacccatgtggtggaaaacgtggatgcgactcatatcggcaaactgatcgtgacgaaacaaatcggtggtgacggcatgatggatattaccgacacgtacaagttccaagaaggccaagaagaggagcggctggcattggaaactgcgctcatgtacggggccaagaaacctttgaacaccgaaggtgtcatgaagtcgcgctccaatgtggacatggacttcgaagtggagaatgcagtgctgggtaaggacttcaagctctctatcaccttcaggaacaactcacacaatagatacactattaccgcttacctgtcggctaacatcactttctacacgggcgtgcctaaagcggaattcaagaaggaaacgtttgatgtgaccctcgagccgctcagcttcaagaaagaagcagtcctgatccaggccggggaatacatgggtcaactgttggagcaggcatcgctgcatttcttcgtgaccgcccgcattaacgaaacccgcgacgtgctggccaagcaaaaatctactgtccttaccatcccggagattatcatcaaagtccggggtactcaagtggtgggatccgacatgactgtcaccgtgcagtttacgaacccgctgaaggaaacgctgcggaacgtgtgggtgcacctcgacggacccggggtgacccggcctatgaagaagatgtttagagagatcagacctaactcgaccgtgcagtgggaggaggtgtgcagaccgtgggttagcggccaccgcaagctgatcgcctcgatgtcctccgattcactgcggcatgtctatggtgaacttgacgtgcagattcagcgaaggccgtcgatg

SEQ ID NO: 9487 - DNA, 2196 bp, synthetic construct
  misc_feature 1..2196: note = source = /note="Description of Artificial Sequence: Synthetic coding sequence"
  source 1..2196: mol_type = other DNA
atgtccgagacctcacgcacagcttttgggggtcggcgcgctgtgccaccaaataatagtaacgccgccgaggacgacctaccaacagtagagcttcaaggagtggttccaagaggagtcaacctccaggagtttttgaatgtgacaagtgtccacctctttaaagagagatgggataccaataaggtggaccatcacactgataaatatgagaacaacaagctgattgtccgccgggggcaatctttttatgtgcagatcgattttagtagaccctacgatccaagaagagacttattccgggtagaatacgtcattggccgctacccacaagaaaacaagggtacttatatccccgtacccatcgttagtgagttacagagtgggaaatggggtgctaagatagtgatgagggaagatagaagtgttagacttagtattcaaagctcccccaagtgtatcgtggggaagtttaggatgtatgtcgcggtctggaccccttacggggttctgcggacaagtcgaaaccccgaaactgatacctacatattgtttaacccctggtgtgaagacgacgcggtctacctagacaacgagaaagaaagggaagagtatgtgctcaatgatattggcgttattttctatggagaggtcaatgacataaaaacgcgcagctggtcatacggccaattcgaggatgggattttggatacttgtctgtacgtaatggacagagcgcagatggacttatccggccgaggtaacccaatcaaagtgtcaagagtggggagcgcgatggtaaatgctaaggatgatgagggggtgctggtgggcagctgggacaatatctatgcctatggcgtgccacctagtgcttggaccgggtccgtcgatatcctgttagaatatcgaagctccgagaacccggtccggtacggccagtgttgggtcttcgctggggtttttaacactttcctccggtgcctaggaatccccgcgcgcattgtgaccaactacttttccgcacacgataatgacgccaaccttcagatggatatcttcctggaagaggacggcaatgtgaacagcaagctcaccaaggactctgtgtggaattatcactgctggaatgaggcatggatgactcgacccgacctacccgtggggtttgggggctggcaggccgtggacagcactccccaggagaattctgacggtatgtacaggtgcgggcctgcttcagttcaggcgataaaacatggccacgtttgctttcaatttgatgccccattcgtgttcgccgaggtgaactcagacctcatatatattactgccaaaaaggacggcacccacgtggtcgaaaatgtagatgctactcatatcggtaagctcatcgttacaaagcagataggtggcgatggaatgatggacattactgacacttacaagtttcaggaaggccaagaggaagaacgactcgctctagaaactgccctgatgtacggggccaaaaagcccctcaacactgagggggtgatgaagtccagatctaacgtggacatggacttcgaagtcgagaatgccgtcctggggaaggacttcaagctctcgattacattcaggaataacagccataacagatacactattaccgcctatctctccgctaacattactttctacaccggcgtgcccaaagctgagttcaagaaggaaacgtttgatgtgaccctcgagccattatcctttaaaaaggaagccgtcctgatccaggcaggtgagtatatgggccaactcctggagcaagcttcactgcacttcttcgtcaccgctcggattaacgagactagggatgtcctagcgaaacaaaagagcaccgtgctgactatcccagagataatcatcaaagtacggggaactcaagttgtgggaagtgatatgacagtcaccgtgcaattcacgaatcccctcaaggagaccctccggaacgtgtgggtacacctggacggaccaggagtcacacgcccaatgaaaaagatgtttagagaaatccgtcccaactctacagtacagtgggaagaggtgtgtcggccctgggtgagcggacacagaaaactaattgcttctatgtcgtcggatagtttacggcatgtctacggggagctcgacgtgcagatccagaggcggccttccatg

SEQ ID NO: 9488 - DNA, 2196 bp, synthetic construct
  misc_feature 1..2196: note = source = /note="Description of Artificial Sequence: Synthetic coding sequence"
  source 1..2196: mol_type = other DNA
atgtcagaaacctcccgcacagcgttcggcggacgccgggccgtaccaccaaataactcaaatgctgccgaggatgaccttcctaccgtggaactgcagggtgtcgtgcccagaggtgtgaacctgcaggaattcctaaacgtcaccagcgtgcatctgtttaaagagagatgggacacaaacaaggttgatcaccacactgataaatacgaaaataataagctcatagtgcgcagagggcagagtttttatgtgcagatcgacttttccagaccttacgatccccggagagatctgttccgcgtcgagtacgttataggccggtacccacaagaaaacaagggcacatatatcccggtccccatcgtatcagaactgcagtccggcaagtggggggcgaaaattgtgatgcgagaggacaggtcagtgcgcctgagcatccaaagctctccaaagtgcattgtggggaaattccgaatgtacgtcgcagtttggaccccatacggggtacttagaacatctcgaaatcctgaaactgacacttacattctgtttaatccatggtgcgaagacgacgccgtgtatctggataacgagaaagaaagggaggaatacgtactaaatgatattggcgtcatattctacggtgaggtcaacgatatcaagacccgcagttggtcgtacggacagtttgaggatgggatcctggacacctgcctgtatgtaatggacagggcccagatggacctctccggccgtggcaacccaatcaaagtgtcgcgcgtcggcagcgccatggtgaacgctaaagacgatgagggagtgctagttggatcctgggacaatatctacgcatatggggtgccacccagtgcatggactggttcagtggatattctcctggaataccggtccagtgagaacccagtgaggtacggccagtgctgggtatttgcaggggtcttcaacaccttcctgaggtgtctaggtatccctgctagaatcgtgacgaattatttcagcgcacatgataatgatgccaatctgcagatggatatcttcctggaggaagatggcaatgttaactccaagctcactaaggatagcgtgtggaactatcattgttggaatgaagcttggatgacacgtccagaccttcctgtgggttttggcggctggcaggccgtcgatagtaccccacaggagaactccgatggaatgtaccgctgcggacctgctagtgtacaggcaatcaagcacggccatgtttgcttccagtttgacgcaccgttcgttttcgccgaggttaactctgatctcatttatattacagcaaagaaagatgggacccacgtggtagagaatgtggacgcgacccatataggcaaactgatcgtgaccaagcaaatcggaggggacggcatgatggatatcaccgatacgtataaatttcaggaagggcaggaagaggagcgcctcgcactcgaaaccgcactcatgtacggagcgaaaaagcctctgaacactgaaggtgtcatgaaatcacgtagcaatgtggacatggatttcgaggtggaaaacgccgtcctcgggaaggattttaagctgtcaatcaccttccgaaataacagccataacagatataccataacagcatatctgagcgccaatatcaccttctacacaggcgtccctaaggccgagtttaagaaggagaccttcgatgtcactctggagcccctgtcttttaaaaaggaagccgtcctgatacaggcgggcgaatacatgggacagctcctcgagcaggcctcattgcacttcttcgtcacagcaagaattaacgagactcgtgacgtcctggccaagcagaaaagtaccgttcttaccatccctgagattatcatcaaggtgcggggcacacaggtggtggggtcagatatgacggtcactgtgcagtttaccaatccccttaaggagacccttaggaatgtgtgggtccatctagacggaccaggtgtcacccgacccatgaaaaagatgttcagagagatcagaccaaatagtaccgtgcaatgggaggaagtgtgccgtccttgggtgtcaggccatcgaaagttgattgcatctatgagttccgactccctgaggcatgtgtacggagagctggacgtgcaaattcagcgccgccccagcatg

SEQ ID NO: 9489 - DNA, 2196 bp, synthetic construct
  misc_feature 1..2196: note = source = /note="Description of Artificial Sequence: Synthetic coding sequence"
  source 1..2196: mol_type = other DNA
atgtcagaaacttcccggacagcattcggcggtcgccgcgctgttcctcccaacaactcaaacgccgctgaggacgacctacccaccgttgagttgcagggagttgtgccccgtggcgtgaaccttcaggaatttcttaacgtgaccagtgtgcatcttttcaaggagaggtgggatactaacaaagtggatcatcatacggataagtatgagaacaacaagctgatagtgcgtaggggccaatccttttacgtacagatagacttctcgcgaccgtatgacccacgccgagatctcttccgcgtagagtatgtaattggtaggtacccccaggagaacaaggggacttacatcccagtgcccatagttagcgagcttcagtctggcaagtggggggctaaaatcgtgatgcgcgaggaccgctcggtgcgtttgtcgattcagtctagcccaaagtgcatagtcgggaagttcagaatgtacgtcgccgtctggaccccgtacggagtgttacggacctctaggaacccagagactgatacgtacattttgtttaatccatggtgcgaagacgacgcagtttatcttgataacgagaaggagcgggaagagtatgtgcttaatgatattggggtcatcttctatggtgaggtgaatgatatcaaaacccgctcatggtcttatgggcagttcgaggatggcatactggatacctgtctttacgttatggatagggcacaaatggatctcagtggacgcggcaatccgattaaggtgtcccgggttggctccgcaatggtcaacgctaaagacgacgagggcgtgcttgtcggctcatgggacaatatctacgcttacggggtgcccccctcggcctggacaggttccgtcgacatcctccttgaatataggtcgtccgagaaccctgttcggtacggacaatgttgggtgtttgcaggtgtgttcaatacctttttgagatgtttagggattcctgcacgaatcgtcaccaattatttctctgcacatgacaatgacgcaaacctacagatggacatcttcttggaagaagatggcaacgtcaattcgaagcttactaaggattctgtgtggaactaccactgttggaacgaggcttggatgacacgaccagatctgccggtgggctttgggggttggcaggccgtcgattccacaccccaggaaaactcggatggcatgtaccgttgcggtcccgctagtgttcaggctattaaacacggacatgtttgctttcagtttgacgccccattcgtctttgctgaagtcaactcagatctaatctatattactgccaaaaaggacggtactcacgttgtcgaaaacgttgatgctacccatataggtaagttgatagtcactaagcagattggaggtgatggtatgatggacatcaccgatacttataaattccaggagggacaagaagaggaacggctagctctcgagactgctctaatgtacggggctaaaaagccgttgaatacggaaggagttatgaaatcccggtctaacgtcgatatggacttcgaagtcgaaaacgccgttctcggcaaagatttcaagctgtccatcacgtttcgcaacaactctcataatcgttatacgattactgcatacctgtctgccaacattactttctacacaggcgtgcctaaggcagaattcaagaaagagaccttcgacgttactctagagcccttgagcttcaagaaggaggctgtgctcatacaagccggtgagtacatgggccagctgctcgaacaggcaagcttgcacttcttcgtgacggctcggatcaatgaaacccgcgacgttcttgcaaaacagaaatctacggtgcttaccatacctgaaatcatcattaaggtccgcggcacacaggttgttggtagtgacatgacagttactgtacaattcaccaatccactgaaggaaacccttcgcaacgtgtgggtgcacttggatggaccaggcgtgaccaggcccatgaagaagatgttcagggaaatccgacctaattctacggtacagtgggaagaggtttgtcgaccttgggtgtctgggcatcgtaaattgattgcctccatgtcttccgactcactgcgccatgtatatggcgagctagatgtccagatacaacggcggccttcgatg

SEQ ID NO: 9490 - DNA, 2196 bp, synthetic construct
  misc_feature 1..2196: note = source = /note="Description of Artificial Sequence: Synthetic coding sequence"
  source 1..2196: mol_type = other DNA
atgtccgaaaccagccggacggccttcggaggaagaagggccgtacctccaaacaatagcaacgctgcagaggacgacctgcccactgtcgagctgcagggagtcgtcccaagaggagtgaacctgcaagaatttctgaacgtgacatctgtccaccttttcaaggaacggtgggataccaacaaggtggaccatcacaccgataagtacgaaaataacaagctaatcgtcagacggggacagtctttctatgtgcagatcgatttcagccgcccgtatgatcctagaagagacctgtttagagtggagtatgtgattggaagatatccgcaagagaacaaggggacttatatacccgtgcctattgtgtccgaactacagtccggtaagtggggggcgaagatagtgatgagggaagatcggtccgttaggctgagcattcagagttctccgaaatgcatagtggggaagttccgtatgtatgtggcagtctggacaccctacggcgtgttgcgcaccagccggaaccccgagaccgatacttacatactctttaatccttggtgcgaggacgacgccgtctatctggataacgaaaaggagcgggaagaatacgtactgaacgacatcggcgtcatcttctacggggaggttaatgacatcaaaactcgatcttggtcatacggacagttcgaggacggcattttggacacatgcctctacgtgatggatcgcgcgcagatggacctatctggtcgcgggaaccctatcaaagttagcagagtggggtctgcgatggtgaatgccaaggacgatgagggggtgctagtcggatcgtgggataacatttatgcttacggagtgccacccagtgcatggaccggctcagtggacattttgctagagtaccgatccagcgaaaatccagtgagatatggccagtgctgggtttttgccggagtgtttaacaccttcctgaggtgcttgggcatccctgcccgcatcgtaactaactacttttctgcccacgacaatgacgcaaatctgcaaatggacattttcctcgaggaagacgggaacgtgaactccaaactgactaaggactcggtgtggaactaccactgctggaacgaggcctggatgacacgacccgatctgccggtcggctttggcggttggcaggcggtagattctacaccacaggagaactccgacgggatgtataggtgcggccccgcttcggtgcaagctattaagcacggccatgtctgcttccagtttgatgccccctttgtcttcgccgaagttaattccgatctgatttacattacagcaaagaaagatggaactcacgtggtggaaaacgtggatgctacccatattggcaaactgatcgtaaccaagcagatcggcggggacggaatgatggacatcacggacacttacaaattccaggagggccaagaagaagagaggttggccctcgagaccgcgctgatgtacggcgcaaagaaaccgctgaacaccgaaggcgtcatgaaatcacgttccaatgtggatatggatttcgaagtcgaaaacgcagtcctcgggaaggatttcaagctctccattactttccggaataatagtcataaccggtacaccattaccgcttacctgtctgcgaacataactttttacacaggcgttcctaaggctgaatttaagaaggaaacctttgacgttactcttgagccgctgagcttcaagaaggaggccgtcttgatacaggccggggaatatatgggtcagctactggaacaggctagcttgcacttttttgtaaccgctaggatcaatgagacaagggatgttctggcaaagcagaagagtacggtcttgacaattccggaaattatcataaaagttagagggacacaggtcgtaggatcagatatgaccgtcacagtgcagttcacaaatccgctgaaggaaacactgcgcaatgtctgggtccatctagatggccccggagttactcgtccaatgaagaagatgtttagagaaatacggcccaacagcaccgtccagtgggaggaagtctgccggccgtgggtgagcggccacaggaagctgatcgccagcatgtcttcagactcgctccgccacgtgtacggtgaattggacgtgcaaatccagaggcgacctagcatg

SEQ ID NO: 9491 - DNA, 2196 bp, synthetic construct
  misc_feature 1..2196: note = source = /note="Description of Artificial Sequence: Synthetic coding sequence"
  source 1..2196: mol_type = other DNA
atgagcgagacgtccaggacagccttcggtggacggcgagccgttcctccaaacaatagtaacgccgcagaagatgacctccctactgttgaactccagggcgttgtcccacgcggcgtaaatcttcaggaattcctgaacgtgacctcagtgcacctgttcaaggagcgatgggacaccaacaaggtcgatcatcataccgacaaatatgagaataacaagctgatcgtacgtcgcggtcagtctttttacgtgcagattgactttagccggccctacgaccctaggagggacttattccgggtcgagtacgtgatcgggcgatatccgcaagaaaacaaaggtacttacatccctgtgccaatagtctcagagctgcagtccgggaaatggggggctaagattgtgatgcgggaggacagatcggtcagactgtccattcagtcgtcccccaagtgcatagtgggaaaattcaggatgtacgttgccgtttggactccctacggcgtgttacggacttctcggaatcctgagactgatacctacatcttattcaacccttggtgtgaggatgacgcggtgtaccttgacaacgagaaggagagggaggaatacgtcctcaacgatataggcgttatcttttacggagaggtgaacgacattaagacacgatcatggagctatggccagttcgaggacggaattctggacacttgtctctacgtgatggatcgggcgcagatggatctttccgggcgcggcaaccctatcaaggtctcccgggtgggtagcgccatggttaatgccaaagacgacgaaggtgtgctggtgggctcttgggataacatctatgcgtacggagttccccctagcgcgtggacaggctcagtggacatactgttggagtatcgcagcagcgaaaatcctgtacggtatggccagtgttgggtatttgcaggggtctttaataccttcttgcggtgtctgggaatcccagccaggatagtaaccaattacttctctgcccacgataacgatgctaacctccagatggacatcttcctggaggaagatgggaacgtgaattctaagctgacaaaagactccgtatggaattaccactgctggaacgaggcttggatgacacgtccagacctcccagtgggtttcggtggctggcaggccgttgattcaacgccccaagagaacagcgacggcatgtacaggtgtgggcctgcatctgtgcaggctatcaagcacggccacgtatgtttccagtttgatgcaccattcgtgtttgccgaagtcaactccgatttaatctacatcactgccaagaaggacgggacccacgtggtggaaaatgtggacgcaacacacattggaaagctaatagtgactaagcagataggtggagatgggatgatggacatcacagacacttataaattccaggaaggacaagaggaagaaagattggccctggaaactgctttgatgtacggagcaaagaaaccccttaacaccgagggggtgatgaaatcgcgctctaatgtagatatggacttcgaagtggagaacgcagttctaggtaaagactttaagttgtctattacatttagaaacaactctcacaacagatacacaatcacggcctatctttctgccaatatcactttttatacgggagtgccaaaggccgaatttaagaaggagaccttcgacgtaacattagagcccctatccttcaagaaggaggccgtgctgattcaagccggggaatacatggggcagcttcttgagcaggcctcactccacttttttgtgaccgctcggatcaacgagacaagagacgtgctggctaaacagaagtcaacggtcctgacgatccctgagatcattataaaggttcgggggacccaggtggtaggaagcgacatgaccgtgaccgtgcagtttaccaaccctttgaaggaaaccctgcgaaatgtctgggttcatctcgatggcccaggagtcaccaggccgatgaaaaagatgttccgcgagattagacccaactccacagtacagtgggaggaggtctgccggccatgggtttctggacatcgcaaactgattgcaagtatgtcttccgactcactgcgacacgtatatggggagttagatgtccagatccagcggagaccttctatg

SEQ ID NO: 9492 - DNA, 2196 bp, synthetic construct
  misc_feature 1..2196: note = source = /note="Description of Artificial Sequence: Synthetic coding sequence"
  source 1..2196: mol_type = other DNA
atgtccgaaacctcaagaaccgcattcggcggacgaagggcagtccctccaaataacagcaacgcagccgaggacgatctgccaaccgtcgagctccaaggagtcgtgcctagaggcgtgaacctgcaggagtttcttaacgtgacgtcggtgcatttgtttaaagaaaggtgggacaccaacaaggtggaccaccacaccgataagtacgaaaacaataagctcattgtgagacgcggtcagagcttctacgtccagatcgattttagcagaccatacgaccctcgcagagatcttttcagagtggagtacgtgattggcagataccctcaagagaacaagggaacctacattccagtgccgatagtttccgaattgcagtccggtaagtggggtgcaaaaatcgtgatgagagaggatcgatcggtgcgcctgtcgatccagtcctccccaaagtgtatcgtgggaaagtttagaatgtacgtcgccgtgtggacgccttacggtgtcctgcgtacttcgagaaacccagagactgatacctacattctgtttaatccttggtgtgaagatgatgcggtgtaccttgataacgaaaaggaaagagaagaatacgtcctgaatgacatcggagtgatcttttacggagaagtgaacgacataaagactagaagctggtcctacggacagttcgaagatggtatactggacacctgtctgtacgtgatggaccgcgctcagatggatctgtccgggaggggtaatcctatcaaagtctccagagtgggatcggcgatggtgaacgccaaggatgatgagggtgtccttgtcggttcgtgggacaatatctacgcctacggtgtcccccctagcgcgtggaccggcagcgtggatattctgctggaatacaggtcatccgaaaacccagtcagatacggacaatgctgggtgtttgcaggagtgttcaacacctttctcaggtgtctcggaatcccagcaagaatcgtgaccaactatttcagtgcacatgataacgacgcaaatcttcagatggacatatttctcgaagaagatggaaatgtgaacagtaaacttaccaaggattcggtgtggaactaccattgctggaacgaagcatggatgactcggcctgaccttcctgtggggttcggaggatggcaggcagtggatagcaccccccaagaaaacagcgatggtatgtatagatgcggtcctgccagcgtgcaagctatcaaacacgggcatgtgtgcttccagtttgacgcaccctttgtgtttgcagaagtgaactccgatctgatctacataactgccaaaaaggatggtactcatgtggttgagaatgtcgacgcgactcatattggaaagctcatcgtgactaagcaaatcggcggtgatggcatgatggatattacggacacctacaagtttcaagaaggacaagaagaggagcgactggctcttgaaacggccctgatgtacggcgctaagaaacctctgaataccgaaggggtgatgaagtcgcggtcaaacgtagacatggatttcgaggtggaaaatgcagtgctggggaaagacttcaaactttcaattacctttcggaacaattcccacaacagatacaccattaccgcctacctctccgcaaacattaccttttacaccggagtgcctaaagcagagtttaagaaggagactttcgatgtgaccctcgagcccctgtccttcaagaaggaggcagtgctcatccaggcaggagaatacatgggtcagcttttggaacaagcaagcctgcacttttttgtgactgccagaattaacgagactcgggacgtgcttgccaagcaaaagtcgactgtcctgactattcctgagattatcattaaggtgcgcgggactcaggtggtgggctccgatatgactgtgactgtgcaatttactaacccccttaaggaaaccctgcggaatgtgtgggtgcaccttgatggtcctggtgtgacccggccaatgaagaaaatgtttcgggaaatccgtcctaattccaccgtgcaatgggaggaggtctgtcgaccgtgggtatcgggccatcggaagttgattgccagcatgtcgtcggactcgctcagacatgtgtacggcgagctggatgtgcagatccaaagacggccatccatg

SEQ ID NO: 9493 - DNA, 2196 bp, synthetic construct
  misc_feature 1..2196: note = source = /note="Description of Artificial Sequence: Synthetic coding sequence"
  source 1..2196: mol_type = other DNA
atgagcgaaacctcgcggaccgctttcggaggaagaagagcggttcctccgaacaattctaacgcagccgaggacgacctgccgactgtggagctccaaggagtggtccctcgtggagtgaacttgcaagaattcctgaacgtgacttcggtgcacctcttcaaagaacgttgggatactaacaaggtcgaccatcacaccgacaagtacgagaacaacaagttgatcgtccggagaggacagagcttttacgtgcagatagactttagcagaccgtacgatccaaggagagacttgttccgcgtcgagtacgtgattgggaggtacccacaagagaacaaaggtacctatatcccggtgccaattgtgtcggaactgcaatcaggcaaatggggggctaagatcgtgatgcgggaagatcgctccgtgcgcctgagcattcagtcgtcgccaaagtgcattgtggggaagttcagaatgtacgttgcggtgtggaccccgtacggtgtcctcagaacttcccggaaccccgagacggacacctacatcctgtttaacccctggtgcgaggatgatgccgtctacctcgacaatgagaaggagcgggaggagtatgtgctgaacgatatcggagtgatcttctacggggaggtgaatgacattaagaccaggtcatggagctacggacaattcgaagatggaatcctcgatacttgcctgtacgttatggaccgcgctcagatggacctgagcggaaggggaaatccaatcaaggtgtcccgtgtgggctccgcgatggtcaacgctaaggacgatgaaggagtgcttgtcgggtcctgggacaatatctatgcctacggagtcccgccgtcggcctggaccggcagcgttgacatcctgctggagtaccgctcctcggaaaaccctgtccggtacggtcagtgttgggtctttgccggagtgttcaatacttttctccggtgccttggtatccccgcgagaatcgtcaccaattacttctccgctcacgataacgacgcgaacctccagatggacatttttctcgaggaagatggcaatgtgaattcgaaactgactaaggattcggtgtggaactaccattgctggaacgaggcatggatgacccgcccggacttgcctgttggctttgggggttggcaggccgtggacagcacgccacaggaaaactccgatggcatgtaccgctgcggaccggcctcggttcaggcaatcaagcatggacatgtctgcttccagttcgatgcgcctttcgtgttcgccgaagtgaatagcgacctgatctacatcactgccaagaaggacggcacccatgtggtcgagaacgttgatgccacccatatcggaaaactcatcgtcaccaaacagatcggaggcgacggcatgatggatatcactgatacttacaagttccaagagggccaagaagaagaaagactggcactggaaaccgcgcttatgtacggagcgaagaagccgctgaacaccgaaggagtcatgaaatcgagatccaacgtggacatggactttgaggtggagaacgctgtgctgggaaaggacttcaagctgtccattaccttccgcaacaattcccataaccgatacactatcaccgcctacctgtccgcgaatatcaccttctacacgggcgtgccaaaagcggaattcaagaaggaaacttttgatgtgaccctcgaaccactctcattcaagaaagaagcggtgctcatccaagcgggagaatacatgggacagctcctggagcaggcatccttgcatttctttgtcactgccagaatcaatgagactcgggacgtgttggcgaagcaaaagagcactgtgctgacgatcccggaaatcatcatcaaggtgcggggtacccaggttgtgggttcggacatgaccgtgaccgttcagttcactaacccgcttaaggagactctgcggaatgtgtgggtgcatctcgacggacctggggtgacccgccccatgaaaaagatgttccgggagatccggccgaacagcactgtccagtgggaggaagtgtgtaggccctgggtgtcgggacaccgcaagctgatagcctcaatgtcgtcggattcactgagacacgtgtacggagaactcgacgtgcagatccaacgccgcccgtcgatg

SEQ ID NO: 9494 - DNA, 2196 bp, synthetic construct
  misc_feature 1..2196: note = source = /note="Description of Artificial Sequence: Synthetic coding sequence"
  source 1..2196: mol_type = other DNA
atgagcgaaacttccagaaccgcctttggcggacgtagagctgtcccccccaacaattcaaatgccgcggaggacgacctgcccacggtcgagctgcagggcgtggttccgcgaggcgtgaatctccaggagttcctgaacgtcacaagcgtgcatctgtttaaagagcgttgggatactaacaaggtcgaccatcatacagacaagtacgaaaataataagttgattgttcgacgggggcagagtttctacgtgcaaattgacttttcgcgtccctacgaccctagaagggacctgtttcgggtggagtatgtgatcggccggtacccgcaggagaataaaggcacatatattccggtgccaattgttagcgagctacagagtggcaagtggggagcgaagatagtaatgagagaagaccggtcagtgagactcagcattcaaagctccccgaagtgtatagtgggtaaatttcgaatgtacgtcgcagtgtggacaccatacggggtgctaagaacgtcaaggaacccggaaaccgacacttacatactcttcaatccatggtgcgaagatgacgccgtgtacctcgacaacgagaaagagagagaggaatacgtgttaaatgatataggtgtcatcttttatggcgaagtcaacgacatcaaaaccaggtcctggagctacggtcagttcgaggacggcattcttgacacatgtctttatgtgatggaccgggcacagatggacctgtccggcagaggaaaccctattaaggtgtcccgcgtgggctctgccatggtgaatgcaaaagatgacgagggtgtactagtgggatcctgggataacatctatgcttacggagtgccaccctcagcttggacgggcagcgttgacattctgttagagtacaggagcagtgagaatccggtgaggtacggtcaatgctgggtgtttgccggggtttttaatacctttcttcgctgtttgggcatcccggcgcgaattgtgacgaattactttagcgctcatgataatgacgccaatctccagatggacatctttctggaagaagatggtaacgtcaatagcaagctgacaaaggactctgtctggaattatcactgctggaatgaagcatggatgacgcggccagacctgcctgttggatttggaggatggcaggccgtcgacagcaccccacaggagaactctgacgggatgtaccggtgcgggccagcaagtgtgcaggctattaaacatggccacgtctgtttccagtttgacgcaccgttcgtcttcgctgaagtgaacagtgatttgatctatataactgcgaagaaggatggcacccatgtcgtcgaaaacgtggacgctacgcacattgggaagctgatcgtcaccaagcaaatcggaggcgacggtatgatggatattaccgatacatataagtttcaggaaggacaagaggaagaaagactcgctctggaaactgctctaatgtacggtgcaaagaagccgctcaacacagagggcgtcatgaaaagcagatccaatgtggacatggacttcgaagtggaaaatgcggtcttaggcaaagattttaagctatctatcacgttccgaaacaatagccataaccggtatacgatcaccgcctacctgtccgccaatattacgttttatacaggcgtacccaaggccgagtttaagaaagagaccttcgacgtgactctggaaccgttgagctttaagaaagaggccgtgctgatccaggcgggggagtatatgggacagctactcgaacaggcttcactgcatttttttgtgacagcccggatcaacgaaacaagggatgtgctggcaaaacaaaagagtactgttctaaccatcccggaaattatcatcaaggtgagagggacccaggtggtggggtccgacatgaccgtgaccgttcagttcactaacccgctgaaagagaccctgagaaacgtgtgggtgcacctcgacgggccgggggttactaggcccatgaagaaaatgttccgcgaaattcggcccaacagcactgttcaatgggaggaggtttgccggccatgggtttcggggcatagaaagctcatcgctagcatgagctcggacagcctgcgacacgtgtatggcgagcttgacgtgcagatccagaggcgaccctctatg

SEQ ID NO: 9495 - DNA, 2196 bp, synthetic construct
  misc_feature 1..2196: note = source = /note="Description of Artificial Sequence: Synthetic coding sequence"
  source 1..2196: mol_type = other DNA
atgtctgagacaagcagaaccgccttcggagggcgccgggccgttcctccaaacaacagtaatgccgctgaggacgacctgccaactgtggagctccagggagtggtacctcgcggagtgaatctacaggaatttttaaatgtgacatcggttcatctctttaaggaacgctgggacactaacaaggtggaccaccatacagacaaatatgagaataacaagcttatagtgcgccgcggacagtccttctacgtgcagattgacttctctcgcccctacgacccacgcagggatttgtttcgtgtggagtatgttattggtcgctacccccaggaaaataagggaacgtatattccagtcccaattgtctctgagctgcaatctggcaaatggggagccaagattgtgatgcgtgaagataggagtgtgagattatcaatacagtccagccccaagtgtatagtgggcaagttcagaatgtatgtggcagtctggacgccttatggtgttcttaggacctctagaaaccctgaaactgacacttatatcctgttcaatccctggtgcgaggacgatgcagtttatctcgacaacgaaaaggagcgggaggagtatgtattgaatgatattggtgtaatcttctatggggaagtaaatgatatcaagactcggtcctggtcctacggccagtttgaggacggcattctagatacttgcctatatgtgatggatagggctcagatggatctatctggtcgagggaacccgatcaaagtgtcgcgtgttgggtccgctatggtcaatgcgaaagacgatgaaggagtcctcgtcggatcctgggataatatctatgcgtatggcgtaccccccagtgcctggacaggctctgtcgatatcctccttgagtaccggagcagtgaaaaccctgtgcggtatggccagtgttgggtgtttgctggtgtcttcaatacattcctgagatgcctcggcattccagcacgcatcgtcacaaattacttctccgcccatgacaacgatgccaacctccagatggacatcttcctggaagaggacggtaacgtaaacagcaagctgacaaaggactccgtctggaactaccactgctggaacgaggcatggatgacccggcccgacctgcccgtaggcttcggcggctggcaagcagtcgactccactccccaggagaacagtgatggtatgtataggtgcggtcctgcctctgttcaggctatcaagcatggccatgtatgcttccagtttgacgccccgttcgttttcgctgaagtgaatagtgacctcatatacataacggccaaaaaggacgggacgcacgtagtcgaaaatgtagatgcgacccatattgggaagctcatagtaaccaagcagatcggaggcgatgggatgatggacatcacagacacatataagtttcaagaaggccaagaggaggaacggcttgctcttgaaacagcactgatgtacggagcaaaaaagccactgaacacagaaggagttatgaaaagccggagtaacgtcgatatggactttgaggtggagaacgcggtcttgggtaaagatttcaagctgtctatcaccttcagaaacaactcccacaatagatatacgatcacggcctacctgtccgccaatatcaccttctatactggagtccctaaggcggagtttaaaaaagaaactttcgacgttactctcgagcctctgagcttcaagaaagaagcagtcttaatccaggccggagagtacatgggacagcttcttgaacaggcatctcttcactttttcgtgaccgctcgcattaacgagacacgggacgtcctggccaagcagaagagcactgtgctgactattcccgagattataatcaaggtgcgcggaacccaggtagtgggctccgatatgactgtcacagtgcagtttactaaccctctcaaggagacactgagaaacgtgtgggtgcacctggatggccccggggtcactcgacctatgaaaaagatgtttcgcgaaatcaggccgaattcgaccgtccagtgggaggaggtgtgtagaccatgggtatccggccacagaaaactcattgcgtcaatgagtagtgacagtctacggcatgtatatggcgagctcgacgtgcagatacagagaagaccttcaatg

SEQ ID NO: 9496 - DNA, 2196 bp, synthetic construct
  misc_feature 1..2196: note = source = /note="Description of Artificial Sequence: Synthetic coding sequence"
  source 1..2196: mol_type = other DNA
atgagcgaaacctcacgaaccgcctttggaggccggagggcagtgcccccaaacaacagcaacgccgcagaagatgatctccctactgtggaactccaaggagtggtcccaagaggagttaacttgcaagaatttctgaatgttacctcagtgcacctgtttaaggaaagatgggacacgaacaaggtggaccatcataccgataagtacgagaacaacaagctcattgtgcgccgcggacaatccttttacgtgcaaattgatttttcgcgtccttacgatccacgaagagatctgtttcgcgtcgagtacgtgatcgggagatatccgcaagagaataaggggacttacatacctgtccctatcgttagcgaactgcaatctgggaagtggggagcaaagatcgtgatgagggaagataggtcggtgaggctttccattcagtcatccccaaaatgcatcgtcggcaagtttcggatgtacgtcgcagtgtggaccccgtacggagtgctccggacttcgagaaatccagaaactgacacgtacattctgttcaacccttggtgtgaggacgatgcagtgtacctggacaatgagaaagaacgggaagaatacgtgctgaatgacatcggtgtgattttctatggtgaagtcaatgacatcaaaaccagatcgtggtcatacggccaatttgaggatggcattctggatacctgtttgtacgtgatggatagagcacaaatggacctgtccggacgcggaaatccaatcaaagtgtcgcgcgtggggagcgcaatggtgaacgcaaaagacgacgaaggggtccttgtgggatcgtgggataacatctatgcctacggtgtcccaccaagcgcgtggaccggatcggtcgatattctgctggaatacagatcatcggagaatcccgtccgctacggccagtgttgggtgttcgccggcgtctttaacactttccttcgttgcttgggcattccggcaagaattgttactaattacttctcggcgcacgacaacgacgccaacctccaaatggacattttcttggaggaagatggtaatgtgaactccaagctgactaaagattccgtgtggaactaccattgttggaacgaagcatggatgacgcggcctgatctcccagtggggtttggaggatggcaggcagtggattcgacgcctcaggaaaattcagatgggatgtacagatgcggccctgctagcgtgcaggcaatcaagcatggacatgtctgttttcagttcgacgccccttttgtctttgcggaagtgaattccgatctgatctacattaccgcgaagaaagatggtactcatgttgtggaaaacgttgacgcgacccatattggtaagctgatcgtgaccaagcaaataggtggggatggtatgatggatatcactgacacttacaagttccaggaaggccaagaggaagaacgactggcacttgaaactgcattgatgtacggcgccaaaaagccattgaacacggagggggtgatgaagagcaggtccaacgtggatatggactttgaagtggaaaatgccgtccttgggaaggactttaaactttccattacctttagaaacaattcacataacaggtatactatcaccgcatacttgtccgcgaacataactttttacaccggagtgcccaaggcggagttcaagaaggaaacttttgatgtgaccctcgaacctctttcgttcaaaaaggaggccgtgcttatccaagcaggggagtatatggggcagctgcttgaacaagcctccctgcacttctttgtgactgctcgaattaacgagactagagatgttcttgccaagcaaaaaagcacggtgctgaccattccggagataatcatcaaggtcagagggactcaggtggtgggtagcgacatgactgtcaccgtgcagtttactaaccctctgaaggaaaccctccggaatgtttgggtccacctggacggccctggagtgaccaggccgatgaaaaagatgttcagagagataaggcctaattcaaccgtgcagtgggaggaggtgtgcagaccttgggtttcgggccaccgcaaacttatagcatccatgagctccgattcccttcggcacgtctacggagaacttgacgtccagattcaaagacgtccatcgatg

SEQ ID NO: 9497 - DNA, 2196 bp, synthetic construct
  misc_feature 1..2196: note = source = /note="Description of Artificial Sequence: Synthetic coding sequence"
  source 1..2196: mol_type = other DNA
atgtccgaaacctcccgcaccgcattcggcggcaggagagccgtgcctccaaataactccaacgccgcagaagacgatttacctactgtggaacttcaaggggtggtacctcgcggcgttaatttgcaggagtttttgaacgtcacctctgtgcacttgttcaaggagaggtgggacactaacaaggtggatcaccacactgacaaatacgaaaataataagcttatagtcagacggggccagtcgttctacgttcaaatcgactttagtcggccttacgacccgcggagagacttgtttagagtggagtacgtgatcgggaggtatccccaggagaacaaaggcacttacattccagtgccaatcgtatccgaattacagtctgggaaatggggtgccaagatagtaatgagagaggataggtctgtaaggctcagtatacagagctcccccaagtgcattgtcggcaaattcaggatgtatgtggcagtgtggactccctacggtgtgctgcgtacctctagaaaccccgaaaccgatacttacattctcttcaatccctggtgcgaggacgacgccgtctacctggataatgagaaggagagagaggagtatgtactgaatgacattggggtgatattttacggggaagtgaatgatatcaaaactcgatcgtggtcctatgggcaattcgaggacggaattctggatacatgcctatatgtcatggaccgggctcaaatggatctctccggaagaggcaaccccattaaggtgtctagagtaggatcagcaatggtgaacgctaaagatgacgagggtgtcctggtcggttcttgggataatatatatgcctatggagtgcctcccagcgcatggaccggttcagtggacatattattggaataccggtcttcggaaaaccccgtgaggtacggtcagtgttgggtctttgcaggcgtgttcaacacgttcctgcgctgccttggtatccctgcccgtattgtgaccaattatttcagtgctcacgataatgatgcaaacctacagatggacatatttctggaagaagacggcaacgtaaattccaagctgaccaaggactctgtgtggaactaccattgttggaatgaagcctggatgacccgcccggacctgcccgtagggttcggtggatggcaggcagttgacagtactccccaggagaacagcgacgggatgtataggtgcggccctgcctcagtgcaggctatcaaacacggacacgtgtgtttccagtttgatgccccatttgttttcgctgaagtgaattctgaccttatctacatcaccgctaagaaggatggaactcatgtggtggaaaatgtcgatgcaacgcacatcggcaagctcattgtcactaagcaaatcggcggggatggaatgatggatattacggacacttataagttccaagaagggcaggaggaagagcggctggccttggagacagcgcttatgtacggggcaaagaaaccccttaataccgaaggagtgatgaagtctcggagcaacgtggacatggattttgaggtggagaacgccgttttgggcaaggacttcaagctgtccattacctttcgcaacaacagccacaatcggtacaccataactgcctacctgtcggcaaacatcaccttctataccggtgttccaaaggccgagttcaagaaggaaacgttcgatgtcaccctggaacctctctcctttaaaaaggaagctgtgctgatccaggccggggagtatatgggacagcttctggagcaggcttcgttgcacttcttcgtgaccgcgcgtatcaacgagacgagggacgtgctggccaagcagaaaagcacggtgctcacaattcctgagattattattaaggtccgtgggacccaagtggtgggcagtgatatgacggttactgtgcagtttaccaacccactcaaagaaacactgcggaacgtatgggtgcatctcgatggcccaggtgtgacacgtccgatgaagaaaatgttccgtgaaatccggccaaatagcacagtacagtgggaggaagtgtgtaggccttgggtgagtggccaccggaagctgatcgcgtccatgagttcggactcccttcggcatgtatatggagagctggacgttcaaatccagcgcagaccgtctatg

SEQ ID NO: 9498 - DNA, 2196 bp, synthetic construct
  misc_feature 1..2196: note = source = /note="Description of Artificial Sequence: Synthetic coding sequence"
  source 1..2196: mol_type = other DNA
atgtcggagacttcgaggaccgcctttggaggtagacgtgcagtgcctccgaacaactcgaacgcggcggaggatgatctgcccactgtcgaactgcaaggtgtcgtgccgagaggtgtcaacttgcaggaattccttaacgtgactagcgtccatctctttaaagaacggtgggacactaacaaagtggatcaccataccgacaagtatgaaaacaacaagctcatcgtccgtcgaggccaatccttttacgtgcaaattgatttttcacggccatacgacccaagaagggacctgttcagggtggaatacgtgattgggcggtacccccaggagaataagggtacttacatcccagttcctatcgtgtccgagctgcaatccggaaaatggggcgcaaagatcgtgatgcgtgaagatagatctgttcgccttagcattcaaagctcccctaaatgtatcgtgggcaagttccggatgtacgtcgcagtctggactccatacggagtactgaggaccagccgtaatcctgaaaccgatacttacatccttttcaacccatggtgtgaagatgatgcagtgtacttggataacgaaaaggaaagagaggaatacgtgcttaacgacattggagtcatcttttacggagaagtgaatgatatcaaaaccagatcctggtcctacgggcaatttgaggatggaattctggatacctgtctctacgtgatggatcgtgcccaaatggatctctcaggacgcgggaatcctattaaggtatcgcgtgtgggttccgccatggtgaatgcaaaggacgatgaaggagtccttgtgggatcgtgggataacatatacgcatacggggtgccaccgtctgcctggaccggctccgtggatattcttctggaataccggagcagcgaaaaccctgtgcggtacgggcaatgttgggtctttgcgggagtgttcaatacctttcttaggtgtctgggaattccggcacggatcgtgactaattacttctcggcacatgataacgatgcgaacttgcaaatggacattttcctggaggaagatggcaatgtgaattcgaaacttactaaggatagcgtctggaactaccattgctggaacgaagcctggatgactaggccagatctccctgtgggtttcgggggttggcaagccgtggattcaaccccgcaagagaattcagacggcatgtaccgctgtggccctgcctcagtccaggcaatcaagcacggacatgtctgcttccagtttgatgcacccttcgtgtttgcagaagtcaactcagatttgatttacattaccgccaagaaggatggcacccacgtcgtcgaaaacgtggatgcaactcatatcggaaaacttattgtgacgaaacagattggaggagacggtatgatggatatcacggatacctacaagtttcaagagggccaagaggaggagcggcttgcgctcgaaactgcccttatgtacggagcgaagaagcctctgaacactgagggagttatgaagtcgcgatcgaacgtggatatggattttgaggtggagaacgcagtgcttggtaaagactttaaactttcaataacttttcgcaacaactcgcacaatcgatacactatcaccgcctacctttccgcaaacattactttctacactggggtgccaaaagcggagttcaaaaaggaaacctttgatgtgacccttgaaccactttcatttaagaaggaagctgtgctgatacaggcaggagaatacatgggacagctgctggaacaagcatccttgcacttctttgtcaccgcacggatcaatgagactagagatgtgttggcgaagcagaaatccaccgtgctgaccattccagagatcatcattaaggttcgcgggactcaagttgtcggttcagatatgaccgtgactgtgcagtttactaaccctcttaaggagactctgcggaatgtctgggtccatctggatggcccaggagtgactaggcccatgaagaagatgtttcgcgaaattagaccgaattccaccgtccagtgggaagaagtctgtagaccctgggtgtcgggacatagaaagctgatcgcttccatgtcctccgatagcttgcgccacgtgtacggggagctggatgtccagattcaacgtaggccatccatg

SEQ ID NO: 9499 - DNA, 2196 bp, synthetic construct
  misc_feature 1..2196: note = source = /note="Description of Artificial Sequence: Synthetic coding sequence"
  source 1..2196: mol_type = other DNA
atgtcagaaacctcccgcactgcgttcggtggtcgacgcgcggtcccgcctaataactcgaacgcggccgaggacgacctgcccacggttgagctccagggcgtcgtcccccgaggcgtgaacctccaggagttcttgaatgttacgtctgttcacttgttcaaggagcgatgggacaccaacaaggtggaccaccatactgacaagtacgagaacaacaagctgatcgtccgccgcggacagagcttctatgtgcagatcgatttttccagaccgtacgaccctcgccgtgatctctttcgcgtggaatatgtgatcggtcggtacccccaggagaacaagggcacctacattcctgtcccgatcgtcagtgagctgcagagtggtaagtggggtgccaagatcgttatgcgtgaggaccgctccgtacggctgagcattcagagcagcccgaagtgtatcgttggcaagttccgaatgtacgtggctgtctggacgccttatggcgtcctgcggaccagtcgtaacccggaaacagatacctacatcttattcaatccttggtgtgaggacgacgccgtgtacttggacaatgaaaaggaacgtgaggagtacgtccttaatgacattggtgttatattctatggcgaagtgaacgacatcaagacccgttcatggtcctatggtcagttcgaggacggcattctggacacttgcctctatgtcatggaccgggcacagatggacctgagtggtcgcggaaatccaatcaaagtctctcgcgtgggatccgcaatggtaaacgccaaggacgacgagggtgttctggtgggctcctgggacaacatctatgcctatggcgttccgcctagcgcgtggaccggtagcgtcgatatcctgctggagtaccgtagctctgagaacccagtccgttacggtcagtgctgggtgttcgccggtgtttttaatacatttctccgctgcctcggtataccggcgcgcattgtgacaaattacttctccgcacacgacaatgatgctaatctgcagatggatatcttcctcgaagaggacggcaacgtgaacagcaagctcactaaggactccgtgtggaactatcactgctggaatgaggcctggatgacgcggccggaccttcctgtcggcttcggcgggtggcaggccgttgatagtaccccgcaggagaactccgacgggatgtacagatgcggccctgcgtcggtccaggctattaagcacggccatgtttgctttcagttcgatgcccctttcgtctttgctgaagttaattccgatttgatctacattaccgctaagaaggacgggacacacgtggtcgagaacgtcgacgccacccatatcggtaagcttatcgtgaccaagcagattggtggcgatggcatgatggatatcaccgatacttacaagttccaggagggccaggaggaggagaggctcgcccttgagactgctctgatgtacggagccaagaagccgctcaacaccgagggtgtgatgaagtcaagatccaacgtcgacatggatttcgaggtcgagaatgccgtcttggggaaggacttcaaattgagcattaccttccgcaacaatagccacaatcgatacacgattaccgcgtacctgtcagctaacatcaccttctacaccggcgtgcctaaagccgagttcaagaaggagaccttcgacgtgactctggagcccctctcctttaagaaggaggctgtcctgatccaggccggcgagtacatgggtcagctgctggaacaggcctccctgcacttctttgtcaccgcacgcattaatgaaactcgcgacgttctcgcaaaacagaagtcgacggtgctgacgatccccgaaatcattatcaaggtgcgcggcacacaggtggtaggctctgacatgaccgttactgtccagttcactaacccgctaaaagagaccttgcgcaatgtctgggtgcatctggacggccccggcgtcacacgtccgatgaagaaaatgttccgcgagatacgtcccaacagcaccgtccaatgggaggaggtttgtcgcccctgggtctcgggccaccgtaagctcattgcttctatgagcagtgacagcttgcggcatgtctatggtgaattggatgttcagattcagcgccgcccctctatg

SEQ ID NO: 9500 - DNA, 2196 bp, synthetic construct
  misc_feature 1..2196: note = source = /note="Description of Artificial Sequence: Synthetic coding sequence"
  source 1..2196: mol_type = other DNA
atgtcagaaactagcagaactgccttcgggggacggagggccgtgcctcccaataactccaatgcagccgaggatgacctgcccaccgtggagttgcagggagtcgtacctcgcggagtaaacctgcaggagtttttaaatgttacttctgttcatctatttaaggagagatgggatacaaataaagtggaccaccataccgacaagtacgaaaacaacaagttgattgtcagacgcggtcagtccttttatgtccagatcgatttcagtcgtccctatgatcccaggcgcgatttgtttagagttgaatacgtgatcggccggtatcctcaggaaaataaaggcacttacatcccagtgcccatcgtgagcgagcttcagtcgggaaaatggggagccaagatagtgatgagagaggatcgatccgtgcgattaagtatacagtcctctccaaaatgcatcgtggggaagttcagaatgtacgtggctgtgtggacaccctacggggtgctaagaacctcccggaacccagagaccgacacgtacattttattcaacccatggtgtgaagacgatgctgtgtacctggacaacgagaaggagcgcgaagaatacgtgctcaacgatatcggggtcatcttctatggagaggtgaatgacattaaaaccagatcatggagctatgggcagttcgaggacgggattttggatacatgtctttacgttatggatagagcccagatggatttatccgggaggggcaacccgatcaaggtatccagggtcgggtcagccatggtcaacgccaaagacgatgaaggcgtgttagttggatcttgggataatatttatgcttacggagtaccgccatcggcttggacggggtcagtcgatattttgctggagtaccggagctccgagaaccccgtcaggtacggtcagtgttgggttttcgccggcgtattcaatacattcttacgctgcctgggtattcctgcccgcattgtgaccaattatttttccgcccacgataatgacgcaaatttgcagatggatatctttcttgaagaggatggtaacgtgaactctaagctcacaaaagattccgtttggaattaccactgttggaatgaagcctggatgacacgtcccgatctccccgttggcttcggcggttggcaggccgtcgactcgacacctcaggaaaactccgacggcatgtatcgctgtggacccgcttccgttcaggcgatcaagcacggccatgtctgctttcagtttgatgccccctttgtatttgccgaggtgaactctgatctgatatacatcaccgcaaagaaggacggaacccacgtcgtggagaacgtggacgctacccatatcggaaagctgatagttaccaagcagatcgggggcgatggaatgatggacataacagacacttataaattccaggaaggccaggaggaagagcgcctggccctagagacagctctgatgtacggagccaagaagcccctgaatacagagggggttatgaagtctagatccaatgtggacatggatttcgaagtcgaaaacgccgtcctaggtaaagactttaaactcagcataacattccggaacaacagccacaacaggtacactattacagcctatctatccgccaacataacgttctatacaggggtgcccaaggcagaatttaagaaggaaactttcgatgtaacgcttgagcccctatcatttaagaaggaggctgtgctgattcaggctggtgagtatatgggccaattactggaacaggcatctctccatttctttgtaactgctcgcattaatgagacacgggacgtgcttgccaagcagaagtccaccgtactaaccatccccgagatcattattaaagtcagaggaacccaggtggtggggtcagacatgacggtgacagtccagttcaccaatcctctgaaggagacattgcggaatgtctgggttcacttggatggaccgggcgtgacgagacccatgaagaagatgttccgagaaatccgtccaaacagtactgtgcagtgggaggaagtgtgcagaccctgggtctccggccatcggaaactgatcgcttccatgagcagcgactcgctgagacacgtttatggagagctcgacgttcagatccagcggcgaccctctatg

SEQ ID NO: 9501 - DNA, 2196 bp, synthetic construct
  misc_feature 1..2196: note = source = /note="Description of Artificial Sequence: Synthetic coding sequence"
  source 1..2196: mol_type = other DNA
atgtcggagaccagccgcacggccttcggggggcgcagggcagtgcctcctaacaatagcaatgctgccgaggacgacctacctacagtggagctgcagggcgtagttcctcggggggtgaacctacaagagtttcttaatgtgaccagtgttcacctgtttaaggagcgctgggacaccaacaaggtggatcatcacaccgataagtatgagaataacaagctaatagtccgaaggggtcagtccttttatgtgcagattgacttttctagaccctatgaccctagacgcgatctgttccgcgtcgagtatgttatcgggcgctatccgcaggagaacaagggcacctacatccccgtccctattgtctccgagctgcagtccggaaaatggggggccaagatcgtgatgcgggaagacagaagtgtgcgactgtcaattcagagcagcccgaagtgcatcgttgggaagttccgcatgtatgtggccgtatggaccccgtatggcgtgttacgtacaagccgaaatccagagaccgatacctacatcctgtttaacccctggtgtgaggatgatgccgtgtacctggataatgagaaagagcgcgaagagtatgtgctcaacgacatcggggtgatcttctatggggaggtcaatgacattaaaacgcggagttggagctatggacagtttgaagacggcatactggacacttgtctgtacgttatggatcgagcccaaatggatctttctggccgcggtaatccaatcaaagtttcccgggtgggtagtgccatggtgaacgctaaagatgatgagggggtcctggtgggctcatgggacaatatttacgcctacggcgtgccgccgtccgcctggaccggctcggtggatatcctactggaataccggagctctgaaaatcccgtgcgctatggccaatgttgggtgtttgccggcgtgtttaatacttttctgcgatgcctgggaattccagcccgcatcgtcacaaattatttttccgctcacgacaatgacgcgaacttgcagatggatatcttcctggaggaggatggaaacgtgaattccaaactgactaaggacagtgtatggaactaccattgttggaacgaagcctggatgaccaggcctgatctccccgtgggatttggcggatggcaggccgtggacagcacacctcaagaaaattcggacggaatgtaccgatgcgggcccgcgtcagtgcaagccataaaacacggccacgtatgtttccaattcgatgcgccttttgtgtttgctgaggtcaacagtgacctcatctatatcacagcaaagaaggatggtacacacgtggtcgagaacgtcgacgccactcatatcggaaaactgatcgtgacaaagcagattggtggagacggaatgatggacatcaccgacacttataaatttcaggaaggccaggaggaggaacggttggccctggagacagcactgatgtatggcgccaagaaaccattgaatacagagggcgtgatgaaaagtagaagcaacgtggacatggattttgaggtcgaaaatgccgtgttgggcaaagacttcaaactgtccatcactttccgaaataattcacacaatcggtataccatcactgcgtatctctctgctaatatcaccttctacactggtgtgccaaaggctgaatttaagaaggagacatttgacgtgaccctcgagcctttgtcttttaaaaaagaagccgtgctgatccaagctggtgagtacatgggtcagttgctggagcaagcctccctccacttctttgtcaccgcccgcataaacgagactcgggatgtgctggccaaacagaagtccacagttttgaccatccctgaaattattatcaaggtccgcggcacacaggtcgtgggcagtgatatgaccgtgactgtacagttcaccaatccattgaaagagacgctgcggaacgtatgggtccatcttgatggcccaggtgtgacccggcctatgaaaaagatgtttcgggagattagacctaacagcaccgtccagtgggaggaggtgtgccggccctgggtgagcggccaccgcaaattgatcgcgagcatgtctagtgactccctgcggcatgtgtatggagaactggacgttcagatccaaaggaggccaagtatg

SEQ ID NO: 9502 - DNA, 2196 bp, synthetic construct
  misc_feature 1..2196: note = source = /note="Description of Artificial Sequence: Synthetic coding sequence"
  source 1..2196: mol_type = other DNA
atgagcgagaccagtagaaccgcgttcgggggacgccgtgccgttcccccaaacaactctaatgctgcagaggacgatttgcctaccgtcgaattgcagggcgtggttccacgcggggttaaccttcaggagttccttaacgttactagcgtccaccttttcaaagaacgctgggatactaacaaggttgatcatcacacagataaatacgaaaacaataagttgatcgtgcggagagggcaaagcttttacgtgcagatcgactttagcagaccttacgaccctagaagagatctttttagggtggagtatgtgatcggtaggtatccccaagaaaacaagggaacctacatccctgtcccaatcgtctccgaactgcaatccggcaaatggggagctaagattgtcatgcgcgaagataggagcgtcagacttagtattcagagctcccctaaatgcatcgtggggaagtttaggatgtatgtggccgtgtggacaccttacggagtgctgcgcacatcgcggaacccagagacagacacctatattttatttaacccgtggtgcgaagatgacgcggtctacctggacaacgagaaagagcgggaagaatacgtgcttaatgatatcggagtcatcttttatggtgaggttaatgatatcaagacgcgatcgtggtcatacggccagttcgaagacgggatcctcgacacatgtttgtatgtcatggaccgtgcacaaatggacctttccggaagaggtaaccccattaaggtcagccgggtgggaagcgctatggtaaatgctaaagatgacgaaggcgtcctcgtgggctcgtgggacaatatctacgcttatggggtccctcccagcgcttggactggcagcgtggacatcctcctggaatatcgctccagtgagaatcccgtgaggtacggtcagtgttgggtttttgcaggggttttcaacacttttctgagatgtctgggaattccagcgcgcatcgttactaactacttcagtgcacatgacaacgacgctaatctgcagatggacattttcctggaggaagatggaaacgttaactctaaactcacaaaggatagcgtttggaactaccactgttggaatgaagcatggatgacgagaccagatctgccggtcgggtttggaggctggcaggccgtcgatagcactccccaggaaaacagcgacggaatgtacagatgcggcccggctagtgttcaggctatcaagcacggacacgtctgcttccaatttgacgccccctttgttttcgccgaagtcaactccgatttgatatatattacagccaaaaaggatggaacccacgttgtcgagaacgtggatgctacgcatatcggtaagctgattgtgaccaaacaaattggaggagatggtatgatggacatcactgacacatacaaatttcaagagggacaggaagaagagaggctcgccttagagactgccttgatgtacggagcaaagaagccacttaatacagaaggagtaatgaaaagcaggagcaatgtagatatggactttgaggttgaaaatgctgtcttgggcaaggacttcaaactcagcatcacattcagaaacaactctcataacagatataccattacggcttacttgagcgccaatatcaccttttacaccggcgttcccaaagctgagtttaaaaaagaaacctttgatgtaacgttggaacctctgagcttcaaaaaagaagccgtcctcattcaagccggcgaatatatgggccaattgctggagcaggcttctcttcacttcttcgtgactgctaggattaacgaaacgcgcgacgttctggctaaacagaagtcaaccgtcctcaccatccccgaaataatcatcaaagtccgtggaacacaggtcgtgggctctgacatgacagttaccgtgcagtttacaaaccccctgaaagaaaccctgcgaaacgtctgggtccacctcgacgggccaggggttacccgtcctatgaagaagatgttccgggagatcagacctaattcgactgtgcagtgggaagaggtgtgccggccttgggtgagcggacataggaagcttatcgcttctatgtcctcggatagcctgcgccacgtctacggcgagctggacgtgcagattcagagaagacctagcatg

SEQ ID NO: 9503 - DNA, 2196 bp, synthetic construct
  misc_feature 1..2196: note = source = /note="Description of Artificial Sequence: Synthetic coding sequence"
  source 1..2196: mol_type = other DNA
atgtcggaaacttcccggactgctttcggtggccgacgggctgtcccaccgaataactcgaacgccgcagaggacgatctcccaactgttgagttgcagggagtggttccgcgcggcgtgaatctgcaggagttcttgaatgtcaccagcgttcatctgtttaaggaacggtgggacaccaacaaggtcgaccaccataccgacaagtacgagaacaacaagttgatcgtgcggcgcggacagtcgttctacgtccaaatagacttttcgaggccgtacgaccctagacgggatctttttcgggtggagtacgttattgggcgctatccgcaagaaaacaagggaacttacatcccggttccgatcgtgtccgagctgcagagcggaaagtggggagccaagattgtcatgcgcgaagataggtcagtgcgcctgtcgattcaatcgtcacctaagtgcatcgtgggaaaattcagaatgtacgtggccgtctggaccccgtacggtgtgcttcggacttcgagaaacccggaaaccgacacgtatatcctcttcaacccttggtgcgaggacgatgccgtctacctcgataatgagaaggaaagggaggaatacgttctcaatgatatcggcgtgatcttttacggtgaggtcaatgacatcaagaccagatcgtggagctatggtcagttcgaggatggaatcctggacacttgcttgtacgtgatggaccgggcacagatggatctctcgggtcgcggaaaccccattaaagtgtcgcgggtgggaagcgccatggtgaatgcaaaggacgacgaaggggttttggtggggtcatgggacaacatctacgcttatggcgtgccgccgtccgcatggaccgggtctgtggatatcctgctggagtaccgctcctctgagaacccggttcggtacggacagtgttgggtgttcgcaggagtgttcaataccttcttgcggtgcctgggtatcccggccagaatcgtgaccaactacttcagcgcccacgacaacgacgccaacctccagatggacatcttcctggaagaagatggcaatgttaactcgaaactgactaaggattctgtctggaattaccactgttggaacgaagcctggatgaccaggcccgatcttcctgtgggcttcggcggatggcaggcagtcgattcaactccgcaggaaaactccgatggtatgtaccggtgcggccccgcatccgtgcaggccatcaagcacggacacgtttgcttccaatttgacgcgccgttcgtctttgccgaagtgaactccgacctcatttacatcaccgccaagaaggatggaactcacgtggttgaaaacgttgatgctactcatatcggcaagctcatagtgactaaacagatcggaggagacgggatgatggacatcaccgacacttacaaattccaggaaggacaagaagaagagcgcctcgccttggagactgcgctgatgtatggtgctaaaaagcctctgaatactgagggagtgatgaaatcgcgcagcaacgtagacatggacttcgaggtggaaaacgcagtcctcggaaaggactttaagctctccatcaccttccggaacaattcccacaatagatacaccatcaccgcgtacctttcggctaacatcactttctacaccggagtcccgaaggctgagttcaaaaaagagacttttgatgtgaccctcgagcctctgtccttcaagaaggaagccgtgctcatccaagctggggaatacatggggcagctgttggagcaagccagcctgcatttcttcgtgactgcgcggattaacgagactcgagacgtgctggcgaagcagaaatcaactgtgctcactatcccggagattatcatcaaggtgagaggtacccaagtggtcggatccgatatgacggtgaccgtccagttcaccaacccactcaaagagactctgcgcaacgtgtgggtgcacctggacggccctggagtcacgcgccctatgaagaaaatgttccgagagatccgccctaactccacggtgcaatgggaagaagtgtgcaggccgtgggtcagcggccatcgcaagctgattgctagcatgtcgtctgactcactccgccatgtgtacggagaactggacgtgcaaatccagagacggccatcgatg

SEQ ID NO: 9504 - DNA, 2196 bp, synthetic construct
  misc_feature 1..2196: note = source = /note="Description of Artificial Sequence: Synthetic coding sequence"
  source 1..2196: mol_type = other DNA
atgtcagaaacatccaggaccgcctttgggggacgtagggccgtcccccctaataatagcaatgctgcggaggacgatctcccgaccgttgagcttcagggggtggtcccaaggggggtgaacctccaggagttcctgaacgtgaccagcgtccatctgttcaaggagcggtgggataccaacaaggtggatcaccacaccgacaagtacgaaaataacaaacttattgtgcggaggggtcagtctttttacgttcaaattgacttttcacggccttatgaccctagacgcgacctgttccgagtagagtacgtcattgggcgatatccccaggagaacaagggaacctatatcccagtgcccattgtgagcgagctccaaagtggaaagtggggtgccaaaatagtgatgagagaggacagatcagtccgtctctcaatacagagctcccctaaatgcatcgtggggaaattccggatgtacgttgccgtgtggacaccctatggggtgcttcggacgtctagaaacccggaaacggatacctatatccttttcaatccctggtgcgaagatgacgctgtgtatctggataacgagaaagagcgcgaggaatatgtgttaaatgatatcggagtgatcttctacggtgaagttaacgacatcaagactaggagttggtcatacggacagttcgaggacgggatcctggatacctgcctctatgtgatggatagggcacagatggatctctccggcagaggcaaccccattaaggtgtcacgagtggggtccgcgatggttaacgcgaaagacgatgaaggtgtgctcgtgggatcatgggataacatctatgcgtacggcgtgccccctagcgcatggacaggaagtgtggacatcctccttgagtaccgctcatctgagaacccggtgaggtacgggcagtgctgggtgttcgccggggttttcaacacattcctgcggtgtctcggtatcccagcacggattgtgacgaattatttttccgcccatgacaatgatgccaatctgcagatggacatcttcctggaggaggatgggaacgtaaattcaaaactgactaaggactccgtttggaactaccattgctggaatgaagcctggatgaccagacccgatctgcccgtgggctttggtggctggcaggctgtggattccacaccccaggagaattctgacgggatgtatcggtgtggcccggctagcgtccaggccatcaagcacggccatgtgtgcttccagtttgacgccccgtttgtgttcgctgaggtgaattccgacttgatttacatcaccgcaaaaaaggatggtacccacgtagttgaaaatgtagacgctacacacattgggaaactcatcgtgaccaagcagatcggaggagatggtatgatggacatcaccgacacatataaattccaggagggtcaagaagaggaacggttggccctggagactgccttaatgtatggggctaaaaagcccctaaataccgaaggggtgatgaagtcgcggagtaacgtggatatggatttcgaggtggagaatgcagtgttaggaaaggatttcaagctgtccatcacttttagaaacaactctcacaaccgatataccattactgcctatctaagcgctaacatcaccttttatacaggtgtgcctaaagctgagtttaaaaaggaaacatttgatgtgaccctagagcccctgtcattcaagaaggaggcagtgctgatccaggccggagagtatatgggtcagctcttagagcaggcaagcctccacttctttgtgaccgcaagaattaatgaaacacgcgacgtcttggccaagcagaaaagtacggttttaaccataccagaaattattatcaaagtgagagggacgcaagttgtgggctcagatatgactgtcaccgttcaattcaccaacccacttaaagaaacactcagaaacgtgtgggtgcaccttgatgggcccggggtcacccgcccgatgaagaagatgttccgcgagattcgtccaaactcaaccgttcagtgggaggaggtatgtaggccctgggtgagcggacaccgcaagctgatcgcctccatgagctccgactcactccgccacgtgtatggggagttggacgtgcaaatccagagacgcccctctatg

SEQ ID NO: 9505 - DNA, 2196 bp, synthetic construct
  misc_feature 1..2196: note = source = /note="Description of Artificial Sequence: Synthetic coding sequence"
  source 1..2196: mol_type = other DNA
atgtcagagacatcgcgtacggccttcggaggccgacgcgctgtgccccccaataacagcaacgccgccgaggacgacttgcccactgtcgagctccagggggtcgtgccacggggagtcaacctgcaggagtttctcaatgttaccagtgtgcacctgttcaaagaacgttgggacactaataaagtggaccaccacaccgataagtacgaaaacaataagctgattgtgcgccgtggacagagcttttatgttcaaatcgacttttcacgaccatacgacccccgccgggatctgttcagagtggagtatgtaatcggtagatatccccaggagaacaaggggacctatatacctgtccccattgtgtctgaactgcagtctggcaagtggggagctaagatagttatgagggaagacaggagcgtgagattgagcattcagagctctcctaaatgtatcgtggggaagtttcgcatgtatgttgccgtctggacgccatacggggtcctacggacatctcgtaacccagagacagacacttacatcctgttcaacccctggtgcgaggacgatgcagtctatcttgacaatgagaaggagcgtgaggagtacgtgctgaacgacatcggtgtgatcttttacggcgaagtgaacgacattaagacgagatcttggagctacggccagttcgaagatggaattctcgacacttgcctgtacgtgatggatagggcgcagatggacctttctggaagaggcaatcccatcaaagtcagccgcgtgggttctgccatggttaatgcgaaagatgatgagggggttttggtcgggtcctgggataacatatacgcatacggagttcccccttctgcctggacaggaagtgtcgatatcctgctcgagtaccggtcatccgaaaatccagtgaggtatggacagtgttgggtgtttgctggcgtattcaacactttcctgagatgtctgggcattccagcccgtatagtgacaaattacttctccgcgcacgacaacgacgcaaacctacagatggacatatttctcgaagaggatggcaatgtgaatagcaagctcacaaaggactcggtgtggaactaccactgttggaatgaagcctggatgactcgtcctgacttgcctgtgggctttggaggctggcaagcagtggattctaccccccaggagaactcagatggcatgtatcgctgtgggcctgcgagcgttcaggccatcaaacacggacacgtctgttttcagttcgacgccccctttgtgttcgcggaagtgaacagcgacttaatctacatcaccgcaaagaaggatggtactcacgttgtcgaaaatgttgacgccactcatattggcaagctcatagttaccaaacagatcggaggcgacgggatgatggatatcacggatacctacaagttccaggagggacaggaggaggagcgactggcccttgagactgcactcatgtacggggctaaaaaacctctgaacactgaaggcgtgatgaagtcccgatcaaacgtcgacatggacttcgaagtggaaaatgctgttttgggtaaggacttcaagctgtcaataacattccgcaacaactctcacaataggtacactataaccgcctacttgagtgccaatatcactttctatactggtgtgccaaaggccgagttcaaaaaggagacttttgacgttacgcttgaacctctgagttttaagaaggaggcagtcttaatccaggcgggagaatacatgggacagctcttggagcaggcatctctgcatttcttcgtcaccgcccgcattaatgaaacacgggacgtattggcaaaacagaaaagcaccgtcttgaccatccccgaaattatcatcaaagtgcgaggcactcaggttgttggctccgacatgacggtgacagtgcagttcacaaacccactgaaggagacactccgcaatgtctgggtgcatcttgatgggcctggggttacccgccctatgaagaagatgtttcgagagattcggcctaattctacagtgcaatgggaggaggtttgccgtccttgggtttccggccatagaaagctgatagcctccatgtccagtgactcactgaggcacgtatatggggagcttgacgtgcagattcagcgacgccctagcatg

SEQ ID NO: 9506 - DNA, 2196 bp, synthetic construct
  misc_feature 1..2196: note = source = /note="Description of Artificial Sequence: Synthetic coding sequence"
  source 1..2196: mol_type = other DNA
atgagcgaaactagcaggactgcattcgggggacgccgggccgtgcctccgaacaactccaatgctgccgaggatgacctgcctacggtggaactgcagggagtcgttccgcggggagtgaatctgcaggagttcctcaacgtgacttcggttcacctgttcaaggagcgctgggatactaataaggtcgatcaccacaccgacaagtacgaaaacaacaagttgatcgtgagacgcggtcagagcttctacgtgcaaatcgatttctcgcggccatacgaccctcggagggatctgtttagggtcgaatacgtgatcggaagatacccacaggaaaacaagggtacctacatccctgtgccgatcgtctcagagctgcagtctggaaaatggggggcaaagattgtgatgcgggaggacagatcagtgcgcctctcaattcagtccagcccgaagtgcatcgttggaaagtttaggatgtacgtcgccgtgtggactccgtacggcgttctgcgcacctcccgcaacccagagactgacacgtacatcctgttcaatccgtggtgcgaagatgacgcagtgtatctcgataacgaaaaggagcgcgaagaatacgtgctgaatgatattggagtgatcttctacggggaagtgaatgacataaagactcggtcctggtcctacggccagttcgaggatggtatcttggacacgtgcctctacgttatggacagggctcaaatggacctgagcggacgcggcaatccgatcaaggtgtcacgcgtcggctccgctatggtcaacgccaaggatgacgagggagtcctggtgggatcatgggataacatttatgcctacggcgtcccgcctagcgcatggactggatcagtggacatcctgctcgaatacagaagcagcgaaaacccagtgaggtacgggcaatgttgggtgttcgccggagtctttaacaccttcctgcgctgcctgggaatcccagcgcgcatcgtgactaactatttctccgcccatgataatgacgcgaatctgcaaatggacatcttcctggaggaggacggtaatgtgaactcgaagctcactaaagattccgtctggaactatcactgttggaatgaggcatggatgactcggccggacctccctgtcgggttcgggggatggcaggcagtcgattcgaccccgcaagaaaactcagatggaatgtaccggtgtggaccagcatcggtgcaggcaatcaagcatggacatgtgtgtttccagttcgatgcgccgttcgtgttcgcggaggtgaactcagacctcatctatatcaccgcgaaaaaggacggaacccacgtggtggagaacgtggacgcgactcatatcggcaagctcatcgtgaccaagcaaatcggcggtgacggtatgatggacatcactgatacttacaagtttcaggagggtcaggaagaggaacggctggcccttgaaaccgcccttatgtacggagcaaagaagcctctgaacacggagggcgtgatgaagtctcgcagcaatgtggacatggacttcgaagtggaaaacgccgtgctcggcaaagacttcaagctctcgattaccttccgcaacaatagccataatcgctacactattacggcctacctgtccgccaacattacgttctacaccggagtgccgaaggcagagttcaaaaaggagactttcgatgtgaccctcgaaccgttgtcgtttaagaaggaagccgtcctgatccaggccggagagtacatgggacagctgctggaacaggcatccctgcatttcttcgtgaccgcacgcatcaacgagactcgggacgtgctggcgaagcaaaagtcaaccgtgctcactattccagagatcatcatcaaagtgcgcgggactcaggttgtgggatcagatatgactgtcaccgtgcagtttaccaaccctctgaaggagactcttcgcaacgtgtgggtgcacctcgacggtccgggggtcactcgcccgatgaaaaagatgtttcgcgaaatccgcccgaactcaaccgtgcagtgggaagaagtgtgccggccgtgggtgagcggacaccgaaagctgatcgctagcatgtcgtcggattccctcagacacgtgtacggagagctggacgtgcaaatacaacggcggccgagcatg

SEQ ID NO: 9507 - DNA, 2196 bp, synthetic construct
  misc_feature 1..2196: note = source = /note="Description of Artificial Sequence: Synthetic coding sequence"
  source 1..2196: mol_type = other DNA
atgagtgagacgtcccgtactgcattcggaggccgtcgggcagtgccacctaacaactctaacgcggctgaagatgatctcccaaccgtggaactgcaaggagtcgtgcctcggggggtcaacctccaagaatttctcaatgtgactagtgtgcatctgtttaaggagcgctgggacactaacaaggttgaccaccataccgataagtacgaaaacaacaaattgattgtacggagaggccagtcgttctatgttcagatcgacttttcccgaccatatgaccctaggcgtgatctctttagggtcgagtacgttataggacgctacccacaagagaacaagggaacgtacattccggttcctatcgtgtcggagctgcaatccggaaagtggggagccaaaatcgtgatgcgagaggacaggtccgtgcgcctgtcgatccaatcctcccctaagtgtattgtgggcaagtttcgaatgtacgtcgcagtctggactccgtacggtgtgctgagaacttcgagaaacccagaaaccgacacctacatcctcttcaacccatggtgtgaggacgatgcggtttacttggacaatgagaaagaacgagaggagtacgtgctcaatgacattggggtgatattctacggtgaagtgaatgacattaagaccagatcctggagctatggacaattcgaggatgggattctggacacctgcctgtacgtcatggacagggcccagatggatttgtcaggacggggaaatcctattaaggtgagccgcgttggcagcgctatggtcaatgcaaaagatgatgaaggtgtgctggtgggttcgtgggataacatttacgcctacggagtcccaccctcagcctggaccggctccgtggatatcctcctggaataccgctcctccgaaaatccagtgcgctacggacaatgttgggtctttgcaggggttttcaataccttcctgcgttgtcttggaattcctgcacggatcgtcaccaactacttttcggcccatgataacgatgcaaaccttcaaatggatatctttctggaagaagatgggaacgtgaattccaagctgactaaagattcggtgtggaactaccactgctggaacgaagcgtggatgacgcgcccagaccttcctgtgggatttggaggttggcaggccgtcgacagcacgccacaagaaaactccgatggaatgtaccggtgtggtccagcctccgtgcaagctatcaaacatggtcacgtgtgctttcaatttgatgccccattcgtctttgcggaagtcaactcagatctcatttacatcactgcaaagaaagatggtacccacgtggtggaaaatgtggatgcaacgcatataggcaagttgatcgttactaagcagatcgggggtgatgggatgatggacattactgacacttacaagtttcaagaaggtcaagaagaagaaagacttgctcttgaaaccgcactcatgtacggtgcgaaaaagccgcttaacacggaaggtgtgatgaagtcgagatcaaatgtggatatggacttcgaggtggaaaatgcagtcctcggaaaagatttcaaattgtccatcacctttcggaataactcccataacagatacactattacggcgtatctttcggcaaacattaccttctacaccggtgtcccaaaggccgagtttaagaaggaaacctttgatgtgactctcgagccactttcgtttaagaaagaagcagtgctgatacaagcaggtgaatacatgggtcagctgctggagcaagcgagcctgcatttcttcgtgacggccagaattaacgaaacccgcgacgtgctggcaaaacagaagtccaccgtccttacgatcccggaaatcatcattaaggtgcgtggtacccaggtggtgggatcagatatgaccgtaactgtgcaatttacgaaccctctcaaggaaactctgaggaacgtgtgggttcatcttgacggtcctggggtcaccagaccgatgaaaaagatgtttagagaaatccgccctaatagcaccgtccagtgggaggaagtgtgtagaccatgggtgagcggacatcgaaagctcattgctagcatgtcgtcggattctcttaggcacgtgtacggggaactggatgtccaaattcagaggcgcccttcgatg

SEQ ID NO: 9508 - DNA, 2196 bp, synthetic construct
  misc_feature 1..2196: note = source = /note="Description of Artificial Sequence: Synthetic coding sequence"
  source 1..2196: mol_type = other DNA
atgtcagaaacaagtcgcactgccttcggcggcaggcgggctgtgcctcccaacaactccaatgccgccgaggatgacctgcctactgtagaactgcagggcgtcgtgcctaggggtgtgaatctgcaagagtttctcaatgtaacgagcgttcacctgttcaaagagaggtgggatacaaataaggtggatcaccacaccgataagtacgagaacaataagcttatcgtcagacgcggacagagcttttatgtgcagattgattttagccggccttatgatcccaggcgagatctgttcagagtggagtacgttatcgggagataccctcaggagaacaagggcacgtacatccctgtaccaattgtgagcgaattgcagtccggaaaatggggtgctaagatagttatgcgcgaggatagatctgttaggctgtctattcagtcttctcccaaatgcatcgtcgggaaattccgcatgtacgttgctgtgtggaccccttacggcgtgctgcgcacctcccgaaacccagagactgatacctacattctttttaacccatggtgcgaagacgacgctgtgtatctggataatgaaaaggagagggaggagtatgtgctgaatgatattggtgtaattttctacggtgaagtgaatgatatcaaaaccagaagttggtcatatggacagtttgaggacgggatcttggacacgtgcctctacgtgatggaccgggctcagatggatttgtctgggcgcggcaatccaatcaaggtgtctagagtaggctcagctatggtaaacgccaaggatgatgaaggggtcctcgtgggctcatgggataatatctatgcgtacggagtgcccccttctgcgtggacaggatccgtggatatactgcttgaatatcgcagcagtgagaaccctgtgcgctacggccaatgttgggtgtttgccggcgtgtttaacacatttctgagatgcctgggaattccagcaaggatcgtaaccaattacttctccgctcacgataacgatgccaacctgcagatggacatattcctggaggaggatgggaatgtgaactctaagctgactaaggactctgtgtggaattatcactgctggaatgaagcttggatgaccaggccggacctgcctgtcggattcggtggatggcaggccgtagacagcactccacaggaaaatagcgatgggatgtacagatgcggtcctgcatctgtgcaagctattaagcacggccacgtgtgtttccagttcgatgcccctttcgtattcgctgaggtgaattcagatctgatttacataacggctaagaaagatggaacccatgtggtagagaacgttgatgccacccatatcggtaaactgatcgtcaccaagcagatcggtggggacgggatgatggacatcaccgacacctacaagtttcaggagggccaagaggaagagaggctggcactcgagactgccttgatgtacggtgctaagaaaccacttaacacagagggtgttatgaagtctcgatccaacgtggacatggatttcgaggtggagaacgcagttctcgggaaagacttcaagctgtctatcacatttaggaacaacagtcacaaccgctatacaatcacggcctatttgtccgctaatattacattctataccggcgtgccgaaggctgagtttaaaaaggagacgtttgacgtgaccctggaacctctctcattcaaaaaggaagcagtcctcatacaggcgggagagtatatgggacagcttctcgagcaagcatccctgcacttttttgtgacagcacggatcaacgagacccgggacgtgttggccaaacaaaagagcacagtactcacaattccggaaattattattaaggtaaggggcacgcaggtggtggggtctgacatgacggttacagtgcagtttaccaaccccttgaaagaaaccctgcggaatgtatgggtgcatctggacggcccaggcgtgacccgccctatgaagaaaatgttcagggagatcaggccaaactctacagtgcagtgggaggaagtctgtagaccctgggtgtctggccaccgaaagttgattgcgtccatgagctccgactccctgaggcatgtgtatggtgaactcgacgtgcaaatccagcgccgcccatccatg

SEQ ID NO: 9509 - DNA, 2196 bp, synthetic construct
  misc_feature 1..2196: note = source = /note="Description of Artificial Sequence: Synthetic coding sequence"
  source 1..2196: mol_type = other DNA
atgtctgaaacctctcgtacggcattcggtggacgacgagccgtccctcctaacaatagcaacgccgcggaggacgatttgcccactgtcgagttgcagggtgtggtccctcggggcgtcaatttgcaggaatttttaaacgtcacttccgtacatctgtttaaggagcgttgggatacgaacaaagttgatcatcacacagacaagtatgagaacaacaaacttatcgtgcgcaggggtcaaagtttttacgtacagattgattttagtcgaccgtacgacccccggagggatctgtttagagtagagtacgtcattggccgctatccccaggaaaacaaaggcacctacattcctgttccaattgtctcagagctgcagtcaggcaagtggggtgcgaagatcgtcatgagggaggacagaagtgtgcgcctgagcattcagtcttctcctaaatgcatcgtgggaaaattcagaatgtatgtcgctgtttggacaccatacggggtcctccggactagtaggaaccccgaaactgacacatacattctgttcaacccttggtgcgaggacgacgccgtgtacttggacaacgagaaggagagagaggagtatgtcttaaatgatatcggcgtgatattttatggggaagtcaatgacatcaaaaccaggtcctggagttatggccagtttgaagatggaatcctcgatacatgtctctatgtaatggaccgggcacagatggatctcagcgggcgcggcaacccaataaaggtgtcccgagtcggttctgcgatggtgaatgctaaggacgacgaaggggttctggtgggatcttgggacaatatctacgcgtacggggtgccacctagtgcttggacagggtctgtagatattctgttggagtatagaagcagtgagaatcccgtcaggtatggccaatgctgggtgttcgcaggggtgttcaacacatttttaagatgtttgggtattccagcaaggattgtgacaaattatttcagtgctcatgacaatgacgccaacctgcagatggacatttttcttgaggaggacggaaacgtgaatagcaagctcacaaaggatagtgtgtggaactatcactgctggaatgaggcctggatgacccgcccagacttgcccgttgggttcggaggatggcaggcagttgacagcaccccgcaagagaactccgatggtatgtaccgctgcggacccgcgtccgtgcaagccatcaaacacggccacgtgtgtttccagtttgatgccccgtttgttttcgcagaggtcaattccgatcttatttacatcactgcgaaaaaagatggaactcacgtagtggagaacgtagacgctacacacatcggcaagttgattgtaaccaagcagataggtggggacggcatgatggatataactgacacctacaaatttcaagagggtcaggaagaggagcgcttagccttagagacggccctcatgtatggcgcgaagaagcccctgaatacagaaggtgtcatgaagagcagatcaaatgtggatatggattttgaagttgagaatgcggtgctggggaaggatttcaaactcagcattacatttcgaaacaatagccataatagatatacaattaccgcatatctctcggctaacatcactttctataccggggttccgaaggccgaattcaagaaagaaacatttgatgtgacactggaacctctgagtttcaagaaagaagcagtgttgatccaggcaggcgaatacatgggtcagctgttggaacaagccagccttcacttttttgttacagccaggatcaatgaaactcgggatgtcctggctaaacagaagtccaccgtgctgaccatccccgagattatcattaaagtgaggggaacccaggtcgtggggtcggacatgacagtgacagtgcaatttaccaatcctctgaaggagaccctccgcaacgtttgggtgcatctcgacggccctggcgtgacaagaccgatgaaaaagatgttccgggagatccggcccaacagcacagtccagtgggaggaagtttgcagaccttgggtctctggccaccggaaactaatcgcctctatgtcctctgactccctgaggcatgtctatggtgaactggatgtccagattcaaaggcgaccttctatg

SEQ ID NO: 9510 - DNA, 2196 bp, synthetic construct
  misc_feature 1..2196: note = source = /note="Description of Artificial Sequence: Synthetic coding sequence"
  source 1..2196: mol_type = other DNA
atgtcggaaaccagccgcactgcgttcggcgggagacgtgcagtgccaccaaataactccaatgcagcggaagatgatctgcctacggtggagctccaaggagtcgtgccaaggggggttaacctccaagaatttcttaacgtcaccagcgtccatctgtttaaggaacgctgggacaccaataaggtggatcatcatactgacaagtacgagaacaacaaactgattgtgcgaagaggtcagtccttctacgtacaaattgatttctcaagaccgtacgaccctcggcgtgatctttttcgcgtggaatacgtgatcggacgataccctcaggaaaacaaggggacttacatccctgtccctatcgtgtcggaactgcaatcaggaaagtggggagccaaaatcgtgatgcgagaggaccgcagcgtgcgactttcgattcaatcgtcccctaagtgcatcgtgggaaagtttagaatgtacgtagcagtgtggactccatacggtgtcctccgaaccagccgcaatcccgaaaccgatacctacattttgtttaacccatggtgtgaagatgatgctgtgtacctcgataacgaaaaggaaagagaggagtacgtcctgaacgatatcggtgtgattttctacggtgaggtcaatgatatcaaaacccgatcgtggtcatacggccagtttgaagatgggatcttggatacgtgcctgtacgtcatggatagagcgcaaatggacctgagcggtagggggaatcctatcaaggtgtcccgagtgggctctgcaatggtgaacgccaaagatgacgaaggtgtgctggtgggatcctgggacaacatttacgcttacggagtccctccctccgcctggaccggctcagtggatattctccttgagtatcgttcctccgagaatcccgtgcgctacggacaatgttgggtctttgctggtgtgttcaacacttttcttcggtgtcttggaattcccgcacgcattgtcaccaactacttctcggcacacgataacgacgcaaacttgcaaatggatatctttctcgaagaggatggcaatgtgaacagcaaacttaccaaagactcagtttggaattaccactgttggaacgaagcatggatgacgcggccggatcttccagtgggttttggaggttggcaggccgtggactcgactccccaagagaactccgatggaatgtatagatgtgggccagcatctgtccaagctatcaagcacgggcacgtgtgctttcaattcgacgcaccatttgtttttgccgaggtgaactccgatctgatatacatcactgcaaaaaaggatgggacccatgtcgtggaaaacgtggacgcaactcatattggcaagctgatcgtcactaagcaaataggaggggatggcatgatggacattaccgacacttataagttccaggaaggacaggaagaggaacgtttggcactggaaactgccctgatgtacggagcgaagaagcctctcaataccgagggggttatgaagagccgatctaatgtggacatggacttcgaggtggaaaatgccgttctcggtaaagatttcaaactctccataacttttcgaaataactcccataacagatacaccattaccgcttatctttccgcaaacattactttttacactggggtgccaaaagcagagttcaaaaaggaaacctttgatgtcaccctggaaccccttagctttaagaaggaggcagtgcttattcaagctggagaatacatggggcaacttctggagcaggcgtctctgcatttctttgttacggcccggattaatgagactcgggacgtgctcgccaagcagaagagcacggtgcttacgattccagaaatcatcatcaaggtgcgaggaactcaggtggtgggctccgatatgactgtgactgtgcaatttaccaaccccctgaaagaaaccctcaggaacgtgtgggtgcatctggatggccctggagtcacccgacctatgaagaagatgtttcgagagattcgccccaactccaccgttcagtgggaggaggtgtgtaggccttgggtgtcgggtcacaggaaactgattgcatccatgtcctcggattccttgagacatgtctacggagaacttgacgttcagatacagaggcggccgtccatg

SEQ ID NO: 9511 - DNA, 2196 bp, synthetic construct
  misc_feature 1..2196: note = source = /note="Description of Artificial Sequence: Synthetic coding sequence"
  source 1..2196: mol_type = other DNA
atgagcgaaactagtcggaccgcattcggtggccggagggcagtccctccgaacaactcaaatgccgctgaggacgacctgccaacggtcgagttgcagggggtggtcccgcgcggcgtaaaccttcaagaattcctcaacgttacgagcgtgcacctcttcaaggagagatgggacaccaataaggtggatcatcacaccgacaaatacgaaaacaataagctgatagtacgcaggggacaatcattttacgtgcagatcgacttctcccggccatacgaccctagacgggacctgttccgggtggagtacgtgatcggaaggtacccgcaggaaaacaaaggaacttacatcccggtcccgattgtgtccgaactccagtctgggaaatggggagccaaaatcgttatgcgcgaggatcgctctgtgagactgtcgatccaatcgagcccgaaatgcatcgtgggaaagtttcggatgtacgtggccgtgtggaccccctacggggtgttgagaacttcaaggaatccggaaacggatacctacatcctgttcaacccatggtgcgaggatgatgcggtgtacctcgataacgaaaaggaaagggaagaatacgtgctcaacgacattggcgtcattttctacggtgaggtgaatgatatcaagaccagatcctggtcatacggccaatttgaggatgggattctggatacttgtctgtatgttatggatcgcgcccaaatggatctcagcgggcgtggaaatccgatcaaggtgtcgcgcgtgggatccgccatggtgaacgctaaggacgacgaaggcgtgcttgtgggatcgtgggacaacatttacgcctacggagtgcctccttcagcgtggactggtagcgtggacattctgctggaataccgctcaagcgagaaccccgtgcgttatggccagtgctgggtctttgcgggggtattcaatacctttctccgatgtctcgggatccctgcacggatcgtaactaattacttttcggcccatgacaacgacgccaacctgcaaatggacatcttcctcgaggaggacgggaatgtgaactcaaaactcaccaaggacagcgtgtggaattaccattgctggaacgaagcatggatgacccggcccgacctgccagtgggtttcggaggatggcaggctgtggattcgactcctcaggaaaactccgacggaatgtaccggtgcgggccggcctcggttcaggcaattaagcacggccatgtgtgtttccaatttgacgcgccattcgtgttcgcagaggttaatagcgatctgatctacatcaccgcgaaaaaagacggaacccacgttgtcgagaatgtggacgccacccatatcgggaagctgatcgtcaccaagcagatcggaggggacggaatgatggacatcaccgatacttacaagttccaggagggacaggaggaggaacgcttggcgctggaaactgcgttgatgtacggagccaagaaacccctgaatactgaaggcgtcatgaagagcagatcgaacgtcgacatggatttcgaggtcgagaatgccgtcctgggcaaggatttcaagctgagcatcactttccgcaacaactcgcacaaccggtatactatcaccgcctatctttcagcaaacattaccttctacaccggtgttccaaaggccgaattcaaaaaagaaacctttgacgtcactctcgaaccactgtcgtttaagaaggaagccgtgcttatccaggctggcgagtacatgggacaactgttggagcaggcttctcttcacttcttcgtcacggctcggatcaacgaaaccagggatgtgctggcgaagcagaaatccactgtcttgactatcccagaaatcatcatcaaggtccgaggaacccaggtggtcggttccgacatgaccgtcactgttcaattcacgaacccgctgaaggaaactttgagaaatgtgtgggtgcatctggacggacccggagtgaccaggcctatgaagaagatgttccgggagatcagaccaaacagcactgtgcaatgggaagaagtgtgccggccgtgggtatcgggacaccggaagctcatagcctcaatgtcatccgattccctgcgccacgtttacggcgagctggatgtgcagatccagcgcagaccgtcgatg

SEQ ID NO: 9512 - DNA, 2196 bp, synthetic construct
  misc_feature 1..2196: note = source = /note="Description of Artificial Sequence: Synthetic coding sequence"
  source 1..2196: mol_type = other DNA
atgtcagaaacttcgcgcaccgcgttcgggggacgcagagctgtgccacccaacaattcaaatgccgctgaggatgatctgccgacggtggagctgcaaggagtggtgccgcgcggagtgaatctgcaggagttcctcaatgtaactagcgtgcacctctttaaagaaagatgggacactaataaggtggaccaccacactgacaaatacgagaataacaaactgatcgtgcgccggggccaatccttttatgtccaaatcgacttctcccgcccatacgatcctagaagagatttgttccgcgtggagtacgtgatcggtaggtaccctcaagagaataagggtacctacatccctgtgcccatcgtgtcggagctgcaatccggtaagtggggagcaaagatcgtcatgcgcgaggatcggtcagtgcgcttgtccatacaaagctcgccaaagtgtattgtcggtaagttccggatgtacgtggcggtgtggaccccttacggggttttgaggacttcaaggaacccagagactgacacttacatcctgtttaacccgtggtgcgaagatgacgctgtgtacttggacaacgagaaggaacgcgaagaatacgtgcttaacgatattggtgtgatcttctacggagaagtgaacgatatcaagactcgctcgtggtcgtacggacagttcgaggacggaatccttgacacttgcctctacgtgatggatcgcgcccagatggacctttcgggacgtggcaaccctatcaaggtttcccgagtgggatcagccatggtgaacgccaaggacgatgaaggcgtgttggttggatcgtgggacaacatttacgcctacggggtcccgccgtcggcttggaccggatcggtggatatcctgctggaatacagaagctcagaaaatccagtcagatacggacagtgctgggtgttcgctggtgtgttcaacacgtttctgcggtgtttgggaatcccggcccgcatcgtgacgaactacttcagcgctcatgacaatgatgcgaacctgcagatggatatctttctggaagaggacggcaacgtgaattcgaagttgactaaggactccgtgtggaactaccattgttggaacgaggcgtggatgacccggcctgacctcccggtgggcttcggaggatggcaggcagtcgattcaaccccacaggaaaacagcgatggaatgtaccgctgtggacctgctagcgtgcaagcaatcaagcacgggcatgtttgttttcagttcgatgctccctttgtgttcgcagaggtgaattcggatcttatctacatcaccgccaagaaggacggcactcacgtggttgagaacgtcgacgcaactcacatcggaaaactcatcgtgaccaagcagatcggcggagatggaatgatggacatcaccgatacttacaaatttcaggaaggacaggaagaggagaggctggctctcgagactgcgcttatgtacggagccaagaagcccctgaacactgaaggagtgatgaaatcccggagcaacgtcgacatggacttcgaagtggaaaatgcggtccttggaaaggatttcaagctgtcgatcactttccggaacaattcacacaaccgctacactatcaccgcgtatctttccgcgaatatcactttctacaccggagtcccaaaggcggagtttaagaaagaaacctttgacgtcactctggaaccgctttcgttcaaaaaagaggcggtcctgatacaggccggagaatacatgggccaactgctggaacaggcgtcactccactttttcgtcaccgcaagaatcaacgaaactcgcgatgtgctggccaagcagaaaagcaccgtgctcacgatcccggaaatcattatcaaagtgcggggaacccaagtggttggttcagacatgaccgtgaccgtgcagttcaccaatccactgaaggaaacgctgcggaacgtctgggtgcatcttgacggcccgggcgtgacccggccaatgaagaaaatgttccgcgaaatccgcccaaatagcaccgtgcagtgggaggaagtgtgcaggccgtgggtgtccggacataggaagctcatcgcgagcatgtcgtcggactcgctgcggcacgtgtacggggagctggacgttcaaatccagcggaggccgtccatg

SEQ ID NO: 9513 - DNA, 2196 bp, synthetic construct
  misc_feature 1..2196: note = source = /note="Description of Artificial Sequence: Synthetic coding sequence"
  source 1..2196: mol_type = other DNA
atgagcgagacttcccggaccgcatttggagggcgtcgggcggtccccccgaacaattcgaatgcagctgaggatgatctgccaaccgtggagctccaaggtgttgtgcctcgcggagtgaatctgcaagaatttcttaacgttactagcgtgcatctgtttaaggagcgttgggacaccaataaggtcgaccaccacaccgacaagtacgaaaacaataagctcatcgtccgcagaggacaatcgttttatgtgcagatcgactttagccgcccctacgaccctagaagagatctgttccgtgtggaatacgtcatcggtagatacccccaagagaacaaaggtacttacatacccgtccctattgtgtcagagctgcaatcgggaaagtggggtgcaaagattgttatgcgcgaagatcgcagcgtgaggctctcgatccagtcctcgccaaaatgtatcgtcggcaagttcaggatgtacgtggcagtgtggaccccatacggagtgcttaggacctcccgtaaccctgaaaccgatacgtacatactgtttaatccttggtgtgaggatgatgcagtgtaccttgataacgaaaaagaacgcgaggaatacgtcctcaacgacatcggcgtgattttctatggtgaagtgaacgatatcaaaactaggtcctggtcgtacgggcagttcgaggacggaattctggatacgtgcctgtacgtgatggatcgcgcacaaatggacctctccggaaggggaaaccctataaaggtttctcgagttgggtccgcaatggtgaacgctaaggacgacgaaggtgttttggtcggctcctgggataacatctacgcgtacggagtgccaccttccgcctggaccgggtcggtggacatcctgctcgaatatcgttcctcggagaacccagtgcgttatggtcagtgctgggtgtttgccggtgtgtttaacacgtttcttcggtgtttgggcattcccgctagaattgtcactaattacttctcggcacacgataacgacgcaaatctgcaaatggatatctttctggaggaggacggcaacgtcaattccaaactgaccaaagattcggtgtggaattaccattgctggaatgaggcctggatgactagaccagacttgccagtgggttttggaggatggcaggccgtggattccacgccgcaggaaaattccgatggaatgtaccgttgtggtcctgcgtcggtccaagcaattaagcatggacacgtgtgttttcagtttgatgcaccttttgtgttcgctgaagtgaattcagatctgatttacattacggcgaagaaggatggcacccacgtggtcgaaaacgtggatgccacccatattggcaaactgatagtcacgaagcagattgggggagacggcatgatggatattactgatacttacaaatttcaggaagggcaggaggaagaacggctcgctttggaaaccgcccttatgtacggtgccaagaagcccctgaacactgaaggcgtcatgaaatcaagaagcaatgtcgacatggactttgaggttgagaatgcagtgttgggaaaggatttcaaactgtcgattacctttcggaacaattcacataacagatacaccatcactgcttacctctcagcgaacattaccttttacaccggagtgccgaaggcagaattcaagaaggaaactttcgatgtgactcttgagccgctttctttcaaaaaggaagcagttctgatccaggcaggggagtatatgggacaactcctcgaacaagcatcactgcatttctttgttacggcgcgcatcaacgaaactcgggacgtgcttgcaaagcagaagtccaccgtgctcaccatccccgagattatcataaaagtcagaggaacccaggtcgtgggtagcgatatgaccgtgactgtgcaatttaccaacccactgaaggagacgcttaggaacgtgtgggtgcaccttgatgggccgggagtcactcgccctatgaagaagatgttccgtgaaattcgacctaactctactgtccagtgggaagaagtgtgtcgaccttgggtttccggtcatagaaagttgatcgcatcgatgtctagcgactcgctgagacatgtctacggggaacttgatgtgcaaattcaaaggcgacctagcatg

SEQ ID NO: 9514 - DNA, 2196 bp, synthetic construct
  misc_feature 1..2196: note = source = /note="Description of Artificial Sequence: Synthetic coding sequence"
  source 1..2196: mol_type = other DNA
atgtcggaaacctccaggactgcgtttggcggacgccgggccgtcccaccaaacaattcaaacgcggcagaggacgacctcccaactgtggagctgcagggcgtggtgccgcggggcgtcaacctgcaagaattcctgaacgtcacctcggttcacttgttcaaggagcggtgggatactaacaaggtggaccaccatacggataagtacgaaaacaacaaacttattgtccggagggggcagagcttctatgtccagatcgacttctcccgtccatacgacccacggagagacttgtttcgcgtggaatacgtgataggaagatatccgcaggagaataagggcacctacataccggtccccatcgtcagcgaactgcagtccggaaagtggggagcgaaaattgtgatgagagaagatcggtcagtgagactctcgattcagtcctcacctaagtgtatcgtgggcaagttccgcatgtacgtcgccgtgtggactccttacggagtgttgaggacgtccaggaatcctgagactgacacttacatcctcttcaacccgtggtgcgaagatgatgcagtgtacctcgacaatgaaaaggaacgcgaggagtacgtgttgaatgatattggcgtcattttctacggggaggtcaacgatatcaagacccggtcctggtcctacggccaatttgaggacggaatccttgacacctgtttgtacgtgatggacagagctcaaatggatctgtcaggccgcggaaacccgattaaggtcagcagagtaggatccgcgatggtgaacgccaaggacgacgaaggagtgttggtcggaagctgggacaacatctacgcgtacggggtcccaccgtcggcctggaccgggtcggtcgatatcctgctggaataccggtcctcggagaatccggtgagatacggacagtgctgggtgttcgcgggagtgtttaacaccttcctgcggtgtctgggtatcccagccaggattgtcaccaactactttagcgctcacgacaacgatgctaacctgcaaatggatatctttctggaagaggatggtaacgtgaacagcaagctgaccaaggactccgtgtggaattaccactgttggaatgaagcctggatgaccagacccgacctgcctgtgggttttgggggatggcaagccgtggactcgacgccgcaagaaaattcggatggaatgtacagatgtggaccggcgtcagtgcaggccatcaaacacggtcatgtgtgcttccaattcgatgctccgtttgtgtttgcagaagttaactccgatctgatctacatcactgccaagaaagacggtacccacgtcgtggagaatgtcgacgcgactcacatcggcaaactgatcgtgaccaagcagatcgggggagatggcatgatggacattaccgacacctataagttccaggaggggcaggaagaagagagactggccctggagactgctctcatgtacggagccaagaaaccactgaacaccgagggcgtcatgaagagcaggtcgaacgtggacatggacttcgaagtggaaaacgccgtgttgggcaaggatttcaaactgagcatcacttttcgcaataactcgcacaatcggtacaccatcaccgcctacctgagcgctaacatcaccttttacaccggtgtcccgaaggccgaattcaagaaggagacttttgacgtgactttggaacccttgagctttaagaaggaagcagtgctgattcaagcgggagagtacatggggcagcttctcgagcaggcatcgctccatttcttcgtgaccgcgcggattaatgaaactcgggacgtgctggccaaacagaagtcgaccgtcctgaccattccggaaatcatcatcaaggtccgcgggacgcaggtcgtcggatcggacatgacggtgacggtgcagttcaccaatcccctgaaggaaacccttcgcaatgtctgggtgcacctggacggaccgggtgtgacccgtccgatgaagaagatgttccgggaaatccggccgaactcaaccgtgcagtgggaggaagtgtgccgcccgtgggtgagcggacaccgcaagctgatcgcatcaatgtcctcagattccctccgccatgtgtacggagagctggacgttcagatccagcgccggccgtcgatg

SEQ ID NO: 9515 - DNA, 2196 bp, synthetic construct
  misc_feature 1..2196: note = source = /note="Description of Artificial Sequence: Synthetic coding sequence"
  source 1..2196: mol_type = other DNA
atgagtgaaacaagtagaactgcatttgggggaagaagagctgttccaccaaataatagtaatgcagctgaagatgatttgccaactgttgaattacaaggagtagttccaagaggagttaatttacaagaatttcttaatgtaacttctgtacatctttttaaggaaagatgggatacaaacaaagttgatcatcatactgataaatatgaaaataataaacttattgttagaagaggacaatcattttatgtgcaaattgatttttctagaccatacgacccaagacgtgatctttttagagttgaatacgttatagggcgttatcctcaagaaaataaaggaacatatattcctgttccaattgtttctgaattacaatcaggaaagtggggagctaaaattgttatgcgagaagaccgttctgttagattgtcaattcaatcaagtcctaagtgtattgttggtaagttcagaatgtatgtagctgtttggacaccatacggggtattacgaacttctagaaatcctgaaactgacacatatattttgtttaatccatggtgtgaagatgatgcagtttatttagacaatgagaaagagagagaggaatatgttctaaatgatattggtgtaatattctacggtgaagttaatgatattaaaacaagatcatggtcctatggacaatttgaagatggaattttagatacatgtttatatgtaatggatagagcacaaatggatcttagtggaagaggaaatccaataaaagtaagtagagttggttcagcaatggtaaatgctaaagatgatgaaggagttttagttggatcttgggataatatttatgcttatggtgttccaccttctgcatggacaggttcagttgatatacttttagaatatagatcatctgaaaatccagtccgttatggacagtgttgggtttttgctggtgtttttaatacttttcttagatgtcttggaataccagctagaatagttactaattatttttctgctcatgataatgatgcaaatctacaaatggatatttttttagaagaagatggaaatgttaacagtaaacttactaaagatagtgtttggaattatcactgttggaatgaagcctggatgactagacctgatttaccagttggttttggaggatggcaagctgtcgattctactccacaagaaaatagtgatggaatgtatagatgtgggccagcatctgttcaagctattaaacatggtcatgtttgtttccaattcgatgctccttttgtttttgcagaggttaattctgatttaatttatattacagcaaagaaagatggtacacacgtcgttgaaaatgttgacgctactcatattggaaaattgattgtgacaaaacaaattggaggagatggaatgatggatattactgatacatataagtttcaagaaggacaagaagaagaaagacttgcacttgaaactgcacttatgtatggagcaaaaaaaccacttaatactgaaggtgttatgaaatctcgaagtaacgttgatatggattttgaagttgaaaatgcagtattaggaaaagattttaaactttctattacttttagaaataattcacataatagatatactattactgcatacttatcagcaaatataacattttacactggagtgccaaaagcagagtttaaaaaagaaacttttgatgttacattagaaccattatctttcaaaaaagaagcagttttgattcaagccggagaatatatgggtcagttactagaacaagcttctcttcatttttttgttactgctaggatcaatgaaacaagagatgttctagccaaacaaaaatctacagttttaactattcctgaaattattataaaggttagaggaacacaagtggttggttcagatatgactgtaacagttcaatttactaatccattgaaagaaacattacgtaacgtttgggtacatcttgatggaccaggagttactagaccaatgaaaaaaatgtttagagaaataagaccaaatagtacagttcaatgggaagaagtttgtcgaccttgggttagtgggcatagaaaattaattgcatctatgtcatctgatagtttaagacatgtatatggagaattagatgtacagattcaaagacgtccatcgatg

SEQ ID NO: 9516 - DNA, 2196 bp, synthetic construct
  misc_feature 1..2196: note = source = /note="Description of Artificial Sequence: Synthetic coding sequence"
  source 1..2196: mol_type = other DNA
atgtctgaaactagcaggactgccttcggcggaaggcgcgccgtcccccctaataactccaacgctgccgaagacgacctacccaccgtggaactgcagggtgtggtccccaggggcgttaacctgcaggagttcttgaatgtgaccagtgtccacttatttaaggaaaggtgggatacaaacaaggtagatcaccacaccgacaagtacgaaaacaataaactgattgttagacgcggccaatctttttatgttcagattgatttcagccggccctatgatccccgtcgagatctgttccgcgtggagtacgtgatagggaggtacccacaggaaaacaaaggaacctatatcccggttcccattgtctcagagctgcaatctggcaaatggggcgcgaagatcgtcatgcgggaggatcgcagcgtgaggttgtctatacagagttcccccaaatgcatagtgggcaaatttcggatgtacgttgccgtgtggacgccctatggggtgttgcggacctcccggaatcccgagaccgatacttacattctgtttaacccctggtgcgaagacgatgccgtgtaccttgataacgagaaggaacgcgaggagtacgttctcaacgacatcggggttattttttatggtgaagtgaatgatataaagacgagaagttggtcctacggacagtttgaggatggcatcttagacacttgtctgtacgtcatggacagagcccagatggacctgagcggcagaggcaacccgattaaagtgtccagagtcggaagcgcaatggtaaacgccaaggatgacgagggggtgctggttggcagttgggacaatatttatgcctacggcgtccctcccagtgcttggacaggatctgttgatatactgctggagtatagatccagtgaaaatcctgtgagatacgggcagtgttgggtgttcgctggagtttttaacaccttcctcaggtgcctcggaattcctgccagaattgtcaccaattacttcagcgcccatgacaacgatgccaatctccagatggatatcttcctggaggaggacggaaacgtcaactctaaactgaccaaagattcagtgtggaactatcactgttggaatgaagcttggatgactcgccccgacctgcccgttgggtttggaggttggcaggcagtcgactcgacccctcaggagaattctgacggcatgtaccggtgtggccctgcgtccgtgcaggccattaaacacgggcacgtgtgtttccagttcgacgccccatttgttttcgcggaagtgaatagcgacctcatctacatcactgctaagaaggatggtacgcatgtggtggagaatgtcgacgccactcatattggaaaactgatcgttaccaagcagatcggcggagacggcatgatggatatcactgatacatataaatttcaggaaggccaggaagaggaaagactcgcgctggagacagccttgatgtacggagccaaaaaaccgttgaacaccgagggcgtgatgaagagccggagcaatgtggatatggatttcgaggtcgaaaatgccgttttaggtaaggatttcaagctgagtattactttccgcaacaactcacacaatcgctacactatcacagcctacctatcggccaatataaccttctatacaggagttcccaaggcagagttcaagaaggagacatttgacgtgacgctagaaccacttagcttcaagaaggaggcagtgttaatccaggctggcgaatatatgggtcagctgctcgagcaagcgtctctacattttttcgtgactgctagaataaacgagaccagggatgtgctggctaaacagaagagcacagtgctgacaatccctgagatcatcatcaaggtacgcggaacccaagttgttggatctgatatgaccgtcaccgtgcagttcaccaacccactgaaggaaaccctgaggaatgtgtgggtgcacctggatggccctggggtgacacgccctatgaagaaaatgtttcgggagatacggcccaattcaaccgttcagtgggaagaggtgtgtcgtccctgggtgagcggtcaccgcaaacttatcgcttccatgtcctccgactccttgcggcacgtgtatggagagttggacgtgcagatccaacgtcggcctagcatg

SEQ ID NO: 9517 - DNA, 2196 bp, synthetic construct
  misc_feature 1..2196: note = source = /note="Description of Artificial Sequence: Synthetic coding sequence"
  source 1..2196: mol_type = other DNA
atgtcagaaacttcacgcaccgcgttcggtggaagaagggccgtcccacccaacaactccaacgccgctgaggacgacctccctacggtggaactccagggcgtcgtgccccgcggagtcaatctgcaggaattcctcaatgtgacgtcagttcacctctttaaggaaagatgggataccaacaaggtcgaccaccacacggacaaatacgaaaacaacaagctcattgtccgtcggggccagtcgttctacgtgcagatcgatttctccagaccctacgaccctagacgggacctgtttcgcgtcgaatacgtgatcggcaggtacccgcaggagaataagggaacttacattccggtgccaatcgtgtcggagctgcagtccggcaagtggggagcaaagatcgtgatgagagaggatagatcggtccggctctccattcaatccagcccgaaatgcatcgtgggaaagtttagaatgtatgttgcagtgtggactccttacggggtgctcagaactagcagaaacccagagactgatacttacatccttttcaatccatggtgcgaggatgatgccgtgtaccttgataatgagaaggaaagggaggaatacgttctgaatgatatcggtgtgatcttctatggagaggtcaatgatatcaagacccggtcctggtcgtacggacaattcgaagatgggatcctcgacacttgcctctatgtgatggatcgagcccagatggacctttcgggacggggaaatccaataaaggtgtccagggttggatcagcaatggtaaatgcgaaagacgatgaaggagttctggtgggctcgtgggacaatatctacgcgtacggagtcccgccgtcagcgtggaccggctccgtggatattctgctcgaataccggtcctcggagaacccggtgcgctacggtcagtgctgggtgttcgccggagttttcaacactttcttgagatgcctgggaattccagctcggatcgtgactaactacttctctgctcatgacaacgatgctaacctgcaaatggacatctttttggaggaagatgggaatgtcaactcgaagttgactaaggactcggtatggaactaccactgttggaatgaagcctggatgaccaggcccgaccttccggtcgggttcggaggctggcaagcagtggactctacccctcaagaaaactcggatgggatgtacagatgtgggccggcctccgtgcaggccatcaagcacggacacgtgtgtttccagtttgacgcgccgttcgtgttcgcagaagtgaatagcgatctgatctacatcaccgccaaaaaagacgggacccatgtcgtcgaaaacgtcgacgcgacccatatcggcaaattgatcgttactaagcagatcggtggagacggtatgatggacataactgacacctacaagttccaggaaggccaggaagaagagcgcctcgccctggaaaccgctctcatgtacggagcgaagaagccgcttaacaccgagggtgtgatgaaatcccgaagcaacgtggacatggacttcgaggtcgagaatgcggtgctcggaaaggactttaagttgtcaataacctttcggaacaacagtcacaatagatacaccatcaccgcgtacttgagcgcgaatatcactttctataccggagtcccaaaggcagaattcaagaaagaaactttcgacgtgaccctggagccgctgtcatttaagaaagaggcggttctgatccaggctggagagtacatggggcaactgctggaacaagcctccctgcatttcttcgtgactgcaaggatcaacgaaacccgcgatgtgctcgccaaacaaaaatccaccgttctgaccatccccgagattatcataaaagtccgcggtacgcaggtggtcgggtcagacatgactgtgactgtgcaattcaccaaccctctgaaggagactctgagaaacgtgtgggtgcatctggatggtccgggagtgacccggccaatgaagaagatgtttcgcgaaatccggcctaacagcaccgtgcaatgggaggaagtgtgccgtccatgggtgagcggacaccgcaaacttatcgcgagcatgtcatccgactcgttgcgtcatgtgtacggagaactcgacgtgcaaatccagaggcgaccgagcatg

SEQ ID NO: 9518 - DNA, 2196 bp, synthetic construct
  misc_feature 1..2196: note = source = /note="Description of Artificial Sequence: Synthetic coding sequence"
  source 1..2196: mol_type = other DNA
atgtcggagacatcgcggacggcatttgggggtcgtagagcggtgcctcctaataattcaaatgcggccgaagacgatctgccaacagttgaacttcaaggcgttgttcctcgcggcgttaatctgcaggagtttctgaacgtcacatcggtgcacctgttcaaagaacggtgggataccaacaaagtagatcatcatacagataaatacgaaaataataaattaatcgttagaagaggccaaagtttttatgttcagatcgacttttctcgcccttatgatccgagacgtgatttgttccgagtcgagtacgtcattggacggtacccacaagaaaacaaaggtacttatatcccggtcccgattgttagcgaacttcaatcgggcaagtggggagcgaaaatcgtaatgcgcgaagaccggtctgtcaggctctcgattcaaagctcgccaaagtgtattgttgggaaattccgtatgtatgttgctgtctggacaccttatggcgtacttcggacatcgcggaacccagaaacagacacgtatattctgtttaatccatggtgcgaagatgatgctgtatatctcgacaatgagaaggaaagggaagaatatgtattaaacgatatcggagtaatcttctatggagaggtcaacgatatcaagactcgatcctggtcatatggacagtttgaggatggcattctcgatacatgcttatatgtaatggacagggcccagatggatctgagcggccgtgggaatcctattaaagtaagtagggtcggatccgccatggtgaatgcgaaagatgatgaaggggtcttggtcgggagctgggataatatttacgcatacggagtgcctccgagcgcctggacagggtctgtggatatactgttggaataccgaagctcagaaaaccccgtgagatatggccagtgttgggtctttgctggagtttttaatacgtttctacggtgccttggcattccagctagaattgtgaccaattatttttcagcacatgataatgatgcgaacttgcaaatggatatatttttggaggaagatggcaacgtcaactcaaaattgactaaggactcagtctggaattatcactgttggaacgaagcttggatgacacgtcctgatctgcccgtcggttttggtggctggcaagcagtcgactcaactccacaggaaaactcagatggaatgtatcgatgtgggccggcatccgtccaagcaattaaacatggtcatgtctgctttcaatttgacgctccgtttgttttcgcggaggttaattcggatctgatctatatcaccgctaaaaaggatggtacacacgtcgtcgaaaatgtagacgcgactcatataggcaaactcatcgttacaaaacaaattgggggggacggcatgatggatattacagatacgtacaaattccaagaaggccaggaagaagagcgcctggcattagaaacagctcttatgtatggcgcaaaaaaaccgcttaatacggagggcgtgatgaagagccgctcgaatgtcgacatggattttgaagtggagaacgccgtgctgggcaaggactttaaattgagtattacattccgaaataattcacataaccgttatacgattacagcttacttgtccgccaatatcacattttacacaggcgttcctaaagcggaatttaagaaggaaacgtttgacgtgactctggaaccgttatcgtttaaaaaagaggcagtgttgattcaagccggagaatacatgggacaattattagagcaagcatctctccacttttttgttacagctcgtattaatgaaacgcgcgacgtcctggcaaaacagaaatcaaccgtattgacaattcctgaaatcatcattaaagtgcgtggcactcaagtagttggatccgacatgacagttacagtacaatttactaacccgcttaaagaaacgctgcgtaatgtctgggtacacttagacggaccgggagtgacacggccgatgaagaagatgtttcgggagattcgtcctaatagtactgtgcaatgggaagaagtttgccggccgtgggttagcggccatcgaaagctgatagcgtccatgtcttcggatagtcttcgccacgtctatggcgaactagatgtgcagatccaacggagaccgtcgatg

SEQ ID NO: 9519 - DNA, 2196 bp, synthetic construct
  misc_feature 1..2196: note = source = /note="Description of Artificial Sequence: Synthetic coding sequence"
  source 1..2196: mol_type = other DNA
atgagtgagacaagcagaacggcttttggcggccggcgtgccgtgcctccaaacaattccaatgccgcggaagacgatttacccaccgtcgaactgcagggagtcgtgccccggggggttaatcttcaggaatttctcaatgtaacttcagtacatctgttcaaagaaaggtgggacacaaacaaagtggaccaccatactgacaagtatgagaacaacaagctgattgtgagaaggggccagtccttttacgtccagattgatttctcccggccgtacgatcctcgaagggatctgtttagggtggaatatgttatcggaagatacccacaggaaaacaagggaacatacatccctgtgcccattgtgtctgagctccagagcggcaaatggggtgctaaaatcgtgatgcgagaagatcggtccgtgaggttgtcgatacaaagctcacctaagtgcatcgtgggtaagttccgaatgtacgttgccgtgtggactccgtacggcgtgctcagaacctcaagaaacccggagacagacacttacattctgttcaacccctggtgcgaggatgacgcagtctacctggacaatgagaaagagcgcgaggaatacgtgctgaatgatatcggagtcatcttttatggagaagtgaacgatattaagacacgttcatggagctatgggcaattcgaagacgggatcctagacacttgcctgtatgttatggatcgagcacagatggacctgagcgggagaggtaacccgatcaaggtgtctcgcgtgggatccgctatggtgaacgcaaaagatgacgagggcgtgctcgtgggctcgtgggataatatatatgcatatggagtgccgccgtctgcttggaccggtagcgtggacattctgctcgaataccgcagttctgagaatccagtgaggtatggccaatgctgggtatttgcaggcgtatttaatacattcctgcgctgcctcggcatccccgcccggatcgtaaccaactatttcagcgcgcacgacaacgatgccaatctccaaatggacatctttttggaagaagacgggaatgtaaattctaagttgacaaaagactcagtatggaattaccattgctggaatgaggcctggatgacccgaccggaccttcctgttgggttcgggggttggcaggctgttgactccacaccacaggagaattcggatggaatgtatcgctgtggccctgcctctgtacaggccattaaacacggccacgtctgctttcagttcgacgcacctttcgtcttcgctgaagttaactctgacctgatttacatcacagccaagaaggatggcacccacgtcgtggagaatgtggatgccacacatatcgggaaactgatcgtgaccaagcagatcggcggcgacggaatgatggatataactgacacttacaagttccaggagggacaagaggaagaaagactagcccttgagacagccttaatgtacggcgcgaagaagcctttgaatacagagggggtgatgaaatccagatccaacgtggatatggactttgaggtcgagaacgcggtgctgggtaaagatttcaagctctctatcacattcagaaacaattcacataatcggtacactattacagcatacctgtcagccaacattacattttatacaggggtacccaaagccgagtttaaaaaggaaacatttgacgtcactctggagcccctcagctttaagaaagaagctgtgctgattcaggcaggcgagtacatggggcaactgctggagcaagcctcgttgcatttcttcgttacagctcggataaacgagaccagagatgtgttagcaaagcagaagtccacagtgttgaccattccagagattatcataaaggtgcgaggtacacaggtagtaggctccgatatgacagtgaccgtgcaattcacaaatccactgaaggagaccctcaggaatgtgtgggtgcacctggacggtcctggagtgactaggccgatgaagaaaatgtttagagagataaggcccaactcaaccgtgcagtgggaggaggtatgccgaccatgggtctctgggcacagaaaattgattgcctcaatgtcctcggattccttgcgtcacgtgtacggcgaactagacgttcaaatccagcgccgcccctccatg

SEQ ID NO: 9520 - DNA, 2196 bp, synthetic construct
  misc_feature 1..2196: note = source = /note="Description of Artificial Sequence: Synthetic coding sequence"
  source 1..2196: mol_type = other DNA
atgtctgaaacttccagaacagcctttggagggaggagggcagtgcctccaaataactcaaatgctgcggaagatgatctgcccactgttgaactccagggggtcgttcccaggggagtaaaccttcaagaatttctgaatgtcacttcagttcacctgttcaaagaaaggtgggatacaaacaaggttgatcaccacactgataaatacgagaacaacaaacttatcgttaggcgggggcagtcattctatgtgcagatagatttctcacgaccctacgacccccggcgggatcttttccgagtggagtacgttatcgggcggtaccctcaagaaaataagggaacttatatccccgtccctatagtgtccgaactacagagtggaaagtggggagccaagatcgtaatgcgcgaagataggtccgtgcggctatctatccagtcctcacctaaatgcatagtgggaaaattcagaatgtatgtggcagtatggacaccgtatggggtgttacggacatcccggaacccagagacagatacatatatactgttcaacccttggtgcgaagatgatgccgtatacttggataacgaaaaagaacgcgaagaatatgtgctgaatgatataggagttattttctatggggaggtcaatgatatcaaaactaggtcttggtcgtatgggcagttcgaagatgggattctcgatacatgcctctacgtcatggatcgcgctcagatggatctttccgggaggggaaaccccatcaaggtgagtcgggtggggagtgccatggtgaatgccaaagatgacgaaggagtcttggtggggtcctgggataatatctatgcttatggagtaccaccatcagcttggactggatcagtggatatactcctagagtaccggtcttccgaaaatccagtacgctacggacagtgttgggtcttcgccggagtgttcaacacttttctccggtgtcttggaatccccgcccggatcgtgacaaattatttctctgcccatgacaatgatgctaatctccagatggatatatttctcgaagaagacgggaatgtcaactccaaactcactaaagattccgtctggaattatcattgttggaacgaagcctggatgacacgccctgatcttcctgttggattcggaggatggcaggccgttgattccacaccacaggaaaattccgatggaatgtacagatgtggacccgcatcggtgcaggccataaaacacggacatgtatgtttccagtttgatgccccattcgtcttcgctgaggttaattccgatcttatatacataacagccaaaaaggacggaacgcacgtggtcgaaaacgtcgatgccactcatatcgggaaattaattgtcactaaacagatcgggggggatgggatgatggatataacagatacttataaatttcaggaaggacaggaagaggaacgtctggcacttgaaacagccttaatgtatggagccaaaaaacccctgaacacagaaggggtgatgaaatctcgctcaaacgtggatatggattttgaagtggaaaatgcagtgttagggaaggattttaaactgtctatcacgtttcgaaacaactcccacaacagatatacaatcactgcttatctgagtgccaacatcactttttatacaggggtgcccaaggcagaatttaaaaaagaaacatttgacgtaactctcgagcccctcagttttaaaaaagaggcagtcctaattcaagccggggaatatatgggacagctcctcgaacaggcatccctgcacttcttcgtgactgctaggataaacgaaacaagagatgtacttgcgaaacagaaatctacagtgctgacaatccctgaaatcatcataaaagtgcgcggaacacaggtggtggggtctgacatgacagtaactgttcagttcacaaatcccctgaaagaaactttgagaaatgtgtgggtgcatttagatgggcctggagtgacacggcccatgaaaaaaatgttcagggaaatccgacctaactctactgtccagtgggaagaagtatgtcggccttgggtgtcaggacatcgtaaactcatcgcctctatgtcctctgactccttaaggcatgtatatggagaactagatgtccagatccagaggcggccctctatg

SEQ ID NO: 9521 - DNA, 2196 bp, synthetic construct
  misc_feature 1..2196: note = source = /note="Description of Artificial Sequence: Synthetic coding sequence"
  source 1..2196: mol_type = other DNA
atgtcagagacatccaggaccgcattcgggggacggcgtgccgtgcctccaaataactcaaacgcagctgaggacgacctccccacagtcgaactgcaaggtgtggttcccaggggggtgaatctacaggagtttcttaatgtgacctccgtgcacctttttaaagaacgctgggataccaacaaggtagatcaccataccgacaagtacgagaataataagcttatcgtgagaagaggtcagagcttctatgttcagattgactttagccgaccgtatgatcccagaagagacctttttagagtggagtacgtgattggaaggtatccccaagaaaacaagggaacctatatccccgtgcctattgtgtccgagcttcagtccggaaagtggggagcaaaaatcgtgatgagggaggatcgttcagtgagactctccattcagagctcccccaaatgtatcgtcggaaaatttagaatgtacgtagctgtgtggaccccttacggagtgctccggacgtcaaggaacccagagacagacacatacattctgttcaacccatggtgcgaggacgacgcggtctatctcgacaacgaaaaggagcgcgaggaatacgtattaaatgacattggcgtgattttctatggcgaggtgaatgacataaaaacaaggtcttggtcttatggccaatttgaggatggtattttggatacctgcctgtacgtgatggatcgcgcacagatggatctgtccggacgcggtaatcctatcaaagtgtcacgggtcgggagtgccatggtcaatgctaaagatgatgagggtgtgctcgtgggctcttgggataatatctatgcgtatggtgttccgccgtccgcatggactggctcagtcgatatcttgttagagtaccggagctctgagaatcccgtccgctacggccagtgctgggtcttcgctggggtgttcaacacatttcttaggtgcctcgggatccccgcaaggattgttactaactacttttctgcgcatgacaacgacgctaacctccagatggacatctttttggaagaggatggcaatgttaattccaagctcaccaaggattcagtgtggaactaccattgttggaatgaggcatggatgacacggccagacctccccgtaggtttcggagggtggcaggcagtggactccaccccgcaggagaacagcgacggcatgtataggtgcgggcctgcctcggtccaagctatcaagcacggccatgtgtgttttcaattcgacgctccatttgtcttcgctgaggtaaatagtgatctcatttacatcacagccaaaaaggacggcacacacgtggtggaaaacgtcgacgccacgcacatcggtaaattgattgtcaccaaacaaatcggcggtgatggtatgatggacatcaccgatacctataaatttcaggagggccaggaggaagaaaggctggccctggagacggctctcatgtatggggcgaagaaacccctgaacacagagggggttatgaagtctcggtccaacgtcgatatggatttcgaagtcgagaatgccgtgctgggcaaagacttcaagctaagtattacattccggaacaacagtcataataggtacacgataaccgcatatttatcggctaatattacattctatactggggtgccaaaagccgagttcaagaaagaaaccttcgacgtgactctggagcccctatctttcaagaaggaagcagttctcattcaggctggagagtatatgggacaattacttgaacaggccagtttgcacttcttcgtaacagccaggataaatgagacccgtgacgtcctcgcaaagcaaaaatctaccgtcctgactatccccgaaattataataaaagttcgtggcactcaggtcgttggcagcgacatgacggtgacggtgcagtttaccaacccactgaaagagactttgcgcaatgtttgggtgcatctggacggacccggcgtgacacgccctatgaaaaagatgttcagggaaattcggcccaattcgaccgtgcaatgggaggaggtctgccgaccatgggtaagcggacatcgcaaactgatagcctctatgtcgtctgactcattgcggcacgtctatggcgagctagatgtacagatacagagacgcccaagtatg

SEQ ID NO: 9522 - DNA, 2196 bp, synthetic construct
  misc_feature 1..2196: note = source = /note="Description of Artificial Sequence: Synthetic coding sequence"
  source 1..2196: mol_type = other DNA
atgtcagaaaccagccggaccgccttcggcgggcgccgcgctgtcccgccaaacaacagcaatgcagcggaggacgaccttccaactgtggaattgcagggagtggtgccgcgcggggtcaatttgcaggaatttctcaatgtcaccagcgtgcacctctttaaggaacgctgggataccaataaggttgaccatcataccgacaaatatgagaacaacaagctgattgtgagacgcggacagtccttctacgtgcagatcgattttagccggccttacgatccaagaagagatctgttccgcgtggagtacgtgatcggaaggtacccacaggaaaacaaaggaacttacatccctgtgccaattgtcagcgaactccagagcggcaaatggggcgcaaagattgtgatgcgggaggacaggtcggtccggctctccatccagagctccccgaaatgcatcgtgggcaagtttaggatgtacgtggcagtgtggaccccgtacggagtgctcagaacctcgcgcaaccccgaaaccgatacttacattttgttcaacccctggtgcgaggacgatgctgtgtacctcgataacgaaaaagagcgggaggaatacgtcctcaacgatattggcgtgatcttctacggagaagtgaatgatatcaaaactcgctcgtggtcatacggccagttcgaggacggaatcctcgacacctgtttgtacgtcatggacagagcccagatggacctctctggacggggtaaccctatcaaagtgtcgagggtgggatccgccatggtgaacgccaaagacgatgaaggggtgctggtgggatcgtgggacaacatctacgcctacggcgtgccaccgagcgcctggactgggtccgttgacatcctcctcgaataccgctcctcagaaaacccagttcggtatggtcagtgctgggtctttgcaggagtctttaacactttcctgcggtgcttgggcatcccggcgcggatcgtcaccaactacttctcggcgcacgacaatgacgcgaatctgcaaatggacatctttctggaagaagatggaaatgtgaactcgaagctgaccaaggactccgtgtggaattaccactgctggaacgaagcatggatgaccaggccggacctgcccgtgggctttggcggatggcaggcagtggactccaccccccaggaaaatagcgacggaatgtaccgatgcggccctgcgtcggtgcaggccatcaagcatggacacgtctgcttccaatttgatgcgccgttcgtgttcgctgaagtgaactcagatctgatctatatcaccgccaaaaaagacggaacgcacgtggtggaaaacgtggatgccactcatatcggtaaactcatcgtgaccaaacagatcggaggagacggcatgatggacatcactgatacttacaagttccaagagggacaagaagaggagcgcctggctctggaaaccgcgttgatgtacggcgcaaagaagccactgaatactgagggggtcatgaaaagccggtcgaatgtggacatggacttcgaggtggagaacgctgtcctgggcaaggatttcaaactctcgattaccttccgaaataactcccataatcggtacaccattaccgcgtacctgtcagccaacattaccttctacaccggagtgccgaaagcggaattcaaaaaggaaactttcgacgtcaccctcgagccgctttccttcaagaaagaagccgtgttgatccaggccggcgagtacatgggacaactgttggaacaggcatcgctgcacttcttcgtgaccgcccgtattaacgagactagagacgtgctcgccaaacagaagtcgactgtcctcactatcccggagatcatcatcaaggtgcggggcactcaagtggtgggttccgatatgaccgtcactgtccaattcaccaaccctctgaaggagacgctccgcaacgtgtgggttcacctggacggacccggtgtcactcggcccatgaagaaaatgtttcgcgagatcagaccgaatagcaccgtgcaatgggaagaagtgtgccgcccgtgggtcagcgggcaccgcaaactgattgcttcgatgtcgtccgactcgctccggcacgtctacggagaactcgacgtccaaattcagagacgcccgagcatg

SEQ ID NO: 9523 - DNA, 2196 bp, synthetic construct
  misc_feature 1..2196: note = source = /note="Description of Artificial Sequence: Synthetic coding sequence"
  source 1..2196: mol_type = other DNA
atgagcgaaacgtcacgcaccgcatttggaggacggagagcagtgcccccgaacaactccaacgccgcagaagatgatcttccgaccgtggaacttcaaggtgtggtgcctagaggcgtcaacctccaagaattcctcaacgtcacttccgtccatctgtttaaagagagatgggataccaacaaggtagatcaccatactgataagtatgaaaacaacaagctcatcgttagacgcggacagtcattttacgtgcaaattgatttttcacgcccgtacgaccccagacgggatttgtttcgggtcgaatatgtcattggtcgctaccctcaagaaaacaagggaacctacatcccagtgccaatcgtgtcggagttgcagagtggtaagtggggagccaagatcgtgatgcgcgaagatcggtccgtcagactgtccattcagagctccccaaagtgcatcgtggggaagtttaggatgtacgttgcggtgtggaccccttacggggtgctgagaacgtcgagaaatccggaaaccgatacgtacattcttttcaatccgtggtgtgaagatgatgccgtgtacctcgataacgaaaaggaacgagaagagtacgtgctgaacgacatcggagtcatattctatggtgaggtcaatgacatcaagactcggtcctggagctacggtcagttcgaagatggaattctcgatacctgtctctacgtaatggatcgggcacaaatggacctttcggggcgcggaaaccctattaaggtttcccgtgttggctcggcaatggtgaatgcaaaggatgacgaaggtgtcctcgtaggaagctgggacaatatctacgcatacggggtgcccccctccgcttggaccggatcggtcgacattcttctggagtacaggtcaagtgagaatccagtccggtatggacaatgttgggtctttgccggggtgtttaacacttttctgcgctgtcttggcatacccgctcgtatagtgaccaactacttttcggcccacgataatgatgccaatctgcagatggacattttccttgaggaggacggcaacgtgaattcaaagctgactaaagactcagtttggaactaccattgctggaatgaagcatggatgactcgccctgaccttcctgttggctttgggggttggcaggcagtggattcgactccgcaggaaaacagcgatgggatgtacagatgtggaccggcatcggtccaagcgataaagcatggccatgtctgcttccaattcgatgcgccttttgtgttcgccgaggtcaactccgatcttatctacataaccgcaaaaaaggatggtactcacgtggtggaaaatgtggatgcgactcatattggtaaacttatagtgactaaacagattggtggggatggcatgatggatatcaccgacacgtacaagttccaggaaggtcaagaagaggaaagattggcactcgagactgcacttatgtacggagcgaagaaaccccttaacaccgaaggcgtgatgaaatcacggtcaaacgtcgacatggatttcgaggtcgaaaatgcggtgctgggaaaggactttaaactgagcattacctttcgcaataacagccataaccggtacaccatcactgcatacttgagcgctaacattacgttttacactggggtgccaaaggcagagttcaaaaaggaaacttttgacgtcaccctggaaccattgtccttcaagaaggaagccgtcctgatccaggccggcgagtacatggggcaacttcttgagcaagcaagcctgcacttttttgtgactgcacgcattaatgaaaccagggacgtgcttgcgaagcaaaaatcgaccgtcctcaccattcctgaaatcatcatcaaagtgcgtggaacccaggtggtgggatcagatatgaccgtgactgtgcagtttactaacccacttaaggaaaccctgcgcaacgtgtgggtacatcttgatggtccaggagtgacccgcccaatgaaaaagatgttccgtgagatacggcctaactcaaccgtgcaatgggaggaggtgtgtcgaccttgggtgtccggacatcgcaagctgatcgcatcgatgagcagcgactccctccgccacgtgtacggcgaacttgatgtccagattcaacgcagaccttcgatg

SEQ ID NO: 9524 - DNA, 2196 bp, synthetic construct
  misc_feature 1..2196: note = source = /note="Description of Artificial Sequence: Synthetic coding sequence"
  source 1..2196: mol_type = other DNA
atgagtgaaacgtcccgcaccgcctttggaggcaggcgggcagtccctccaaacaattccaacgctgccgaggatgatttacctaccgttgaacttcagggcgtcgttcctcgaggagtaaatctgcaggaattcctgaacgtgacttccgtgcacctgtttaaagagcgctgggacacaaataaagtggaccatcacacagataagtatgagaataacaagctcatcgtgcgtagagggcagtcgttttatgtgcagatcgatttctcaagaccatacgaccctcggcgggacctatttagggttgagtacgttattggccggtatcctcaagagaataaagggacatacatccctgttccgatagttagcgaattgcagagcggaaagtggggcgcaaagattgttatgcgcgaggatagaagtgttcggttgagcatccagtcaagccccaagtgcattgttggaaaattccgtatgtacgtggcggtatggactccatatggagtgttgcgcaccagtcgcaatcccgagacagatacttacattctttttaacccctggtgtgaagacgatgcagtgtacttagacaatgaaaaggagcgcgaggagtatgtgctgaacgacatcggggtgatcttttacggcgaagtgaacgatattaagacccgctcatggtcctatggccagtttgaggacggcatcctggatacctgcctctacgtcatggacagggcacagatggatctgtctggacggggaaaccctataaaggtgtctcgcgtaggaagtgctatggtgaacgctaaggatgatgaaggtgtgttagtggggagctgggacaacatatacgcctatggcgtgccacctagtgcttggacaggctctgtggacatcctgctcgagtatcgatccagcgaaaatcctgttcggtacggtcaatgttgggtcttcgctggtgtgttcaatactttcctgagatgccttggtattcctgcacggatcgtgactaactatttttctgctcatgacaatgacgccaatttacagatggatatatttctcgaagaggacggaaacgtcaattctaaactcaccaaggactccgtgtggaattaccattgctggaacgaggcttggatgacacggcctgatctcccagtgggatttggcggctggcaagctgttgactctacgccccaggagaacagtgacggaatgtatcggtgtggacctgcatctgtgcaggctatcaagcatggccatgtgtgctttcaattcgacgcaccattcgtcttcgcagaggttaactcagacctgatttacattaccgctaaaaaagatggcacgcacgtcgtagagaatgtcgatgctactcatatcggcaaactgattgtgacgaagcagattggaggcgatggaatgatggacattacagacacctacaaatttcaggaagggcaggaagaggagaggctggccctcgagaccgcgctgatgtacggagctaaaaaacccctcaacaccgaaggagtaatgaagtcccggtccaatgtggatatggacttcgaggtcgagaatgccgtcctcgggaaagactttaagttgagtataactttcagaaataattcacataacaggtacacaattacagcatacctgagcgcaaatataaccttttacacgggcgtgccaaaggccgagttcaagaaggagaccttcgacgttactcttgaaccactttctttcaagaaggaagccgtcttgattcaggcaggtgaatacatgggacaactgctggaacaggcttctctacacttctttgtgaccgcacgaatcaacgagaccagggacgtgctggctaaacagaagagtactgtcctgactatccccgagattattatcaaagtccgggggacacaggtggttggcagcgatatgaccgtgaccgtccagttcactaatccattgaaggaaacactgcgtaatgtgtgggtgcatctggacggaccgggcgttacacgccctatgaaaaaaatgtttagagaaatcagacccaattccactgtgcagtgggaggaagtttgcagaccatgggtctccggacataggaaacttatagccagcatgtcatccgacagcctgcggcacgtatatggggagctggacgtacaaatacagcgccgtccaagcatg

SEQ ID NO: 9525 - DNA, 2196 bp, synthetic construct
  misc_feature 1..2196: note = source = /note="Description of Artificial Sequence: Synthetic coding sequence"
  source 1..2196: mol_type = other DNA
atgtcagaaacaagtcggacagcttttggagggcggcgggctgtgccacccaataatagtaatgcggccgaagacgatctccccacagttgagctccagggagtggtacccaggggggtgaatctgcaggaatttctgaatgtgacaagtgtacacctatttaaagaacgttgggatactaataaagtagatcatcatactgacaaatatgaaaataataaattaattgttcggaggggacaatcattctatgttcagattgatttttccagaccctatgatccaaggcgggacctgtttagggttgaatacgtaatagggagatatccccaggaaaataaaggaacatacatcccagtgccaatagtatccgaattacagagtgggaaatggggagccaaaatcgtgatgagggaagataggtctgtcaggctctccatccaatcttcacccaaatgtatcgtgggaaagtttaggatgtatgtcgcagtctggactccatacggagtactccgcacaagtcggaatccagaaacagatacatacatactatttaatccttggtgcgaagatgatgccgtctatctggataacgaaaaggaacgggaggaatatgtactgaacgacatcggagtaattttttacggagaagtgaacgatattaaaacaaggtcttggagttatggacagtttgaagatggaatactagatacatgtctctacgttatggatcgtgcgcagatggatctcagtggacgggggaaccctataaaggtatcacgggtcggatccgcaatggtcaatgccaaagacgatgaaggggtattggtgggaagttgggacaacatctatgcttacggggtccctccctctgcatggactggatcagtggatatactccttgaatatcgaagttccgaaaaccctgtgcgctatggacagtgttgggtgtttgcaggggtctttaacacattcttgcgctgtctggggattcccgcaaggatagtgacaaactatttttccgcccacgataatgatgccaacttacagatggacatcttcctcgaagaagatgggaacgtgaatagtaaactaacaaaagatagtgtttggaattatcattgttggaacgaagcttggatgactcggcccgatctacctgtcgggtttggagggtggcaggccgttgatagtactccacaggaaaatagtgacgggatgtaccggtgtgggccagcctcagtgcaggctatcaagcacggacatgtttgcttccagtttgatgccccattcgtttttgccgaagtgaactctgatctgatctacatcactgccaagaaagatgggacacatgtagtggaaaatgtagatgcgactcatatcgggaaactcatagttacaaaacagatcggaggagatgggatgatggatataactgatacatacaagttccaagaggggcaggaagaagaaaggcttgccctcgaaactgccctaatgtatggagcaaaaaaacctctcaatactgaaggagttatgaagtcgagaagtaatgtagatatggattttgaagtcgaaaatgccgtgctggggaaagatttcaaacttagtatcacattccggaataactctcataatagatacacaatcacagcctatctcagtgcaaacataacattttatacaggagtacccaaagctgaattcaaaaaagagacgtttgatgtaactttagaacctctctcctttaaaaaagaggccgtgctcatacaggccggagaatacatgggacagctgctagaacaggcttccctacacttctttgtgacagccagaatcaatgaaacacgcgatgttctcgccaaacagaagtccacggtgcttactatacccgaaatcataatcaaagttcggggaactcaggtggtggggagtgatatgactgtgactgtgcagttcacaaacccacttaaagaaacactgcggaatgtttgggtgcatctcgatggacccggggtgactagacccatgaagaaaatgttccgcgaaatccgacccaatagtacagtgcagtgggaagaggtttgtaggccctgggtttccgggcatagaaaattaatcgcatcgatgtccagtgattctctgagacacgtttatggagaactagatgtgcagatccagaggagaccctctatg

SEQ ID NO: 9526 - DNA, 2196 bp, synthetic construct
  misc_feature 1..2196: note = source = /note="Description of Artificial Sequence: Synthetic coding sequence"
  source 1..2196: mol_type = other DNA
atgagcgaaacctcacgcaccgcctttgggggacggagagcagtccctcctaacaattccaacgcagcagaggacgacctgccgactgtcgaactgcagggagtcgtgccacggggcgtgaaccttcaagaattccttaacgtcacttcagtgcatctgtttaaggagaggtgggatactaacaaggtggatcaccatactgacaagtacgaaaacaacaaactgattgtccgccgcggacagagcttttacgtgcaaatagatttttctaggccttacgatccacgaagagatctttttcgcgtggagtacgtcattggtagatatccccaggaaaacaagggaacttacatccccgtgccaattgtgtccgagcttcagagcggaaagtggggagctaagattgtcatgagggaagatagatccgtgaggctgtcgattcaatcgtcaccaaagtgcattgtggggaaattccgcatgtacgtggcagtctggaccccctacggcgtacttcgaacctcccgtaaccctgagacggacacctacattttgtttaatccttggtgtgaagatgacgccgtgtaccttgataacgaaaaagaacgggaagaatacgtgctcaatgatataggggtgattttctacggagaggtgaacgacattaagaccagatcctggtcttatggccaattcgaggatggtattcttgatacctgtctgtacgttatggatagggctcagatggatctgtcgggaagagggaacccaattaaggtgagccgcgtggggtccgctatggtgaacgcaaaggatgatgaaggagtgctcgtgggatcctgggacaatatctatgcatacggagtgcccccttcggcctggactgggagcgtcgatatactgcttgaatacagatcgtcggaaaaccccgtgcggtacggacaatgctgggtctttgcaggcgttttcaatactttcctgcgttgtttgggaattcctgcgcggatagtgaccaattacttctcggcacacgataacgatgcaaaccttcaaatggacatcttcctcgaagaggatggaaacgtcaactcaaagctgaccaaggattcggtctggaactaccactgttggaacgaggcttggatgacccgccccgacctgcctgtgggatttggggggtggcaagcagtcgattccaccccccaagaaaatagcgatggtatgtaccgttgtggacctgcctcggtgcaagccattaagcatggacacgtgtgttttcagtttgatgcacccttcgtgtttgctgaggtcaacagcgatctgatttacattaccgctaagaaagacggaactcacgtggtcgaaaacgtggatgcaacccatataggaaaacttattgtcaccaaacaaattggcggagatgggatgatggacattactgatacctacaagtttcaggaaggtcaagaggaggagaggctcgcactggaaacggcacttatgtatggtgccaaaaagccactcaataccgagggggtgatgaagtcgcgctcaaacgtggacatggattttgaagtggaaaatgccgtgctgggcaaggactttaaactttcaatcaccttccgtaacaattcacataataggtacactatcacggcgtacctgtcggccaacattactttttacactggggtgcccaaggcagagttcaagaaggagacgttcgatgtgactctcgaacctctgtcctttaagaaggaagccgtgctgattcaagcaggagaatacatgggtcagctgctggaacaagcctcgcttcatttctttgtgaccgcacggataaatgaaacccgcgatgtgttggcaaagcaaaagtcaaccgttcttactattccagagattatcattaaagtgcggggtactcaagtcgtgggttccgatatgaccgttactgtgcaattcaccaatccgcttaaggagactctgaggaatgtgtgggtgcatctcgacggaccaggggtgaccaggccaatgaaaaagatgttcagagaaattaggcccaatagcactgtgcagtgggaagaagtgtgtcggccctgggtgtctggccatagaaaactgattgcatcgatgtcgtcggattcgctgaggcatgtctacggtgaactcgatgtgcaaatccaacggcgcccaagcatg

SEQ ID NO: 9527 - DNA, 2196 bp, synthetic construct
  misc_feature 1..2196: note = source = /note="Description of Artificial Sequence: Synthetic coding sequence"
  source 1..2196: mol_type = other DNA
atgtcggaaacgtcgcgaacggcgtttggtggtcgtcgtgcggtaccgccgaataattcgaatgcggcggaagatgatctaccgacggtagaattacaaggtgtagttccgcgaggtgttaatttacaagaatttttaaatgtaacgtcggttcatttatttaaagaacgttgggatacgaataaagttgatcatcatacggataaatatgaaaataataaactaatagttcgtcgaggtcaatcgttttatgtacaaatagatttttcgcgaccgtatgatccgcgtcgagatctatttcgtgttgaatatgttataggtcgttatccgcaagaaaataaaggtacgtatataccggtaccgatagtttcggaattacaatcgggtaaatggggtgcgaaaatagtaatgcgtgaagatcgatcggtacgattatcgatacaatcgtcgccgaaatgtatagtaggtaaatttcgaatgtatgttgcggtttggacgccgtatggtgtactacgaacgtcgcgtaatccggaaacggatacgtatatattatttaatccgtggtgtgaagatgatgcggtttatctagataatgaaaaagaacgtgaagaatatgttttaaatgatataggtgtaatattttatggtgaagttaatgatataaaaacgcgatcgtggtcgtatggtcaatttgaagatggtatactagatacgtgtctatatgtaatggatcgtgcgcaaatggatctatcgggtcgtggtaatccgataaaagtatcgcgagttggttcggcgatggtaaatgcgaaagatgatgaaggtgttttagttggttcgtgggataatatatatgcgtatggtgtaccgccgtcggcgtggacgggttcggttgatatattactagaatatcgatcgtcggaaaatccggtacgatatggtcaatgttgggtttttgcgggtgtatttaatacgtttctacgttgtttaggtataccggcgcgtatagttacgaattatttttcggcgcatgataatgatgcgaatttacaaatggatatatttttagaagaagatggtaatgttaattcgaaattaacgaaagattcggtttggaattatcattgttggaatgaagcgtggatgacgcgaccggatctaccggttggttttggtggttggcaagcggttgattcgacgccgcaagaaaattcggatggtatgtatcgttgtggtccggcgtcggttcaagcgataaaacatggtcatgtttgttttcaatttgatgcgccgtttgtttttgcggaagtaaattcggatttaatatatataacggcgaaaaaagatggtacgcatgtagttgaaaatgtagatgcgacgcatataggtaaattaatagtaacgaaacaaataggtggtgatggtatgatggatataacggatacgtataaatttcaagaaggtcaagaagaagaacgtttagcgctagaaacggcgttaatgtatggtgcgaaaaaaccgttaaatacggaaggtgtaatgaaatcgcgttcgaatgtagatatggattttgaagtagaaaatgcggtattaggtaaagattttaaactatcgataacgtttcgtaataattcgcataatcgatatacgataacggcgtatttatcggcgaatataacgttttatacgggtgttccgaaagcggaatttaaaaaagaaacgtttgatgttacgttagaaccgttatcgtttaaaaaagaagcggttttaatacaagcgggtgaatatatgggtcaattattagaacaagcgtcgttacatttttttgttacggcgcgtataaatgaaacgcgagatgtattagcgaaacaaaaatcgacggttttaacgataccggaaataataataaaagttcgtggtacgcaagtagttggttcggatatgacggttacggttcaatttacgaatccgctaaaagaaacgttacgtaatgtatgggttcatctagatggtccgggtgttacgcgtccgatgaaaaaaatgtttcgtgaaatacgaccgaattcgacggtacaatgggaagaagtttgtcgtccgtgggtttcgggtcatcgtaaactaatagcgtcgatgtcgtcggattcgttacgtcatgtatatggtgaattagatgttcaaatacaacgtcgaccgtcgatg

SEQ ID NO: 9528 - DNA, 2196 bp, synthetic construct
  misc_feature 1..2196: note = source = /note="Description of Artificial Sequence: Synthetic coding sequence"
  source 1..2196: mol_type = other DNA
atgtctgagacctccagaaccgcgttcggaggtaggagagctgtgcctccgaataatagtaacgctgccgaggatgatcttccgaccgttgagttgcagggggtagtccctcggggtgtgaatttacaggagtttctcaatgttacttcagttcatctctttaaggaaaggtgggacacaaataaggtggaccaccacaccgataaatatgagaataacaagttaatagtcagacgagggcaatccttctacgtccaaatcgatttctctagaccatatgatccaaggagggatctttttagagttgaatatgttattggtaggtatcctcaagaaaacaagggtacttacatcccggttcctattgtttcggagttgcagtcggggaaatggggtgctaaaattgttatgagagaggatagatccgtccgactgtccattcagtcatctcctaagtgcattgtgggcaagttccgcatgtatgtggctgtctggacaccttatggagttttgagaacctctagaaacccggagacagatacttacattctatttaatccttggtgcgaggacgatgctgtttacttagataatgagaaagaaagagaggaatatgttctaaacgacattggggttattttttatggcgaggtcaatgatattaagactcgttcatggagctacggtcagtttgaagatggtatacttgatacatgtttatacgtgatggaccgagctcaaatggatttaagtggaaggggtaatcccatcaaggtgtccagggtgggctctgcaatggttaacgctaaagatgatgaaggagtgttggtcggatcttgggataacatatatgcttatggtgtgcctccaagcgcatggacaggaagtgttgatatcttacttgagtataggtcctctgagaatcctgttaggtacggtcaatgttgggtgttcgccggagtcttcaacacttttttgagatgtctcggaatcccggcccggatcgttaccaactattttagcgcacacgataatgatgcaaacctccagatggacatatttttggaggaagacggaaacgttaactcgaaacttactaaagattcagtatggaattatcattgctggaatgaggcttggatgactaggcctgatttgccagtcggtttcggcggctggcaagctgtagattccacaccgcaagagaacagtgacggaatgtaccgatgcggtcctgccagcgttcaagcaattaagcatgggcacgtgtgtttccagtttgacgctcctttcgttttcgcggaggtcaatagcgatctgatttacattacagccaaaaaggatggaactcatgttgtggagaacgtcgacgctactcatattggaaaactgatcgtaactaaacagataggtggtgatggtatgatggatatcaccgacacatacaagttccaagagggacaggaggaagaacggcttgctcttgagactgcacttatgtatggggccaaaaaaccactgaacactgagggagttatgaagagtcggtcgaacgtggatatggactttgaggttgagaatgccgttttgggtaaagatttcaagcttagtattactttccgtaataattctcataacagatatacgatcactgcttatctttctgccaatataaccttttatactggagtgccaaaggcagagttcaagaaagaaacgtttgatgtgactctggagcccctgtcttttaaaaaggaggccgttctaatccaggctggtgaatatatgggtcagcttttggaacaagcaagtttgcatttcttcgtcaccgctcgcattaatgagacccgggatgttctggctaagcaaaagagtacagtccttacaattcctgaaatcatcatcaaggtgagaggtacacaagtcgtgggttctgacatgaccgtgacagttcagttcactaatccattaaaggagaccttgaggaacgtttgggtgcacctggatggaccgggtgtcacaaggccgatgaaaaaaatgtttagagaaattagacctaatagtaccgtccaatgggaggaagtttgccggccttgggtctccggacatcgtaagcttattgccagcatgtccagtgactcgttaaggcacgtctatggtgagcttgatgttcagattcagaggagaccttcgatg

SEQ ID NO: 9529 - DNA, 2196 bp, synthetic construct
  misc_feature 1..2196: note = source = /note="Description of Artificial Sequence: Synthetic coding sequence"
  source 1..2196: mol_type = other DNA
atgtccgaaacttcaaggaccgcattcggtggccgcagagcagtcccccctaacaactccaacgccgcggaggacgatctcccaaccgtggagttgcaaggagtcgtgccaagaggcgtgaatttgcaagaatttctgaacgtgacgtccgtgcacctcttcaaggaacgctgggacaccaacaaggtggaccaccatactgacaagtacgagaataacaaattgattgtgcgccggggacagtcattttacgtccaaatcgacttctctaggccgtacgatccgcggagagatctgtttcgggtggaatatgtgatcggacgctaccctcaagagaacaaaggaacctacatcccggtgccgatcgtttcggagctgcagagcggaaagtggggggcaaagatcgtgatgcgcgaggaccgcagcgtgcggctttcgatccagtcgtccccgaagtgtatcgtgggaaagttccgcatgtacgtggcagtgtggaccccgtacggagttctgcggactagcagaaatcccgaaactgacacctacattctcttcaatccgtggtgtgaggacgatgccgtgtacctcgacaatgagaaggagagagaggagtacgtgttgaacgatatcggggtgatcttttacggcgaggtcaacgacatcaaaacgcgctcctggtcctacgggcaatttgaggacggtatcctggacacgtgtctgtacgtgatggaccgggctcagatggacctctcgggcagaggaaaccctatcaaggtgtcacgcgtgggatcggctatggtgaatgcaaaggacgatgagggggtcctcgtggggtcctgggataacatttatgcctacggagtgccgccttccgcctggacgggtagcgtcgatatcctcctggagtaccggtcctctgagaatccagtgcgatacggacaatgttgggtctttgccggagtgttcaacacgttcctgcgctgcctgggcatcccggcccgaatcgtgaccaattacttctccgcacacgataatgatgcgaatcttcaaatggacattttcttggaagaggacggaaatgtcaactccaagctcacgaaagactcggtctggaattaccactgctggaacgaagcatggatgactcggcctgatctccccgtgggcttcggaggatggcaagccgtggatagcaccccacaagaaaacagcgatggaatgtaccgctgcggcccagctagcgtccaagccatcaagcacgggcatgtgtgcttccagttcgacgcgccgtttgtctttgctgaggtcaattccgaccttatctatatcactgcgaagaaggacggaactcatgtcgtcgagaacgtggatgccacccatatcggcaagctcatcgtgactaagcagatcggaggagacggcatgatggacattaccgatacttacaaatttcaagaaggacaagaggaagagcgcttggcccttgaaaccgcgctgatgtacggcgccaaaaagccactgaacactgaaggagtcatgaaatcccggtccaatgtggatatggattttgaagtcgaaaacgcggtcctcggaaaggactttaagctgtccatcactttccgtaacaatagccacaatcgctatactatcacggcttacctgtcggctaacatcaccttctacaccggggtccccaaagccgaattcaaaaaggaaaccttcgatgtgactctggagcctctgtcattcaagaaggaagccgtgctgatccaggctggcgaatacatgggccagctgcttgagcaggcgtccctgcatttcttcgtgacggcccgcatcaacgaaacccgggacgtgctcgccaaacagaagtccactgtcctcactatcccagagatcatcatcaaggtccgggggactcaggtggttggtagcgacatgacggtgaccgtccagtttaccaatcccctcaaagaaacccttaggaacgtctgggtgcatctcgatggcccaggggtgacccgcccgatgaagaaaatgttccgcgagatccggccaaactcaactgttcaatgggaagaagtgtgccggccgtgggtgtcaggacaccggaagctgatcgcctcaatgtcctcagacagcctccgccacgtctacggcgagctggatgtccagatccagagacgtccatcgatg

SEQ ID NO: 9530 - DNA, 2196 bp, synthetic construct
  misc_feature 1..2196: note = source = /note="Description of Artificial Sequence: Synthetic coding sequence"
  source 1..2196: mol_type = other DNA
atgtcggaaacctcccggactgcttttgggggtcgacgcgcagtcccgccgaacaactcgaatgccgccgaggatgacctcccaaccgtcgaacttcagggagtggtccctagaggagtgaacctgcaggaattcctcaacgtcacttcagtgcaccttttcaaggaaaggtgggacacgaataaggttgatcaccacaccgataaatacgaaaacaataagctcatagtccggcggggtcaatcgttctacgtgcagatcgacttcagccgcccgtacgatccgcggcgcgatctgttccgcgtggaatacgtgatcggacggtacccgcaggagaataagggcacctacattccggtgccaatcgtgtccgagttgcagtcagggaagtggggagctaagatcgtgatgagagaagatcggagcgtccggctcagcatccagtcgtcccctaagtgcatcgtgggcaagttcaggatgtacgtggctgtgtggacgccctacggcgtacttaggacgtccaggaatccggaaactgatacctacatcctgttcaacccgtggtgcgaagacgatgcagtgtacctggataacgaaaaagaacgcgaagagtacgtgctgaatgatatcggcgtgatcttctacggagaagtgaacgatatcaagaccaggtcctggagctacggacagttcgaagacggaatcttggatacttgtctgtacgtgatggatcgcgcccagatggacttgtcgggaagaggaaacccgatcaaggtgtcccgggtcggatcggccatggtgaatgccaaggacgatgagggagtcctggtgggctcgtgggataacatctacgcttacggagtgcccccaagtgcgtggaccggaagcgtggacatcctgctcgaatatcggagctcagagaatccggtcagatacggacaatgctgggtgttcgctggtgtgtttaacacttttctccgctgcctgggaattccagcccggatcgtgaccaattacttctcagcccatgataacgacgccaatctgcagatggacatcttcctcgaagaagacggaaacgtcaactcgaagctgactaaagattcagtgtggaactaccactgctggaatgaggcctggatgacccgtcccgacctgccggtcggcttcggaggatggcaagcggtggattccaccccacaggagaactccgatggcatgtaccggtgcggcccagccagcgtgcaagccatcaagcatggacatgtctgcttccaatttgatgctccatttgtattcgcggaagtcaacagcgacctgatctacataaccgcgaaaaaggacggaacgcacgttgtggagaacgtggacgcgacgcacatcggaaagctcatcgtcaccaagcagatcggaggtgatgggatgatggacattaccgacacgtataagttccaggaaggccaagaggaggaacgcctggccctcgaaaccgcactcatgtacggggccaaaaagccactgaacacggagggagtgatgaaatcgaggtcaaacgtcgacatggacttcgaagttgagaacgcagtgctgggaaaggatttcaagctgtccatcacctttaggaataattcccataataggtacaccatcaccgcctacctgtccgccaacatcaccttctacaccggagtgcccaaagccgagttcaagaaggaaacttttgatgttactctcgaaccactctcctttaagaaagaagccgttctcatccaggccggtgaatacatgggccaactcctggagcaagcatctctgcacttctttgtcaccgcgaggatcaacgaaaccagagacgtgctggcgaagcagaaatcaactgtgttgaccattccggagattatcatcaaggtgcggggaacccaggtggtcggaagcgacatgaccgtgaccgtgcagtttaccaaccctctcaaggaaactttgcgcaacgtgtgggtccatctggatggtcccggcgtgacccgccctatgaaaaagatgttccgggaaatcaggccgaactctactgttcagtgggaagaagtgtgtcgaccatgggtttccggacaccgcaagctgatcgcaagcatgtcatccgactcgctcagacacgtgtacggagagctcgatgtgcagatccaaagacggccgagcatg

SEQ ID NO: 9531 - DNA, 2196 bp, synthetic construct
  misc_feature 1..2196: note = source = /note="Description of Artificial Sequence: Synthetic coding sequence"
  source 1..2196: mol_type = other DNA
atgtccgaaacctcccggactgcctttggtggaaggcgggcggtgcctccgaacaactcgaacgctgccgaagatgatctgcctactgtcgagctgcagggagtggtacccagaggggtcaacctccaagagtttcttaacgtgacgagcgtgcatctgtttaaggaacgctgggataccaataaggtcgatcatcatactgacaaatacgagaacaacaaactgattgtgcggcgagggcaatcattctacgtccaaatagatttctcgcggccctacgaccctagacgggatctgtttcgagtggaatacgttattggcaggtacccccaggaaaacaagggtacttacattcctgtgcctatagtgtccgaactccaaagcggaaagtggggtgcaaagattgtgatgcgcgaggatcgttcggtgagactctcaatccagtcctcccctaagtgtatcgtcggaaagtttcggatgtacgtggcagtgtggaccccctacggggtccttcgaacctcaaggaaccccgaaactgatacttacattctcttcaatccatggtgcgaggacgatgcagtgtacctggacaatgaaaaggaaagagaagagtacgtgctgaacgatattggagtgatcttttacggtgaggtgaatgatatcaagacgagatcctggtcgtacggacaattcgaggatggaattcttgatacctgtctttacgtgatggaccgcgctcaaatggatctcagcggtcgaggcaaccctatcaaggtgtcgcgggtgggaagcgccatggtgaacgcaaaggacgatgaaggagtgctggtcggttcgtgggacaatatctacgcatacggcgtccctccctccgcctggaccggttcagtcgacatcctgcttgaataccgcagctccgaaaatcccgtgcggtacggacagtgttgggtgtttgcaggggtgttcaatactttcctccgttgtctgggaattcctgccagaattgtgaccaactacttttcagcacatgataatgacgcaaaccttcaaatggatatctttctggaagaggacggaaacgtgaattccaagctcaccaaggattcggtgtggaattaccattgctggaatgaggcatggatgactcgcccagatctccctgtcgggtttggtggttggcaagccgtggacagcacgccccaggagaatagtgacgggatgtaccgctgtggaccagcgtcggtgcaagcgataaaacacggacatgtgtgttttcagtttgatgcaccctttgtctttgccgaagtgaactcggatctgatttacattacggcaaaaaaggatggtactcatgtggtggaaaacgtggatgccacccatatcgggaagctcattgtgaccaaacaaattggaggcgacggtatgatggacatcaccgacacttacaagttccaggaaggtcaagaagaagaaagacttgcgcttgaaaccgcacttatgtacggagcaaaaaagcctctgaacactgagggcgtgatgaagagcagatccaacgtcgatatggattttgaagtggaaaatgcggtgctgggcaaagactttaagttgtcgattacctttcgcaacaatagccacaaccgctacactattactgcctacctctccgccaatatcactttttacactggagtccctaaagcagaattcaagaaagaaacttttgacgtgacgcttgaacccctgtcattcaaaaaggaggcagtcctcatacaggccggagaatacatgggacaattgcttgaacaggcatcgctccatttcttcgtgaccgccaggattaatgaaaccagagatgtcctggccaagcagaagagcaccgtgcttaccatccccgagatcatcattaaggtccgggggacccaagtcgtcggttccgacatgaccgtgacggtgcagttcacgaaccctttgaaggagactcttcggaacgtctgggtccacctggatggtccgggggtgactcggcctatgaaaaagatgtttagagagatccggcctaatagcactgtccagtgggaggaagtgtgccggccatgggtgagcggacatcgtaaacttatcgcctcaatgtcgagcgattccctgcgacatgtgtacggagagcttgacgtccagatacagcgtagacccagcatg

SEQ ID NO: 9532 - DNA, 2196 bp, synthetic construct
  misc_feature 1..2196: note = source = /note="Description of Artificial Sequence: Synthetic coding sequence"
  source 1..2196: mol_type = other DNA
atgagcgagactagccgcacggcattcggcggccggcgggcagtccccccgaataatagcaatgccgccgaggacgacctgccaaccgtggagctgcagggcgtagtgcctcgcggagtgaatctccaggaattccttaacgttacgagtgtacacctgttcaaggagaggtgggatacaaacaaggtggaccatcacacagacaagtatgagaacaataagctgatagtacgccggggccaaagcttctatgtgcagatcgatttcagcaggccttatgatccccgccgcgacctgttcagggtagagtacgtcatcgggcgctatcctcaagaaaataaaggaacatatatccccgtgcccatcgtgagcgagctgcagtccggcaagtggggcgctaagatcgtgatgagagaggacagatccgtccgactctctatacaatctagcccaaagtgtatcgtgggcaagtttagaatgtacgtggcagtatggacaccatatggtgttctgcggacctcccgcaatcccgagacagacacctatattttgttcaacccgtggtgcgaggatgatgctgtttatctcgacaatgagaaggaaagggaagaatacgtcttgaatgacatcggggtgatcttttacggcgaggtaaacgacatcaagaccagatcttggtcctatgggcaatttgaggacggaattcttgacacatgtctgtacgtgatggaccgggcacagatggatctgtccggtaggggaaatccaatcaaagtctcccgggtgggctctgcaatggtgaacgccaaagacgacgagggcgtgcttgtcgggtcttgggacaacatttacgcgtatggtgtgcccccttctgcttggactggctccgttgacattctgctggaatatagaagctctgagaaccccgtgaggtacggacagtgttgggtgttcgccggggtgtttaacactttcttgcggtgtctgggtatcccggctcgaatcgtaactaactacttcagcgcccacgataacgacgctaacctccagatggatattttcttggaagaggacggcaatgtaaattccaaactgaccaaggatagcgtgtggaactatcactgttggaacgaagcctggatgactcggcccgacctgcccgtaggatttggcggctggcaggctgttgactccaccccgcaggagaacagtgacgggatgtaccggtgtggcccagcttctgtacaggccattaagcatggccacgtttgtttccagttcgacgcaccgtttgtgtttgcagaagtgaatagcgacctcatatacattacagcgaagaaggatggcacccatgtagtggagaacgtggacgcaactcatatcggtaaattgatcgtgaccaaacagatcggcggtgacggcatgatggatattacagacacctacaagtttcaggaggggcaagaggaagaacggctggccctcgagaccgcactgatgtatggggcaaaaaaaccgctgaacacagaaggggtgatgaaatctagatcaaacgtcgacatggattttgaagtggagaacgctgtgctggggaaggacttcaaacttagcatcaccttccgaaataattcccacaacagatatactataaccgcgtatcttagcgccaacatcaccttttacaccggagtaccgaaagcagagtttaaaaaagaaacattcgacgtaactctcgaaccgctgagttttaagaaagaggccgtccttattcaggccggtgaatacatgggccagctcctggagcaggcttccctgcacttttttgtgaccgccaggataaacgagacccgggatgttctcgctaagcagaagagtacagtgttgaccatcccggagatcattataaaggtcaggggaacgcaggttgtggggtccgatatgacggtgaccgtgcagtttaccaatcctcttaaagagacgctgagaaatgtctgggtacacttggacgggcccggggtgacacggcccatgaaaaagatgtttcgagaaataaggccgaattctactgtccagtgggaagaggtctgcagaccttgggtatctggccatagaaagttgatcgcctccatgtcttccgattccctgagacacgtgtatggagagctcgatgtgcagattcaacgaagaccatccatg

SEQ ID NO: 9533 - DNA, 2196 bp, synthetic construct
  misc_feature 1..2196: note = source = /note="Description of Artificial Sequence: Synthetic coding sequence"
  source 1..2196: mol_type = other DNA
atgtcagaaacttcccgaactgcctttggagggagaagggccgtgcctcccaacaattcgaacgccgccgaagatgatctcccgactgtcgagctccaaggagtggtgcctcggggtgtgaaccttcaggaatttcttaacgtgaccagcgtccatctctttaaggagaggtgggacaccaacaaggtggatcaccacactgataagtacgaaaacaacaagttgatcgtgcgccgtgggcaatctttctatgtgcagattgatttttcccgcccttacgatccacgcagagatctgtttagggtggagtacgtgatcggaaggtacccccaagagaataagggaacttacatacctgtgcctattgtgtccgaacttcagtcggggaagtggggtgctaagattgtcatgcgagaggataggtctgtgaggctctcaatccaaagctcgccgaagtgtatcgtcggaaaattcagaatgtacgtggccgtttggactccctacggagtcctgcggacctcgagaaaccctgaaaccgatacctatatcttgtttaatccttggtgtgaggacgatgccgtctaccttgataacgaaaaagaacgggaagagtacgtgcttaacgatattggtgtgattttctacggtgaggtcaacgacattaagacgagatcgtggtcatacggtcaatttgaagatggtatcctggatacctgcctctacgtcatggacagagcgcaaatggacctgtcggggagaggtaaccccatcaaggtatctagggtcggcagcgcaatggtcaatgctaaagacgacgaaggtgtgctggtggggtcctgggacaacatttacgcatacggagtgccgcccagcgcatggaccggatcagtcgacatcctcctggaatacaggtcgagcgagaaccctgtgcggtacggtcagtgctgggtctttgcaggagtgtttaacaccttcctgagatgcctgggaattcctgcaagaattgtgactaactacttttcagcacatgacaatgacgcaaaccttcagatggacatctttttggaggaagatggaaatgtgaatagcaaacttaccaaggattccgtctggaactaccattgttggaacgaggcctggatgacccggcccgatctccctgtcggatttggtggatggcaggccgtggattccaccccgcaggagaactcagatggtatgtaccgttgtggacctgcatcggtgcaggcaatcaagcacggacacgtgtgctttcaatttgatgccccttttgtgttcgcggaggtgaacagtgatctgatttacatcaccgcgaaaaaggatggtacccacgttgtggaaaacgtcgatgccacccacattggaaagctcatcgtgacgaaacaaattgggggagacggcatgatggatatcactgatacttataagtttcaggaaggccaggaagaagagcgtctggcgctcgaaactgcgctgatgtacggcgcgaaaaagccattgaacacggaaggcgtcatgaagtcgcgctccaacgtggacatggactttgaggtggagaatgctgtgctggggaaggactttaaacttagcatcacgtttcggaacaactcccataaccgctacaccataacggcatacctgtcggcaaacataaccttttacaccggagtgcctaaggccgagtttaagaaggaaactttcgacgtgactcttgaacccctgagcttcaagaaagaagcggtgctgattcaagcaggagaatacatggggcaactgctggaacaggcatcgctgcatttctttgtcactgcccgcattaacgaaaccagggacgtcctcgcgaagcaaaagagcactgtcctcacgattcctgaaatcataatcaaagtccggggcacccaagtggtgggaagcgacatgaccgtgactgtgcaattcactaaccctctgaaggagacgctgcggaatgtgtgggtacatctggatggtcctggtgtgactagacccatgaagaaaatgtttcgtgagatccgaccaaattccaccgtgcaatgggaggaagtctgcaggccatgggtgtcgggacataggaagctcattgcatcaatgtcatcggactcccttcgccacgtgtacggtgagcttgatgtgcaaattcagagacggcccagcatg

SEQ ID NO: 9534 - DNA, 2196 bp, synthetic construct
  misc_feature 1..2196: note = source = /note="Description of Artificial Sequence: Synthetic coding sequence"
  source 1..2196: mol_type = other DNA
atgagcgaaacttcgcggactgcgttcgggggaaggcgagcagttcctccaaacaacagcaatgcggctgaggacgatctgcctaccgtggaactgcagggagtggtgcctcgaggcgtgaatctgcaggaattcctcaacgtgacttcagtccacctcttcaaggagcggtgggacactaacaaggtggaccatcataccgataagtacgagaacaataagctgatcgtcaggcgggggcagtccttttacgtccaaatcgatttctcccgcccgtacgacccaagaagagacttgttcagagtggaatacgtgatcggccgctacccacaagaaaacaagggcacctacatacccgtgcctattgtcagcgagctgcagtccggaaagtggggagccaagattgtcatgagggaggatcggtcagtgcggctcagtatccagtcatcaccaaagtgcattgtcggaaagttcagaatgtacgtggctgtgtggaccccgtacggagtgctgcggacttccagaaacccagagactgatacctacatcctcttcaacccatggtgtgaggatgacgcggtgtacctcgataacgagaaggaacgcgaagaatacgtcctcaatgacatcggagtgattttctacggagaggtgaacgatatcaagacccgctcttggtcatatggacagttcgaagatggaatcctggacacttgcctgtatgtaatggaccgcgcgcaaatggacctgagcggccggggaaaccctatcaaagtctcaagagtcggttccgccatggtcaacgcaaaggatgacgaaggcgtgctcgtcggatcctgggataacatctacgcctacggagtccccccatccgcgtggacgggatctgtggatatccttctggaataccggtcctcggaaaacccggtgcgatacgggcagtgttgggtgttcgcaggggtgttcaacaccttcttgcgctgcctcggaatcccggcacggatcgtgaccaattacttctcagcccatgacaatgacgcgaatctccagatggacatcttcctggaggaagatggaaatgtcaactccaagctcacgaaggacagcgtgtggaattaccattgctggaacgaggcgtggatgactcggccggacctcccggtgggatttggcggatggcaggctgtggattcgaccccacaggagaatagcgacgggatgtatcgctgcggaccggcgtcggtccaagctatcaaacatggacacgtgtgtttccaattcgatgcgccatttgtgtttgccgaagtgaacagcgacctgatctacatcaccgcgaaaaaggatggaacccatgtcgtcgaaaacgtggatgccacccacatcggcaagctgatcgttaccaagcagataggaggagatgggatgatggatatcactgacacctacaaattccaagaaggacaggaagaggagcgccttgctctggaaacggctcttatgtatggagccaaaaagcccctgaacaccgaaggagtcatgaagtcgaggtcgaacgtggacatggattttgaagttgaaaacgccgtcctgggcaaagacttcaagctgtcgatcactttcagaaacaacagccacaatagatacaccattaccgcatacctgagtgccaatatcacgttttacactggcgtgccgaaggcagagtttaagaaggaaaccttcgacgtcaccctggagcccctgtcattcaagaaggaggcggtgctgattcaggctggagagtacatgggacaactcctcgagcaggcaagcctgcacttcttcgtgaccgcaagaatcaacgagactcgcgatgtgctggcaaaacagaaatcgaccgtcctgactatccctgagatcatcatcaaggtgagaggaacccaggtggtcggatcggatatgacggtgactgtgcaatttaccaacccgctgaaagagactcttcgcaacgtgtgggttcatctggacggtccgggcgtgactagaccgatgaaaaagatgttccgcgaaatccgcccgaacagcaccgtgcagtgggaagaagtgtgccgcccttgggtcagtggccatcgcaagctcatcgcgtccatgtcatccgactccctgcggcatgtctacggagagctggatgtccaaatccagcgccggccttcgatg

SEQ ID NO: 9535 - DNA, 2196 bp, synthetic construct
  misc_feature 1..2196: note = source = /note="Description of Artificial Sequence: Synthetic coding sequence"
  source 1..2196: mol_type = other DNA
atgagcgaaacctcgcgcactgcatttggaggaagaagggcggtgccaccgaacaattcaaacgccgcggaagatgacctgcctaccgtggaactccagggagtcgtgccacggggggtcaacctgcaggagtttctgaacgtgacctcagtccacctgttcaaggagcggtgggacactaacaaggtcgaccaccatactgacaagtacgaaaacaataagctgatcgtgagacgggggcagtctttttacgtgcagatcgatttcagcaggccatacgacccgagacgcgatctgttccgcgtcgagtatgtcatcggaagatacccgcaagaaaacaagggaacctatatccctgtgccaattgtgagcgaactgcaatcgggaaagtggggagccaaaatcgttatgagagaggaccgctcggtccgcttgagcatccaatcctcccctaaatgtatcgtcgggaagttcagaatgtacgttgcggtctggactccgtacggtgtcctgagaacgtccagaaatccggagactgacacgtacatccttttcaacccttggtgcgaagatgacgcagtgtacctggataacgaaaaggaacgcgaggagtacgttctgaacgatatcggtgtgattttctacggagaagtgaatgacattaagactcgctcatggtcctacggacaattcgaagatggcatcctggatacctgtctctacgtcatggatcgcgcacagatggacctgtcggggagaggaaacccgattaaagtgtcacgcgtgggctccgctatggtcaatgcaaaagatgatgagggagttctggtgggctcctgggacaacatctacgcctacggcgtcccgccttcggcttggaccggctccgtggacattctgctggaataccgcagcagcgaaaatccagtgagatatggacagtgttgggtgtttgcgggagtgttcaataccttcctgcggtgtctgggtatccctgcacggattgtgactaactacttttcggcccatgataatgacgccaacctccagatggacatcttcctcgaggaggacggaaatgtgaactcaaaactcactaaggactcggtctggaactaccactgctggaacgaggcgtggatgacccggccagacttgcctgtgggattcggaggctggcaggccgtggactccactccacaagagaattccgacgggatgtaccgctgtggaccggcatcagtgcaggctattaagcatgggcacgtgtgcttccagttcgatgcgccgtttgtgttcgcagaagtcaattctgacctcatctatatcaccgcaaagaaagacgggacgcacgtggtagagaacgtggacgcaactcatatcggaaaactcatcgtgaccaagcagatcggaggggacggtatgatggatatcaccgacacttacaagttccaggaaggacaggaagaggaacgacttgcactcgagactgccctgatgtacggtgctaaaaagccactgaataccgagggggtcatgaagtcccgcagcaatgtggacatggattttgaggtggagaacgccgtgctcggcaaggatttcaagctctcaattactttccggaataactctcacaacagatacaccatcaccgcgtacctttcagccaacatcaccttctacactggagtgccgaaggctgagttcaaaaaagagacgttcgacgtaacccttgaaccactgagcttcaagaaggaagcggtgcttatacaggcgggggaatacatgggtcaattgctggagcaagcctcgttgcacttctttgtcacggcacgcattaacgaaacccgcgatgtgctggccaaacaaaaaagcaccgtgctgaccattccagagatcatcattaaagtgagaggcactcaggtggtgggatcagacatgaccgttacggtccaatttactaacccactgaaagaaaccctgcgcaacgtgtgggtgcacctggacggacccggagtgacccggccgatgaagaaaatgttcagggaaatccgcccaaactccactgtccaatgggaggaagtgtgccggccatgggtgtccggtcatcgcaagctgatcgcctccatgtctagcgactcgttgcgccatgtctatggagagctcgatgtgcagatccagaggcgcccatccatg

SEQ ID NO: 9536 - DNA, 2196 bp, synthetic construct
  misc_feature 1..2196: note = source = /note="Description of Artificial Sequence: Synthetic coding sequence"
  source 1..2196: mol_type = other DNA
atgtcggaaacctcgagaaccgcgtttggaggccgtcgagcagtgccacctaacaactcgaacgcagcagaagatgacctccccactgtcgagctgcagggtgtcgtgccccggggagtcaaccttcaggagtttctgaacgtgacttccgtgcatttgtttaaggaacgttgggataccaataaggtcgaccaccatactgacaaatatgagaacaacaaacttattgtgcgtcgaggacaatcgttctatgtccagatcgacttctccaggccatacgatcctcggagagatctctttagggtggagtacgttattgggcgttatcctcaagaaaacaaaggtacctacatacccgtccccatcgtctccgagctccaatcaggaaagtggggcgccaaaattgtcatgcgcgaagatagatcagtgaggttgtctattcagagctcacctaagtgcattgtgggtaagtttcgcatgtacgtcgcagtgtggacgccgtacggtgtgcttcgcacctccagaaaccctgaaaccgatacttacattctgttcaatccttggtgtgaagatgacgcagtgtatctcgacaacgaaaaggaaagagaagaatacgtgctgaacgacattggagtgatcttctacggtgaagtgaatgacatcaagactaggtcatggtcatacgggcagtttgaagatgggattcttgatacctgcctgtacgtgatggacagagcacaaatggatctgtcgggccgtggtaaccctatcaaggtgtccagagtgggatcggcaatggtgaatgcaaaggatgatgaaggtgtccttgtgggctcctgggataacatctacgcatacggggtccctccttcggcatggactggatccgtcgacattttgctggaataccgctcgtcagaaaacccggtgcgctacggtcagtgctgggtctttgcgggagtctttaacaccttccttagatgtcttggtattcccgcccggatcgtgacgaattacttctcagcacatgataacgacgcaaaccttcagatggacatctttcttgaggaggacggtaacgtcaactccaagctcactaaggactcggtgtggaactaccattgctggaacgaagcatggatgacccgcccagacctgcccgtgggattcggagggtggcaagcagtggatagcaccccacaagagaactcagatggtatgtacagatgcggtccagcatccgtgcaggcgatcaagcatgggcatgtgtgttttcaatttgatgcccctttcgttttcgccgaggttaactcagatctgatttacattaccgcaaagaaagatggtacgcacgtcgtcgaaaatgtggatgcaacccatattggtaaactgattgtgactaagcagattggaggagacggtatgatggacatcaccgatacctacaagttccaggagggacaagaagaggaacgactggcactggaaactgcactcatgtacggggcaaagaaacctcttaatacggaaggcgtgatgaagtccaggagcaacgtggatatggactttgaagtggaaaacgccgtgcttgggaaggacttcaaactttcgattacttttaggaacaatagccataaccgctacactattaccgcctacctgtcggcaaatatcactttttacaccggagtccctaaggcagaattcaagaaggaaacgttcgatgtgacgcttgaacctctcagctttaagaaggaggcagtgcttattcaggccggagaatacatggggcaactgttggaacaggcatcgcttcatttcttcgtgaccgcaaggatcaacgagactagggatgtgttggctaagcaaaaatcgaccgtgctgactattcctgaaatcatcatcaaggtcagaggtactcaagtggtgggaagcgacatgactgtgaccgtgcagtttaccaacccactgaaggagactcttcgtaatgtgtgggtgcaccttgatggccccggggtgacccgtcccatgaagaagatgtttcgggaaatccgcccaaacagcaccgtgcagtgggaagaagtgtgtagaccatgggtgtccggtcatcgaaagctgattgcatccatgtcgtcagattctctccggcacgtgtacggcgagctggacgtgcaaattcaacgacgaccaagcatg

SEQ ID NO: 9537 - DNA, 2196 bp, synthetic construct
  misc_feature 1..2196: note = source = /note="Description of Artificial Sequence: Synthetic coding sequence"
  source 1..2196: mol_type = other DNA
atgtccgaaacttctcgcactgcctttggaggtagacgcgctgtccctccaaacaattccaacgcagcagaggatgacctgcccacggtggaactccagggagtggtgcctcgcggcgtgaacctccaggagtttctgaacgtgacctccgtccacctgtttaaggaaaggtgggataccaacaaggtggatcatcacacggataagtacgaaaacaacaagctcatcgtgagaaggggccaatcgttctacgtccagatcgatttctcccggccttacgaccctaggcgcgacttgtttcgggtggaatacgttattgggcggtacccccaagagaataagggcacttacattcccgttccgatcgtgtcggaactccagtccgggaaatggggcgcaaagatcgtgatgcgtgaggatagatccgtcaggctttcgatacagtcgagccccaagtgtatcgtcggaaagtttcgcatgtacgtggcagtctggaccccttacggcgtgttgcggacctcaaggaaccctgaaaccgatacctacattttgtttaacccatggtgtgaggatgatgcggtgtacctcgataacgaaaaagaacgcgaggaatacgtcctgaatgatataggagtgatcttttacggggaggtgaacgatatcaaaacccgctcatggtcatacggtcagtttgaggacggtattctggatacctgtctttacgtcatggatcgagctcagatggatctgagtggccgcggaaacccgattaaggtgtcaagggtggggtcagctatggtgaatgcaaaagacgatgaaggggtcctggtcggctcatgggataacatttacgcctacggagtccctccctcagcatggactggatcggtggacattttgctggaatacagatcgtcagaaaatcccgtcagatacggccagtgttgggtgttcgccggtgtgtttaacaccttcctgagatgcctcgggatcccagcacgtattgtgacgaattacttctccgcacatgacaatgacgcaaacctgcaaatggacatttttcttgaggaggatggtaatgtgaactcaaaactcactaaggattcggtctggaattaccattgttggaacgaagcatggatgacccgccccgacctgccagtcggattcggaggttggcaggccgtcgactcgactcctcaggagaacagcgacgggatgtatcgctgtggacctgcaagcgtgcaagctattaagcatggacacgtctgttttcaatttgacgcgccattcgtctttgcagaagttaattcggatctgatttacattactgccaagaaggatggtacccatgtcgtcgagaacgtggatgcaactcatattggaaagctgattgtcaccaaacagattggcggagacggtatgatggatattactgatacttacaagtttcaggaaggacaggaagaagaacggcttgcgctggaaaccgcactcatgtacggagcgaagaagcccctgaacactgaaggagtgatgaaatcgcgttcgaatgtggacatggatttcgaggtggaaaatgccgtcctcggaaaggactttaagctgagcatcaccttcaggaacaattcccataaccgatacactatcaccgcatatctttcagcgaacattactttttacactggagttcccaaggcagagtttaagaaagaaactttcgatgtgactctggaaccactttcatttaagaaagaggcggtgctgatccaggcaggggagtacatgggacaacttttggagcaagcatcccttcactttttcgtgaccgcaagaattaacgaaactcgggacgtgctggcaaagcaaaaatctaccgtgctcaccatacctgaaatcatcatcaaggtgcggggaacgcaggtggtgggtagcgatatgaccgtgaccgtgcagtttactaaccctctgaaggagactctgcgaaacgtgtgggtgcatcttgatggacccggcgtgaccagacctatgaagaagatgtttcgcgaaatcaggccaaattccaccgtgcagtgggaagaagtctgtcgcccatgggtcagcggacatagaaagctcattgcatcaatgtcgtcggactcgcttagacatgtgtacggggaacttgatgtgcaaatacagcgacggccctcaatg

SEQ ID NO: 9538 - DNA, 2196 bp, synthetic construct
  misc_feature 1..2196: note = source = /note="Description of Artificial Sequence: Synthetic coding sequence"
  source 1..2196: mol_type = other DNA
atgtctgaaacttctcggactgccttcgggggacggcgcgccgtacctcccaataattccaatgcagccgaagatgacctcccaacagtcgagcttcagggagttgtacctcggggcgtgaacctccaggagtttctgaatgtgacttccgtgcaccttttcaaggagcgatgggacacaaacaaggttgaccatcacacagataagtacgagaataacaaactcatagtcagacgagggcagagcttctatgtacagatcgacttctcaagaccctacgatccacggcgagatctgttcagagtagagtatgtaatcggacgctatcctcaggaaaacaagggcacttatatcccagtcccgatcgtgagtgaactccagtccggcaagtggggagctaaaattgtgatgagagaagataggtctgttcgattgagcatccaatcttcgcccaaatgtatagtgggcaaattccggatgtatgtggctgtgtggacaccttatggggtcctacgtacctcacgcaaccccgaaacagatacctacatactgtttaacccctggtgtgaggacgacgccgtatacctggataacgagaaagagagagaggaatacgtgctgaacgatatcggcgtgatattctacggagaagtcaatgatatcaagacaaggagctggagttacggacagtttgaagatggaatcctggatacctgcctctatgtcatggacagagcacaaatggatctgtctgggagaggcaatccaattaaagtgagtcgcgtgggatcagcaatggtgaatgccaaagatgacgagggcgttctggtcggctcttgggataatatctacgcatatggggtgccaccgtcagcgtggacaggttctgtcgacattctactagaataccggtcatctgagaaccccgtgcggtacggccagtgctgggtgtttgctggagtgtttaacacatttctccggtgcttaggaatccccgcaagaatcgtgacaaactatttctctgcccacgacaatgacgctaatttacagatggatatcttcctggaggaggacgggaacgtaaacagcaagttaacgaaagactcggtttggaattaccattgctggaacgaggcctggatgacccgccctgacctgcccgttggatttggggggtggcaagcagtggactctacgcctcaagaaaactcggacggcatgtaccggtgcggccccgcatcagtccaggccataaagcacggccacgtatgctttcagttcgacgcaccatttgtcttcgcggaggtgaattctgacctcatctacatcaccgcaaaaaaagacggaacccatgtcgtagaaaacgtggacgccacccacatcgggaaactaatcgttactaaacagattggaggagatggaatgatggacattacggacacttacaaattccaggagggtcaagaggaagagagattggccctggagacagctctgatgtatggagcgaaaaaacctttgaacactgaaggcgttatgaagagtagaagcaacgtggatatggactttgaagtggagaacgctgtgctgggaaaagatttcaagttgtcaataaccttccgcaacaattctcataaccggtacactatcactgcttacctgagtgccaatatcactttttatacaggcgttcccaaagcagagttcaagaaggaaacctttgacgtgacactcgagcccctctcctttaagaaagaggctgtgctaattcaagctggggaatacatgggccaactcctggaacaggcatctctgcattttttcgtgactgcgcggattaatgaaactagagacgtgttggcaaagcagaagtccaccgtgttgacaattcccgaaattataataaaagtccgtggaacacaagtggttggatcagatatgaccgttacagtccagtttacgaacccactgaaggaaaccctccgaaatgtttgggtgcaccttgatggcccaggcgtgacgagacccatgaagaagatgttccgggagatccgacccaatagcactgtacaatgggaagaagtgtgcaggccgtgggtgtcaggtcacagaaaattgattgcctcgatgtcgtctgacagccttcggcatgtgtacggggaacttgatgtgcagatccaacgcaggccaagtatg

SEQ ID NO: 9539 - DNA, 2196 bp, synthetic construct
  misc_feature 1..2196: note = source = /note="Description of Artificial Sequence: Synthetic coding sequence"
  source 1..2196: mol_type = other DNA
atgtccgaaaccagccggaccgccttcggcgggcgccgcgcggtgcctccaaataactcgaacgccgcggaggacgacctgccaaccgtggaactgcagggtgtggtgcccagaggcgtcaacctgcaggagttcctcaacgtgacctccgtgcatctgttcaaggaacgctgggataccaacaaggtggatcaccataccgataagtatgaaaacaacaaacttattgtgagaaggggacaatcgttttacgtgcaaatagacttttcgcgcccctacgatccacgtagagatctgtttcgggtggaatacgtcatcggaaggtacccacaagaaaacaagggcacttacattccagtccctattgtgtcggaactccagtcgggaaagtggggggcgaagattgtgatgcgagaagatcgttctgtccgcctctcaattcaatccagtccgaagtgtatcgttggtaagtttcgaatgtacgtggcagtgtggaccccttacggtgtgcttcgaacctccagaaacccagagactgacacttacattctcttcaacccttggtgtgaggacgacgcggtgtacttggacaacgaaaaggaaagagaagaatatgtgctcaatgatatcggtgtcatcttttacggagaggtgaacgacattaagactaggagctggagctacggtcaatttgaagatggaattcttgatacttgtctgtacgtcatggatagagcgcagatggacctttcgggtagaggaaatcccattaaagtgtcaagagtcggatcagcaatggtaaatgcaaaggacgacgaaggcgtcctcgtgggatcatgggacaacatttacgcttacggcgttccaccatccgcatggaccggatccgtggatatcctcttggaataccggtcctcggagaatccagtgcggtacggccaatgctgggtgtttgcaggggtgtttaacacgtttctgcggtgtctgggtattcctgcaagaattgtgactaactacttctcagcacatgataatgatgccaacctgcaaatggatatctttcttgaagaggatggaaacgtgaattcgaagctgaccaaagattccgtgtggaactaccattgttggaatgaagcctggatgactaggcctgacctccctgtgggattcggaggatggcaggcagtcgacagcacgccgcaggagaactcagatggaatgtatcgctgcggtccagcgagcgtgcaagcgattaagcatggacatgtctgctttcaatttgatgccccatttgtgtttgccgaagtcaactcggatcttatctacataaccgcaaaaaaggacggaactcatgtggtggaaaacgtggacgcaactcatattggaaaattgattgtgacgaagcaaatcggaggagacggtatgatggacattaccgacacttacaaattccaagaaggtcaggaggaagaaaggctcgcacttgaaaccgcgctcatgtacggtgccaaaaagccactgaacacggaaggtgtgatgaagtcaagaagcaatgtcgacatggacttcgaggtcgaaaatgctgttctgggaaaggactttaaactctcgatcacttttcgcaataactcacacaacaggtacaccatcactgcatacctgagcgcgaacataactttttacaccggagtgcccaaggcggagttcaagaaagaaacttttgacgtgactctcgaaccactttcctttaagaaggaggcagtgctgatccaggctggcgagtacatgggacaacttcttgaacaggcctcgctgcatttcttcgtgacggctcggattaacgaaaccagggacgtgctggcaaaacagaaaagtactgtgctcaccatacctgagattatcattaaagtccggggaacgcaagtggtcggtagcgatatgactgtcaccgtccagttcactaaccctctcaaagagactctgcggaacgtgtgggtgcacctggacgggcctggcgtgactcgccctatgaagaagatgttcagagaaattcggccaaactccactgtgcaatgggaggaagtgtgccggccatgggtttcaggacatcggaagttgatcgcatcaatgtcgtccgattccttgagacatgtgtacggtgagcttgacgtccagattcaacggcggcctagcatg

SEQ ID NO: 9540 - DNA, 2196 bp, synthetic construct
  misc_feature 1..2196: note = source = /note="Description of Artificial Sequence: Synthetic coding sequence"
  source 1..2196: mol_type = other DNA
atgtccgaaacttcccgcaccgcatttggaggtcggagagcagtgccacccaacaattcaaatgcagccgaagatgacctcccgactgtggaactgcagggggtggtgcccagaggagtgaatctccaggaatttctcaacgtgacctccgtgcatctgttcaaggaacgatgggacaccaataaggtggatcatcatactgataagtacgagaacaacaaacttatagtgcgtcgtggacaatctttctacgtccaaatcgacttctcccgcccttacgatccacgccgtgatctgtttagggtggagtacgtgatcggcagataccctcaggaaaacaaaggaacctacattcccgtgcctattgtgagcgagctgcagtccgggaaatggggggcaaagattgtgatgagggaggaccggtccgtgagactctcaattcagtcctcaccaaagtgcatagtgggcaagttcagaatgtacgtcgccgtgtggaccccctacggtgtgctgcgaacctcccggaatccagaaaccgatacctacattcttttcaatccttggtgtgaagatgatgcagtgtacctcgataatgaaaaggagagagaagaatacgtgctgaatgacataggggtgatcttttacggagaagtgaacgacattaagaccagatcgtggtcctacgggcagttcgaggacgggatcttggatacgtgcttgtatgtgatggatcgcgcccaaatggatcttagcggacggggtaatcctatcaaagtctcaagagtcggatcggcaatggtgaacgcaaaagacgatgagggcgtacttgtgggcagctgggataacatttacgcatacggtgtgccaccttcagcctggactggttcagtggatatactgcttgagtacagatcctccgaaaatcctgtgagatacggacagtgttgggtgttcgcgggcgtctttaacacctttcttcggtgtctgggtatacccgcgagaattgtcaccaattacttttccgcacatgataacgacgctaatctccagatggacattttcctggaggaggatggcaacgtgaactccaagctgactaaggactcggtgtggaattaccattgctggaacgaagcgtggatgacgcggcctgacctgcctgtcggatttggcggatggcaggctgtcgattcaaccccacaggaaaattcggatggtatgtaccgatgtggcccagctagcgtccaagccatcaagcatggacatgtgtgtttccaatttgatgctcctttcgtgtttgcggaagtcaactcggacttgatttacatcaccgcaaagaaagacggtacccacgtggtggaaaacgttgacgcgacccatattggaaagctgattgtgactaaacaaattggtggtgatggtatgatggatatcactgatacctacaaatttcaagaaggccaagaagaagagagactggcactggaaaccgcccttatgtatggtgcaaaaaagcctctgaacactgaaggagtgatgaagagcaggtcaaacgtcgatatggattttgaagtggagaacgccgtgctgggaaaggactttaagctgagcattaccttcaggaacaattcccataaccggtacaccataactgcatacctgtcggccaatatcacgttttacaccggagtgcctaaagccgagtttaagaaagagacttttgacgtgacgctggagccgcttagcttcaagaaggaagcagtgctgattcaggccggcgaatacatgggacaacttctggaacaggcatcccttcatttctttgtcaccgcacggatcaacgaaacgagggatgtccttgccaaacagaagagcacggtgctgactattccagaaatcataatcaaagttcgtggtacgcaggtggtcggatcagacatgaccgtgactgttcagttcactaatcctcttaaggagactctgcgcaacgtgtgggttcaccttgatggtcctggagtcactcgccctatgaagaagatgtttcgtgagatcaggcccaattcaaccgtccaatgggaggaagtatgtcgaccttgggtcagcgggcatagaaaacttattgcctccatgtcatccgatagcctcaggcacgtgtacggtgaactggatgtgcagatccaacggcggccatccatg

SEQ ID NO: 9541 - DNA, 2196 bp, synthetic construct
  misc_feature 1..2196: note = source = /note="Description of Artificial Sequence: Synthetic coding sequence"
  source 1..2196: mol_type = other DNA
atgtccgaaacttcacggactgcctttggggggcgaagggcagtgccccctaacaactccaatgcagcagaagatgatctgccaaccgtcgagcttcaaggggtcgtgccgcggggtgtgaacctccaagaatttcttaatgtgacttcagtgcaccttttcaaggaacggtgggacaccaacaaggtcgatcatcacaccgataagtacgagaacaacaagttgatcgtgcggagagggcagagcttttacgtgcaaattgacttctcccgtccatacgatccgcgaagagatctgtttagagtggaatacgtgattggtcgatacccccaggagaataagggcacttacattccagtgcccatcgtgtctgaacttcagtcaggaaagtggggagcaaagattgtgatgagagaagatcggtcggtgcggctgtccatccaatcctcccccaagtgcattgtcggtaaattcagaatgtacgtcgcagtgtggacgccatacggcgtgctccggaccagcagaaatccagaaactgatacttacatcttgtttaacccttggtgtgaagatgatgcagtttacctggataatgaaaaggaaagagaagaatacgtgcttaatgatattggtgtgattttctacggggaggtgaacgacattaagactagatcgtggagctacggacagtttgaggacggaatactggatacttgcttgtacgttatggacagggcgcaaatggacttgtcgggccgcggaaatccgataaaggtgtccagagtgggtagcgcaatggtgaacgccaaggatgacgagggagtgcttgtcggtagctgggataacatctacgcctatggagtccctccaagcgcatggaccggatccgtggatatccttttggagtaccgctcatcggaaaaccctgtgcgatacggtcaatgttgggtgtttgctggggttttcaatacttttctgaggtgtcttggcatccctgcacgcatcgtgactaattacttctccgcccatgataacgacgcaaatctgcaaatggacatctttttggaggaagatggcaacgtgaactccaagctgaccaaggactctgtctggaattaccactgctggaatgaagcctggatgacccgaccagatctgcctgttggatttggaggatggcaagcagtcgatagcactcctcaggagaactccgatgggatgtaccggtgcggtcctgcgagcgtgcaagcgattaaacatggccacgtctgttttcaatttgatgcgccatttgtgtttgcagaggtgaactcggatttgatttacattaccgccaaaaaggatgggacccatgtcgtcgagaatgtggatgcaactcacatcggaaagctgattgtcaccaagcaaattggtggagacgggatgatggatattaccgatacttataagttccaagagggacaggaggaagaacgcttggccctggaaaccgcgctgatgtacggggctaagaagcccctcaacactgagggagtgatgaagtcacgaagcaacgtggatatggattttgaagtggaaaatgcagtgctcggaaaggatttcaagctgtccattacctttcggaacaacagccacaaccgctacactattaccgcatatctgtcggcaaatatcactttttacaccggggtgcctaaggcagaattcaagaaagaaacctttgatgtgaccctggaaccgctctcatttaagaaggaggcagtcctcattcaagcaggagaatacatgggtcagctgcttgaacaggcgtcacttcatttcttcgtgactgccaggattaatgaaactcgggatgtgcttgccaaacagaagtcgactgtcctgactatacctgagatcatcattaaggtcagaggtactcaggtggtgggctcggatatgactgtgaccgtgcagtttactaatccacttaaggaaactctccgcaacgtgtgggtgcatctggacggaccaggtgtgactagacccatgaagaaaatgttccgcgaaattcgcccaaattccactgtccagtgggaagaagtctgtcgtccatgggtgagcggacatcggaaacttatagcatcgatgtcgtcggatagccttaggcatgtgtacggggagctggacgtccaaatccagagacgtccctccatg

SEQ ID NO: 9542 - DNA, 2196 bp, synthetic construct
  misc_feature 1..2196: note = source = /note="Description of Artificial Sequence: Synthetic coding sequence"
  source 1..2196: mol_type = other DNA
atgagcgaaacgagtagaacagcatttggcggtcgacgagcagtgccgccaaacaacagcaatgcagcagaagatgatctacctacggttgagttacagggcgttgttccaagaggtgtgaacctgcaagaattcctgaacgtcacaagtgttcacctgttcaaggagagatgggatactaacaaggtagaccaccacaccgataaatatgaaaacaacaaactcatcgtaagaaggggccagagtttttatgttcagatcgatttttccagaccctatgacccacggagagatttatttcgagttgagtacgtcataggacggtaccctcaggagaacaagggcacctacatccctgtcccaattgtctcagaattacagtctgggaagtggggcgccaagatcgttatgcgagaggacagaagtgtgagactgtctatccagagttcacccaaatgcatcgtcggcaagttcaggatgtacgtcgcagtttggactccctacggggtgctgcgaacctctcgaaatccggagacagatacctacatcttattcaatccctggtgcgaggacgatgctgtgtacctggacaatgagaaggaaagagaggaatacgtgctgaatgacataggcgtaattttttatggtgaggttaatgacatcaagacaagatcctggtcttacggccagtttgaggacgggattctggatacatgtctctatgtgatggacagagcgcagatggacttgtccggcagaggcaaccctatcaaggtctctcgagtgggtagtgccatggttaacgcgaaagatgatgaaggggttctggtgggctcctgggataatatttatgcttacggtgtgcctccaagtgcttggactggctccgtggacattctactggagtacaggtctagtgagaacccagttcgatacggtcagtgttgggtgtttgctggggtgttcaatacttttctcagatgcctcggtatcccagctcgcatagtcactaattatttttctgcgcacgataatgatgccaacctccagatggacatcttcttggaggaagatggaaatgttaactccaagctaactaaagacagcgtgtggaactatcactgctggaatgaagcttggatgaccaggccagacctacccgtgggctttggcggctggcaggctgtcgactctactccccaagagaattccgacggcatgtatagatgtggaccggcctctgtgcaggccatcaaacatggccatgtgtgctttcagttcgacgccccctttgtctttgctgaggttaattccgacctgatctacatcaccgctaagaaagatggaacacacgtcgttgaaaatgtggacgccactcacattgggaagctgatcgtcaccaagcaaatcgggggcgacgggatgatggacataactgacacctacaagtttcaagaggggcaggaagaagaaagacttgctctagagaccgctctgatgtatggcgccaagaagccgctgaataccgaaggcgtcatgaagtctcgtagtaacgtagacatggattttgaggtggaaaatgctgtgctgggcaaggactttaagctgagcataaccttcagaaacaactctcacaataggtataccatcaccgcatacctcagcgctaatatcactttctataccggagtccctaaggcagaattcaagaaggaaactttcgacgtgacgctcgagcctcttagcttcaaaaaagaagcggtgctgatccaggctggggagtatatgggacagctgctcgagcaggcctctttgcatttttttgttaccgccaggataaatgagacaagggacgtgctggctaagcagaaatcaacagtgcttaccatccccgaaatcattataaaggtgaggggcacccaggttgtgggttcggacatgaccgtaacagtccaatttaccaatcctctgaaggaaactttgagaaacgtttgggtgcacctggatgggcccggggttacacggccaatgaaaaaaatgttcagggagattaggcctaatagtacggtgcagtgggaagaagtgtgtcgaccctgggtcagtggccaccgaaaactcatagccagcatgagttctgattccctaagacatgtatacggggaacttgacgtgcagatacaaagaagacctagtatg

SEQ ID NO: 9543 - DNA, 2196 bp, synthetic construct
  misc_feature 1..2196: note = source = /note="Description of Artificial Sequence: Synthetic coding sequence"
  source 1..2196: mol_type = other DNA
atgtccgaaacctcgcgcaccgctttcggaggaaggcgcgctgttccgcccaacaattccaacgccgccgaggacgaccttcctaccgttgagcttcaaggagtggtgccacgcggagtcaacctgcaagaattcctgaatgtgaccagcgtgcacctcttcaaggagcgatgggataccaataaagtcgaccatcacactgacaagtacgagaacaataaactcatcgtccgccggggccagtcgttttacgtgcagatagacttctcccggccgtacgacccgcggcgggacctcttccgtgtcgagtacgtcatcggaagatacccgcaagagaacaagggaacttacatcccggtgccgatcgtgtcggagctgcaatcaggaaagtggggagcaaagattgtgatgagagaggaccgctcagtcagattgtcgattcaatcctctccgaagtgtatcgtcggaaagtttcgcatgtacgtggcggtctggacgccatacggagtgctgcgcacttccagaaaccccgagactgacacgtacatccttttcaacccgtggtgcgaggacgacgccgtctacctggataacgaaaaagagagagaggaatacgtcctgaacgacatcggagtgatcttctacggagaggtgaatgacatcaagaccagatcatggagctacggacaattcgaagatggcatcctggatacttgcctgtatgtcatggaccgcgcccaaatggacctgagcggcaggggcaacccaatcaaagtgagccgcgtgggctctgctatggtcaacgccaaggacgatgaaggtgttcttgtcgggtcctgggacaacatctacgcctacggagtgccaccatcagcctggacgggatcggtcgatatcctgctggaataccggagctctgagaatcctgtgcgctatgggcaatgctgggttttcgctggagtgttcaacacctttcttcgctgcctgggcatcccggctcgcatcgtgaccaactacttctcagcccacgataatgatgcaaatctccagatggatatcttcttggaggaagatgggaacgtgaatagcaagctcacgaaggactcagtgtggaactaccattgctggaatgaagcgtggatgacgcggccggatctcccggtgggattcggtggatggcaggccgtggattcgactccgcaagaaaacagcgatggtatgtacaggtgcggccctgcgtcagttcaggcgatcaagcacgggcacgtgtgcttccagttcgacgctccatttgtgttcgcggaagtgaatagcgaccttatctacattaccgccaagaaagacggtacccatgtggtggaaaatgttgatgcgacccatatcggtaaactgattgtgaccaagcagatcggcggagacgggatgatggacatcaccgatacttacaagttccaggaaggacaggaagaagagcgcctggccttggaaaccgccctgatgtacggagcgaagaaaccgctgaatactgaaggtgtgatgaagtcgcggagcaacgtggatatggattttgaggttgaaaacgctgtgctgggaaaggatttcaaattgagcatcactttccgcaacaattcgcataatcgctacactatcaccgcctacctttcggccaacatcactttctacactggcgtccccaaagctgaattcaaaaaagaaacttttgacgttactctggaaccgttgtcgttcaagaaggaagcggtgctgatccaggccggagaatacatggggcagcttctggagcaggcctccttgcacttcttcgtgactgcacgcatcaacgagactcgggatgtcctggccaagcagaagagcacggtgctgacgatcccggaaatcatcatcaaagtccgcggcacccaagttgtgggatccgatatgacggtgactgtgcaattcactaaccctctcaaggaaaccctccggaacgtgtgggttcatttggacggaccaggcgtgacccggcctatgaagaagatgttcagagaaattcgcccgaactcgactgtgcagtgggaggaagtgtgccgcccatgggtgtcgggacaccggaaactgatcgcttccatgagctcggattcgcttcgtcatgtgtacggagaactcgatgtgcaaatccagagacggccgtcgatg

SEQ ID NO: 9544 - DNA, 2196 bp, synthetic construct
  misc_feature 1..2196: note = source = /note="Description of Artificial Sequence: Synthetic coding sequence"
  source 1..2196: mol_type = other DNA
atgagcgaaacgtcccggacagcattcggggggaggcgggcagtaccccccaacaatagtaacgccgccgaagatgacctgcccaccgttgaactgcaaggagtggttccaagaggagtgaacctgcaggagtttcttaacgtcacgtccgtgcatttgttcaaagagcggtgggacacaaataaagtggatcatcacacggacaagtacgagaacaataaactgattgtgcgcagaggtcaatcattctatgttcagattgatttcagcaggccatacgacccccgtagagatctattccgggtggaatacgttataggacgatatcctcaggaaaacaagggaacctacattcccgtgcctatcgttagcgagctccagagcgggaagtggggcgcaaagattgtgatgcgcgaggatcggtccgtgcgcctaagcatacagtccagccccaagtgtattgtgggtaaattcagaatgtacgtggccgtctggaccccttatggagtcctacggacatcacgtaatcctgagaccgacacttatatcctgtttaatccttggtgcgaagacgacgcagtgtatctcgacaatgagaaggagcgggaggaatacgtgctcaatgatataggcgtgatattctatggggaggtcaatgacataaaaacgcgatcttggtcttatgggcaattcgaggacggcattcttgacacgtgcctatacgtgatggaccgggctcagatggatttgtccggccgcggaaatcctatcaaggtgtctagggtggggagcgcaatggtaaacgccaaggacgatgagggagtcctggtgggatcctgggataacatatatgcctatggggtgcctccttcagcctggaccggctccgttgacatcctgctcgaataccgctcttcagagaatcccgtgcggtacggtcaatgctgggtgttcgcgggggtatttaacaccttccttcggtgcctaggcatcccagcccgaattgttacaaactacttttcagcccacgacaatgacgccaacctccagatggatatttttttagaggaggatggtaatgtcaatagcaagttgacgaaagactctgtatggaactatcactgctggaacgaggcatggatgacccgtcccgacttgcctgtcggattcggagggtggcaggccgtcgattcaacaccccaggaaaatagcgatggaatgtataggtgcgggccggcaagcgtccaagctattaaacatggacacgtttgcttccagtttgatgctcctttcgtatttgccgaggttaatagcgacttgatctatattactgccaagaaggacggcacgcatgtcgtcgagaacgtggacgcaacccacatcggtaaactcatcgttactaaacagataggaggcgatggtatgatggacattaccgacacttacaaatttcaagaaggccaggaggaagagaggctagccctcgagactgccctcatgtacggtgccaaaaaacctttaaacactgagggagttatgaagtcacgcagcaacgtggatatggacttcgaggtcgagaacgcagtacttggaaaggatttcaagttgagtataacattcaggaacaacagccacaatcgatacacgataaccgcctaccttagcgctaatatcaccttctacaccggagtgccgaaggctgagtttaaaaaggagacttttgacgtgaccctcgaaccactgagtttcaagaaagaggccgtcctcatccaagccggggaatatatgggccagctgctggagcaggcatccttacatttcttcgtcactgcgaggattaatgaaacgagggatgttctggccaagcaaaaaagcacagtgctcaccattccagagatcatcatcaaagtgcgcgggacgcaggttgtcggttcggacatgactgtgacagtccagtttaccaatcccctgaaggagacgctacgaaatgtctgggtgcatctagatggacccggcgtcactcgacctatgaagaagatgttccgtgagatccgccctaattcaacggtccagtgggaagaggtttgccggccatgggtcagtggccacagaaagctgatcgccagtatgtctagtgattccctccggcatgtctacggggagttggacgtacagatccagcgacgacccagcatg

SEQ ID NO: 9545 - DNA, 2196 bp, synthetic construct
  misc_feature 1..2196: note = source = /note="Description of Artificial Sequence: Synthetic coding sequence"
  source 1..2196: mol_type = other DNA
atgtcggaaacatccaggaccgccttcggcggccgtcgcgccgtacctccaaacaactcaaacgctgctgaagatgacctccccaccgtggagctgcagggagtggtgcctaggggggtgaacttgcaggaatttttgaatgtgacatctgtacacctgtttaaagaaagatgggatacaaataaggttgatcaccacacagacaaatatgagaataataaactaatagtccgccgcggacagtcattctatgtacagattgatttctcccggccttacgatccaagacgcgatctgtttcgtgtagaatacgttattggacgctaccctcaagagaataaagggacgtacataccagtaccaatcgtgtcagaactccagtccggaaagtggggggctaaaatcgtgatgcgggaggatcggtcggtgaggctgagcattcaatcctctcccaagtgcatagtggggaagttcaggatgtatgttgccgtgtggacaccatatggagtcttgcgcacaagccggaatcccgagaccgacacttacatcctgttcaacccttggtgcgaagacgacgcagtctaccttgacaacgaaaaagagcgagaagaatacgtactgaacgatatcggggtcatattttacggagaagtgaacgacatcaagaccaggagctggtcctatggccagttcgaggacggtattctggatacctgtctgtacgtcatggaccgcgcccagatggatttgtctggaagaggtaacccaattaaggtgagtcgtgtgggctcagcaatggtgaatgctaaagatgacgagggcgtgctagtcgggtcttgggacaacatatatgcctacggagtcccaccgtctgcatggaccggcagcgtggatatcctgctggagtatcgttcttcagagaatcctgttcgatacggacagtgttgggtcttcgccggcgttttcaatacgtttcttagatgcctgggtattccagctcgcatcgtgacaaattacttcagtgctcacgacaatgatgccaatctccagatggacatctttctggaagaggatggcaacgtgaatagcaagcttacaaaggactctgtgtggaactatcactgctggaacgaggcttggatgaccaggcctgatctgcctgtgggattcggaggctggcaggcagtagattcaacgcctcaagaaaatagtgacgggatgtaccgttgtgggcccgcgagcgtacaagcaatcaagcacggccatgtgtgttttcagttcgatgctcccttcgtgttcgctgaagtgaattccgacctgatttatataacagctaagaaagatggcacccacgtggtggagaatgtggacgctacccatataggcaaattgatcgtgacaaagcaaattggtggggacggaatgatggacatcaccgatacctataagtttcaggagggccaagaggaggaacgcttggcactcgaaacggccctcatgtacggggcgaagaagcccttgaatactgagggagtgatgaaatctcgctcaaacgtcgatatggacttcgaggtggagaatgcggtgctgggcaaggactttaagctatctattactttccggaacaactctcataacaggtacaccatcacggcatacttgagtgcaaatataacgttttatacaggagtgcctaaggcggagttcaagaaggaaaccttcgacgttacactcgaaccactgtccttcaaaaaggaagcggtgctgattcaggctggggagtacatgggccagctgctagagcaagcatccctgcatttttttgttacagctcggatcaacgagacacgcgacgtgttggccaagcagaaatcaactgttctgacaatcccagagataattatcaaggtgcgaggcacccaagtagtcggaagcgacatgacagtgactgtacaatttactaacccgctgaaggagacactgcggaacgtgtgggtgcatctcgatgggccaggcgtaaccagacccatgaagaagatgtttagggagatccggccaaacagcacggtacaatgggaggaggtttgccgaccgtgggtcagcggccaccgtaagctgattgccagtatgtccagtgacagtcttcgccacgtctacggggagctggatgtgcagattcagaggcggccctcgatg

SEQ ID NO: 9546 - DNA, 2196 bp, synthetic construct
  misc_feature 1..2196: note = source = /note="Description of Artificial Sequence: Synthetic coding sequence"
  source 1..2196: mol_type = other DNA
atgagcgaaacttcaaggaccgcctttggcggaagaagggccgtccccccaaataactcaaatgctgctgaggatgatctgcccaccgtggagcttcagggtgttgtgccacgcggggtcaacctccaggaatttctcaacgtgacgtcagtgcacctgtttaaagaaagatgggacaccaacaaagttgaccatcacaccgataagtacgaaaacaacaaactgatcgttaggcggggacaaagcttttatgtgcagatcgatttttctagaccatacgatccaagacgagatctcttccgcgtggaatacgttatagggagataccctcaggagaataaaggaacatacatcccagtgcccatagtttcagaactgcagtctggaaaatggggcgctaaaatcgtcatgagagaggatcggagtgtgcggctgagcatccagtccagccccaaatgtatagtggggaagtttcgcatgtacgtcgcggtctggactccttacggcgtcctgagaacatcgcgaaatcctgagactgacacctacatcctctttaacccctggtgcgaggatgacgctgtctaccttgacaatgaaaaggagagggaggaatacgtactgaacgacatcggcgtcatcttctacggcgaagtcaacgatatcaagacgagatcttggagctacgggcaatttgaagacggtatcctggatacttgcctgtatgtgatggatagggcacaaatggatctgagcggtcgcggaaacccaataaaggtgagtagagtcggctcagccatggtgaatgctaaagacgacgagggggtgctggtgggaagttgggacaacatttatgcttatggggtacctccttcagcttggacgggcagcgtcgatattctgctggagtacaggagctctgagaaccccgtgaggtacggccagtgctgggtattcgccggcgtgttcaacactttcctgcgatgcttggggatacccgcaagaatcgtgacgaattatttttctgcgcacgacaacgacgccaacttgcagatggatatcttccttgaagaagacggcaatgtgaatagcaagctgaccaaagactctgtatggaactatcattgttggaatgaggcttggatgactaggccagaccttccagttggtttcggcggttggcaggcagttgatagcacaccacaagaaaactctgacggcatgtaccggtgcggaccagcatccgtacaagcgatcaagcacggtcacgtatgctttcagttcgacgcccctttcgtgttcgcagaagtgaacagtgacttgatttatatcactgcaaaaaaggatggcacccacgttgtggaaaacgtcgatgctacccatatcggaaagctgatagtcactaaacagatcggaggagatgggatgatggatattacagacacatacaagttccaggaaggacaggaggaagagcgcctggccctggaaaccgcacttatgtacggagctaaaaagccgctgaacactgagggcgtcatgaaatctagaagcaacgttgatatggatttcgaggttgaaaacgctgtgcttgggaaggactttaagctgagcatcacttttagaaataactcccacaataggtatactataaccgcttacctttcggccaatatcaccttctatacaggggttcctaaggctgaatttaaaaaagaaacctttgacgtgaccctggagccattatcatttaaaaaggaagccgtgctgatacaggcgggggagtacatgggacaactcctggagcaggctagcctgcactttttcgtgactgcacgcatcaacgagacaagagacgtgctggctaagcagaagtctaccgttctgaccatccctgaaattatcatcaaagttcgcggaactcaggtcgtgggatctgacatgacggtcaccgtccagtttacaaatcctctgaaagagacattgcgcaacgtgtgggtccatctcgacggacctggggtcactcgccctatgaaaaaaatgttcagggagatcagacctaatagtaccgtgcagtgggaggaagtctgccggccttgggtatcaggccataggaagctgatcgcctctatgagtagcgattctctgagacacgtgtacggggaacttgacgttcaaattcaacgaagaccgtctatg

SEQ ID NO: 9547 - DNA, 2196 bp, synthetic construct
  misc_feature 1..2196: note = source = /note="Description of Artificial Sequence: Synthetic coding sequence"
  source 1..2196: mol_type = other DNA
atgagtgaaacatccagaacagcttttggtggcagacgcgctgtgccccccaacaactctaatgcggcagaggacgatctgcctacagtggagttacaaggagtcgtgccaaggggtgtgaacctacaggagttcttgaatgtgacctcagtgcacctgttcaaggaacggtgggacaccaacaaagtagatcaccacactgacaaatacgaaaataacaaattgatagtaaggaggggccaaagcttctatgtgcagattgacttttctcgaccctacgatcctaggagggatctgttccgcgtagagtatgtcatcgggagatatccccaggagaataagggcacatacattcctgttcccattgtgagcgagttacaatctggaaagtggggggccaagatcgtgatgcgtgaagacagaagcgtgcgactaagcatccagagctctcccaagtgcatcgtggggaagtttcgaatgtatgttgcagtgtggaccccttacggcgtgctccgcacatctaggaacccggagaccgatacatatatcctctttaatccctggtgtgaggacgacgccgtttacctcgacaacgaaaaagaaagggaagagtacgttctcaatgatattggagtgattttctacggggaagtcaacgacatcaagacccgtagttggagctacggccaatttgaggatggtatcctcgatacctgcctgtatgtaatggaccgcgcacaaatggaccttagcggccgtggcaacccaatcaaagtttcgcgcgtcggcagcgccatggttaatgcaaaggatgacgagggtgttctggtgggcagttgggacaatatatatgcttacggggtacccccttccgcctggacaggcagcgtcgacatcctcttagagtatcgctcatccgaaaaccctgtcagatacggacagtgttgggtgttcgctggagttttcaatacttttctgaggtgtctggggatccccgctagaattgttacaaattattttagcgcccacgacaacgacgcaaacttgcagatggacatctttctagaagaagacgggaacgtgaatagcaagctgaccaaagacagcgtgtggaattaccactgctggaacgaggcatggatgactcgaccggatcttccagtgggatttggcgggtggcaggctgtggactctacacctcaggaaaattccgatggcatgtatcggtgcgggccagcttctgtgcaagcgattaagcacggccacgtctgttttcaattcgatgctcccttcgtattcgctgaggtgaatagtgacttgatctacattaccgccaagaaggatggcacccacgttgtggagaatgtggacgcaactcacattggcaaactaattgtgaccaagcagattggcggcgatggaatgatggacatcactgatacttataagtttcaggaaggccaggaggaagagagactggctctagagactgcactgatgtacggagctaagaaacccctgaatactgagggggtgatgaagtcaaggtcgaacgtggatatggactttgaagtggaaaacgcagtactcgggaaggatttcaaactgagtataaccttcaggaacaatagccacaatagatatactataacagcttacctgagcgcaaatataacattctataccggagtcccgaaagcagaattcaaaaaggagaccttcgacgtgacattggagcccctgtctttcaaaaaagaagcagtccttatacaagccggcgaatacatggggcagttgctggaacaggcctctttgcatttttttgtcaccgctagaataaacgaaacgagagatgtgttggcaaagcaaaagtcgactgtgctcacaattcccgagataattatcaaggtgcgcgggacacaagttgtaggaagtgacatgactgtgacggtacagttcaccaaccctttaaaggaaacactgcgcaacgtctgggtgcatctggacggacccggggttacccgaccaatgaagaagatgttcagggagatcaggcctaattcaacagtgcagtgggaggaagtgtgtcgaccttgggtttccggacatcggaagctgattgcctcgatgagttccgacagcctgcggcacgtgtacggggaactggatgtacaaatccaacggcgaccatcgatg

SEQ ID NO: 9548 - DNA, 2196 bp, synthetic construct
  misc_feature 1..2196: note = source = /note="Description of Artificial Sequence: Synthetic coding sequence"
  source 1..2196: mol_type = other DNA
atgtccgagacaagtcgcaccgcctttggcggtcgcagggcagtgccacctaataactcaaacgccgcggaagacgatctgcccacagtggaactccaaggcgtcgtccctagaggtgtgaaccttcaggagtttctgaacgtgacctccgtccacttgtttaaagagagatgggacaccaacaaagtcgatcaccatacggataagtacgaaaataataagctgattgtcaggagaggtcagtccttctacgtccagatcgacttctcccgtccctacgacccacgtagggatttattcagggtagagtacgtaatcggtcgatatccccaggaaaataagggaacatatatccctgtccccatcgtgtccgaactgcagtccggaaaatggggagctaaaattgtgatgcgagaggacagatctgtgagactgtccattcagtctagtccaaagtgcatcgttgggaagttccgaatgtacgttgccgtatggacaccatacggagtactgagaaccagcagaaatccagagactgacacctatatcctgttcaatccgtggtgcgaagatgacgcggtgtaccttgataatgagaaagaaagagaggagtatgtgctgaatgatataggagtcatattctatggggaagtcaacgacatcaaaactcgatcttggtcttacggtcagtttgaggatgggatactcgatacctgtctgtatgtaatggaccgagcacaaatggatctgtctggaagggggaacccgatcaaggtctcccgagtgggctctgctatggtgaacgccaaagatgacgaaggcgttctggttggctcctgggacaacatctacgcttacggcgtgcctccgagcgcctggacaggatccgtggatattctgctcgagtaccgatccagtgaaaaccccgtgaggtatgggcaatgctgggtgttcgcaggtgtcttcaatactttcctgaggtgcctgggcatcccggctaggatcgtcaccaactacttcagcgcccatgacaacgatgccaatctccaaatggacatcttccttgaggaagatgggaacgtaaattctaagcttacaaaggattccgtctggaactaccactgctggaatgaggcatggatgactcgtcccgatctacctgtggggttcgggggttggcaggccgtcgactcgacgccgcaagagaatagtgacgggatgtatcgatgcggcccggcctctgtgcaggcaatcaagcatggccacgtatgcttccagtttgacgcccccttcgtgttcgctgaggtgaactccgatctcatctacattaccgccaaaaaggacggcacacacgttgtcgaaaatgtagacgccacacatataggtaaactaattgtgactaagcagattggcggtgatgggatgatggacatcaccgatacatacaaatttcaggagggccaggaggaagaaaggctggccctggaaacagccctcatgtacggtgccaagaaaccgctgaacactgaaggcgtgatgaagagcagaagtaatgtcgatatggattttgaggtggaaaacgcagtgttgggtaaggattttaagctgtctatcacttttcgaaataatagccataatcgctacacgatcacagcgtatctttcagcgaacatcacattttacactggtgttcccaaagctgagttcaagaaggagacctttgatgtgactttggagccactatctttcaagaaggaggccgtgctgatccaagctggagaatacatgggccaattactggaacaggcaagcttgcatttctttgtgactgctcgtatcaatgaaaccagggatgtgctggccaagcagaaatccaccgtcctgaccatccctgagatcatcatcaaagttcgaggaacccaagtcgtcggctcagatatgacagtgactgtacaattcacaaatcccctgaaagaaacactgaggaacgtgtgggtgcatttggatggccccggcgtgaccaggccaatgaaaaagatgtttagggagataagacccaattcaaccgtccagtgggaggaagtttgtcgaccttgggtgtctggccaccgtaagctgatcgcctcaatgtcatccgactcactgagacatgtatacggtgaactcgacgtgcagatacagcgaagaccatcaatg

SEQ ID NO: 9549 - DNA, 2196 bp, synthetic construct
  misc_feature 1..2196: note = source = /note="Description of Artificial Sequence: Synthetic coding sequence"
  source 1..2196: mol_type = other DNA
atgtctgaaacttctcggacagccttcggtggtcggcgagcagtgcctcctaacaatagcaatgctgcagaagacgatctgcctaccgtggaactccagggcgtggtgccccgcggcgttaacttgcaggaattcctcaatgtgaccagtgtgcacctgttcaaggaaagatgggacacgaataaggtggatcatcacacagataagtacgaaaacaacaagctgattgtgaggcgcggacagtcattctatgtgcagatcgactttagtcgaccctacgaccccaggcgggacctgtttcgggtcgaatatgtgattgggcgatacccacaggaaaataaagggacttacataccagtcccaattgtgtccgagctgcagtccggaaagtggggagccaagatcgtgatgcgagaagaccggtctgttagactttcgatacagtcgtctccaaagtgcatcgtggggaaattcagaatgtacgtggcagtttggacgccgtatggcgttctgcggacgagtagaaaccccgagaccgatacgtacatcttgtttaatccatggtgcgaagatgacgctgtgtacttagataacgagaaagagcgggaggagtacgtcttgaatgatattggggtaatcttttacggcgaggtaaatgacatcaaaacgaggagttggtcatatggacagttcgaggacgggatcttggatacctgcctgtacgtgatggatcgcgcacagatggacttgagtggtcgcggtaaccccatcaaagtgtctcgcgttggttctgctatggtgaacgcaaaggacgacgaaggcgtgcttgtaggatcctgggacaacatttacgcttatggcgttccacctagcgcatggacagggagtgtagacatcctcctcgaataccgctccagcgagaatcccgtcaggtacggccagtgttgggtttttgcaggggtgtttaacacattcctaagatgtctggggatccccgcccgaattgtgacaaattacttcagcgcacacgacaatgacgccaacctccaaatggatattttcctcgaggaagatgggaatgttaacagtaaacttaccaaggactccgtgtggaactaccactgttggaatgaggcctggatgacaaggcccgacctgccagtgggttttggaggatggcaagccgttgactccactccccaggaaaactcagacggaatgtatcgatgtggacctgcgtccgtgcaggcaattaaacatggacatgtctgttttcagtttgacgcaccgttcgtttttgccgaagttaactccgaccttatctacattacggccaagaaggatgggactcacgtcgtggaaaatgtggatgcaacccacattggtaagttgatcgttaccaagcagataggaggtgatggcatgatggatatcaccgatacatataagttccaagaaggtcaggaggaggaacggctggctctggaaacggccctaatgtacggagccaagaaaccgttgaatacagagggcgtgatgaaaagccgatctaacgtggacatggactttgaggtggagaacgctgtcttggggaaggactttaaactgagcattacattcagaaacaactctcataacaggtacactattactgcctatttaagcgcaaatattacattctatacaggggtgccgaaggccgaattcaaaaaggaaacattcgatgtgacactggagcccctgtcatttaagaaggaagcagtactgattcaagctggagagtatatgggtcaattactggagcaagcatctttgcattttttcgtgacagcaaggatcaacgagactagagacgtcttagcgaaacagaaatccactgtcttaaccatcccagaaattattatcaaggtgagaggcacccaagtggtgggcagcgatatgactgtgactgtgcaattcacaaacccacttaaggaaaccctaaggaacgtgtgggtacacctggatggcccaggagtgacgcgcccaatgaaaaaaatgtttcgggaaatccgtcctaactcaacagtccaatgggaggaggtgtgcagaccttgggtctctggccatcggaagctcatagcctctatgagctctgatagtttacggcacgtttacggtgaacttgatgtccagattcagcggcggccctccatg

SEQ ID NO: 9550 - DNA, 2196 bp, synthetic construct
  misc_feature 1..2196: note = source = /note="Description of Artificial Sequence: Synthetic coding sequence"
  source 1..2196: mol_type = other DNA
atgtctgagacttctaggacagcctttggtggcagaagggcagttccccccaataatagcaacgccgctgaggacgatctgccaacagtggaattgcagggcgtggtgccgcgaggagtgaacctgcaggaatttctgaacgtgacatccgtccatctgtttaaggagagatgggacacaaacaaagtggaccaccatactgataagtacgagaacaacaagttgattgtccgccgcgggcagagtttttatgtccagatcgacttttctaggccctacgacccaaggcgggacctgtttcgggtggaatatgtgatcggacggtacccccaagagaacaaggggacgtacatccctgttcctatagtctctgagttgcagtcgggtaaatggggggctaaaatagtgatgcgggaagatcgcagcgtgaggctaagcatccagtcctcaccaaagtgcatcgtgggaaagtttcgaatgtacgtggcagtctggacgccctacggggttctccgtaccagtagaaaccccgagacagatacttatatcttgttcaacccgtggtgcgaagacgatgccgtttatttagacaatgagaaggagcgagaagaatacgttcttaacgacataggcgttattttctacggcgaggtgaacgacataaagactaggtcctggagttacggccagtttgaggacggcatactggacacctgtttgtatgtcatggatcgggcacagatggacttgtccggcagaggaaacccaatcaaggtatctcgggtcggcagcgccatggtgaacgctaaagacgacgagggcgtgctcgtcggcagctgggataatatctacgcttacggggtacccccgtctgcttggacagggagtgtggacatcctgcttgagtatcgctcaagcgaaaaccctgttagatatgggcagtgctgggtcttcgcaggagtgttcaatacgttcctgagatgccttggaattccagcccgcatcgtcacaaattacttttccgctcacgacaatgacgctaatttgcagatggacattttcctggaggaggacggaaatgtcaattccaagctgaccaaggactcagtgtggaattaccactgctggaatgaggcctggatgacaaggcccgatctgccagttggatttggcggctggcaggccgtggactccaccccccaagagaattccgacggcatgtatcgctgcggaccagcctctgtgcaggctatcaaacatggacatgtgtgcttccagtttgacgcaccgtttgtttttgccgaagtcaactctgacttgatttatatcacggccaaaaaagatggcacccatgttgttgaaaatgtggacgccacgcatatcggcaaattaatcgtcaccaaacagattggaggagacggcatgatggacatcaccgacacttataaattccaggagggacaggaagaagagcgcctcgctctcgagaccgctttgatgtatggagccaagaaacctctgaataccgagggggtaatgaagtcaaggagtaatgtagatatggattttgaggttgaaaatgctgtgctgggtaaggacttcaagctctccatcacatttcgaaacaactcccacaatagatataccattaccgcctatcttagcgcaaatatcaccttttatacgggcgtgcccaaggctgagtttaagaaggagacttttgatgtcactctggagcccttatctttcaaaaaagaagccgtcctgattcaggctggcgaatatatggggcagctactcgagcaggcctccctccacttcttcgtgacagcccgtataaatgagactcgcgacgtgttggctaaacagaagtccacagtcttgacaattccggagataattatcaaggtccgcggcacccaggttgtgggctccgacatgactgtcacagtgcagttcacgaaccctctcaaagagacactgcggaacgtgtgggtgcaccttgatgggcccggcgtcacccgcccaatgaagaaaatgttcagagaaattaggcctaatagtaccgttcagtgggaagaagtgtgtcggccttgggtgtctgggcatcgcaaactcattgcctcaatgtcctcagatagcttgcggcacgtctacggcgagctggatgtgcaaatccagagacgcccaagtatg

SEQ ID NO: 9551 - DNA, 2196 bp, synthetic construct
  misc_feature 1..2196: note = source = /note="Description of Artificial Sequence: Synthetic coding sequence"
  source 1..2196: mol_type = other DNA
atgtccgaaacatcccgcacggcttttggcgggaggcgagccgtccctcctaataactcaaacgccgccgaagacgatctcccaaccgttgagctgcagggtgttgtgccccgcggcgtgaacctgcaagagtttctgaatgtgaccagtgtgcacctgtttaaggagcggtgggacaccaataaggtggaccatcacactgataaatacgaaaacaataaacttatcgtccggcgcggtcagtcattttacgtacaaattgacttttctaggccgtacgatccacgcagagacttgttcagagtggagtatgtgattggacgctacccccaagagaacaaaggcacatacatcccagtgcccatcgtatcagagctccagagcgggaagtggggagcaaagatcgtgatgagagaggatagatcggttcgtctctccatccaaagttctcccaagtgtatagtgggcaaattcagaatgtacgtggcggtctggaccccctatggggtcctccgaacgagtaggaaccccgagacagacacttacattctgttcaacccctggtgtgaggatgacgccgtgtacttggacaatgaaaaggagcgggaggagtacgtactgaatgacattggcgtgatcttctacggagaagttaatgacatcaagacgcgttcttggagctatgggcagtttgaggacggcattttggatacttgcttgtatgtgatggacagggcccaaatggatctttcaggcaggggtaacccaatcaaagtcagtcgcgtcggatctgcaatggtaaatgccaaagacgatgagggtgtgcttgtgggcagttgggataatatctatgcttatggcgtgcccccaagcgcatggacagggagtgttgatatacttctggagtatcgctcaagcgagaacccagtccggtacgggcaatgttgggtattcgcgggcgtgtttaacacctttctgcgctgcctaggtataccagcacggatcgttaccaattatttttcagcacatgataatgatgccaacctgcaaatggatatctttctcgaagaagacgggaacgtcaattccaaactgactaaggactccgtatggaattaccattgctggaatgaggcatggatgactcgccctgatctgcctgtgggctttggcgggtggcaagcagtggactcaactccccaggaaaacagcgacggtatgtataggtgtggcccagcctccgtgcaggctatcaagcatggtcacgtgtgctttcagtttgacgctcccttcgtgtttgcagaggtaaacagtgatctgatctacatcactgctaagaaagatgggacacacgtggtggaaaacgtggacgccactcacatcggcaagctgatagtgaccaagcagattggcggggacggcatgatggacataactgacacatacaagttccaggaagggcaagaggaagagcggctggctcttgagaccgcactgatgtacggtgcgaagaagccgttaaatacagaaggggtcatgaagtctcgtagcaacgttgatatggattttgaagtagagaacgcagtgctcgggaaagacttcaaactcagcattacattccgcaataattcccacaataggtacactattacagcctacctgtcagctaacatcacattttacaccggcgttcccaaggctgaatttaaaaaggagacttttgatgtaacattggaaccattgtccttcaaaaaagaggctgtgttgattcaagctggtgagtacatggggcagctcctggagcaagcttccctacattttttcgtcaccgcccgcataaatgagaccagggatgtgctcgcaaagcagaaaagtacggtcctcaccatacccgagatcataataaaagtgagaggcacccaagtggtcggcagtgatatgaccgtgacggttcagttcaccaaccccttaaaagagacacttcggaacgtttgggtgcacctcgacggcccaggagtgacccggcctatgaaaaagatgtttcgagaaatacgtccaaacagtaccgtgcagtgggaggaggtgtgtagaccttgggtaagtggacatcggaagctgatagcatccatgtcctccgactctctgagacacgtgtacggcgagctggatgttcagattcagcggcggcccagcatg

SEQ ID NO: 9552 - DNA, 2196 bp, synthetic construct
  misc_feature 1..2196: note = source = /note="Description of Artificial Sequence: Synthetic coding sequence"
  source 1..2196: mol_type = other DNA
atgagcgaaacctccagaactgcattcggagggagacgcgcagttccaccaaacaatagtaacgcggccgaggacgatcttcctacagttgaacttcaaggagtggtgccacgtggggttaacttgcaagaatttcttaacgtcacgagtgtacacctgtttaaagagcgatgggacaccaacaaggttgatcatcatacggataaatatgagaataacaaattgattgttagacgaggacagtcattctacgtccaaatcgacttttctagaccctacgatccgcgacgagatctgtttagggttgagtacgtaattggtcgttacccacaggaaaataaaggaacatatattcctgtccccatcgtgtccgaacttcaatcgggtaagtggggcgccaagattgtgatgcgggaggatcgttcagtgagattatcgatccaaagcagccctaaatgcattgtaggaaagttccgaatgtacgtagcggtttggacaccttatggtgttttacgtacttctagaaacccagagacagatacatatattttatttaatccatggtgtgaggatgacgccgtgtatctggacaatgagaaagaacgggaagaatatgtcctcaatgatattggagttatattctatggtgaagttaacgatattaagacccgttcatggtcttatggccagtttgaagacggaattttggatacatgtctgtacgtcatggacagagctcaaatggatttaagcggacggggtaatccaattaaagtatcacgagttggttctgctatggttaacgcaaaagacgatgaaggcgttctggttggatcatgggataatatttatgcttatggagttccacctagtgcgtggacaggaagcgtggatatcttgttggaatacagatcttcagagaacccagttcggtacggacaatgttgggtcttcgctggagtatttaacacgtttttgcgctgcttgggaattccggcacgaatcgttacgaattatttttccgcccatgataatgacgcaaaccttcagatggacattttcttggaggaagacggaaacgttaactccaaattaacaaaggattcagtgtggaattaccactgctggaatgaagcgtggatgacccgtccagatctaccagtgggattcggaggctggcaggcagtcgactcaacgccacaagagaactctgatggaatgtatcgttgtggaccagctagtgtccaggccataaagcatggacatgtttgcttccaatttgacgcgcccttcgtgtttgccgaagtgaattcagatttgatttatattacggctaaaaaagacggaactcacgtagttgagaatgtcgatgctacacatatcggaaagttgatcgttactaagcagattggtggcgacgggatgatggatataacagatacttataagtttcaagaaggacaggaagaagaaagattggcgcttgaaacagcactaatgtacggagctaaaaagcccttgaacacggagggagtcatgaaaagccggagtaatgtagatatggatttcgaggttgaaaatgctgtactaggtaaagatttcaaactcagtattacctttcggaataattcacataaccggtatacgattacagcgtacttgtcggcaaacattacattctatacaggagtccccaaggcagagtttaagaaagagacttttgatgtaactcttgaaccactatcgttcaaaaaagaagctgtattgattcaggctggagagtatatgggtcaattgctagaacaagcgtctctccatttctttgtcacggctcgaatcaacgagacacgagacgttctcgcaaagcagaagagcactgttctcaccatcccggagatcataattaaagtacgtggaacgcaagttgtcggatccgacatgactgtaacagttcagttcactaacccactgaaagaaactttgcgcaacgtctgggttcaccttgatggaccaggagtcacaagaccaatgaaaaagatgtttagagaaattagacctaattcaactgtacaatgggaagaggtttgtagaccatgggtgtctggacatcgcaagctaattgctagtatgtcttccgattcactacgccatgtatatggtgagctcgatgtacaaatacaacgtcgaccatcgatg

SEQ ID NO: 9553 - DNA, 2196 bp, synthetic construct
  misc_feature 1..2196: note = source = /note="Description of Artificial Sequence: Synthetic coding sequence"
  source 1..2196: mol_type = other DNA
atgagtgagacttctcgcacagccttcggcggccgtagggcagtacctccaaacaacagcaatgcggcagaggacgatttgcccactgtggaattgcagggagtcgttccgcgaggtgttaacctgcaggaatttctgaacgtcacgtctgtgcatctctttaaagagaggtgggataccaataaagtagatcatcataccgacaaatatgagaacaacaagctcattgttaggagaggtcaaagcttttatgtgcagatagacttttcacggccgtacgatcccaggagggatctgtttcgagtcgagtacgtcatcgggcggtacccccaggagaacaaaggcacttacatccctgttcccattgtgtctgagctgcaaagcggtaagtggggggccaagatcgtgatgcgagaagatcgtagcgttagactgagtatccagagctcgcccaaatgcatcgttgggaagtttagaatgtacgtggctgtttggacgccctatggagtgctcaggacttccaggaaccccgagacagatacttacatcctcttcaatccatggtgtgaggatgacgctgtgtatctggacaacgagaaggagcgcgaggagtacgttctgaacgatataggtgtaatcttttacggagaagtgaatgacattaaaactagatcatggtcctatggccagttcgaagatggaatactggatacttgtttgtacgttatggacagagcgcagatggacttgagcggaagaggtaatcccatcaaggtgtcacgcgttggcagtgcaatggtcaacgctaaggacgacgaaggagtgttagtcggctcctgggacaacatctacgcctatggtgtgcctcctagcgcgtggaccggaagcgtggatatcctattggaataccggagctcagagaaccctgtaaggtatggacagtgttgggttttcgctggagtgttcaacacattcctgcggtgtctgggaatccccgctcgcattgttaccaactacttcagtgctcacgacaacgatgcaaatctgcagatggatatcttcctggaggaggacggcaatgtgaatagcaaattgaccaaagatagtgtctggaattaccattgttggaacgaggcttggatgacgcgtccagacctgcccgttggatttgggggctggcaggctgtcgattctaccccacaggaaaacagcgacggaatgtacagatgcggccctgcctccgtccaggctattaagcatggacacgtatgcttccagttcgacgctcccttcgtcttcgccgaagtgaattccgatctcatttacattactgcgaaaaaggatggcacccatgtcgtcgaaaatgtggatgcgacccatatcggcaagctgatcgtgaccaaacaaattgggggagatggcatgatggacataaccgatacttacaagttccaggaggggcaagaggaggagcgtctagctttggagactgcactcatgtatggggcaaagaagcccctgaataccgaaggcgtgatgaagagccggagcaatgtggacatggacttcgaagtcgagaacgcagtgctcggcaaagatttcaaactgtctatcacattccggaacaactcccacaaccgatatactataactgcttacctgtccgccaacatcactttttacacaggcgtacccaaggccgagttcaaaaaagaaactttcgatgtgaccttagagccattgtcatttaaaaaagaagcggtactgatccaggccggcgagtatatgggccagcttttggagcaggctagcctccactttttcgtaaccgcacgcattaacgagaccagagacgtgctcgccaagcagaagtcaacagtgctcaccatacccgaaattataatcaaggtgcggggtacacaggttgttgggtctgacatgacagtgactgtacagtttactaatcccttgaaggagaccctgaggaacgtgtgggtccatctagacggaccaggcgtaacgcgtcccatgaaaaaaatgtttcgtgaaattcgaccaaacagcaccgtgcagtgggaggaggtgtgccgaccatgggtgagcggtcatcgaaagctgatcgcctccatgtcctctgactcactgagacacgtgtacggtgagctggatgtgcagatccaaagacgaccctccatg

SEQ ID NO: 9554 - DNA, 2196 bp, synthetic construct
  misc_feature 1..2196: note = source = /note="Description of Artificial Sequence: Synthetic coding sequence"
  source 1..2196: mol_type = other DNA
atgtccgagaccagccgtactgcctttggaggtaggcgcgccgtgccacccaataacagtaatgcagcggaggatgatctccccacagtggagcttcagggagtggtgcctagaggtgtcaaccttcaggagttcttgaatgtgacatcagtgcacttatttaaggagcgttgggacaccaataaggtggatcaccacactgataaatatgagaataataagctcatcgtgaggagaggccagtccttttacgtgcagatcgatttctcaagaccctacgatccccggagagacctctttcgcgtcgagtatgtgattggccgataccctcaggaaaataaaggcacctatatccctgtgcctattgtctccgagctccagtctggaaagtggggcgccaaaattgtgatgagagaggacagaagtgtaaggctctcaattcagtcctcaccaaagtgcattgtcggaaaattccggatgtacgtggctgtgtggacaccatatggagtcctcaggacatccagaaaccctgagactgatacctatatcttgtttaatccatggtgcgaagacgacgctgtttacctggataatgaaaaagagcgcgaagagtatgtactgaacgacataggagtgattttttacggcgaagtcaacgatattaagacccggtcgtggtcctacggccagtttgaagacggaatcctggacacctgtctgtatgttatggatcgggcgcagatggacctgtcaggtcggggcaatcctattaaggtgtctagagtgggaagtgctatggtcaacgcaaaagatgacgagggcgtgttagtggggagctgggataatatctacgcctacggtgtgcctccgtccgcttggacgggttccgtggatatattgctcgagtaccggtcatcagaaaatccagtccgctacggacagtgttgggtgttcgctggggtgttcaacacatttctccgttgtctgggtatccccgccagaattgttactaattacttcagcgctcatgacaacgacgccaatctgcagatggatatttttctagaggaggacggcaacgtgaactcaaagctgacaaaagattccgtgtggaattatcactgctggaatgaagcctggatgactcgccccgacctccccgtcggctttggcgggtggcaggctgtggacagtaccccccaggagaactctgacggaatgtatagatgcgggccagcttctgttcaggccatcaaacatggtcatgtgtgtttccaatttgacgctccgttcgtgtttgccgaagtgaattctgacttgatctacatcactgctaagaaggacggcacccatgtggtcgaaaacgtggacgccacccacattggaaagcttatcgtaactaaacagatcggcggggatggaatgatggatatcaccgacacctacaagttccaggaaggccaagaagaagagaggttggccctcgagaccgccctgatgtacggggcgaaaaaacctcttaacactgagggtgtcatgaaatcaaggtcaaacgtcgacatggattttgaggtagaaaacgctgtgctagggaaggactttaaactgtcaatcaccttcaggaataacagccataatcgctacacaataaccgcctacttgtctgccaatattaccttttacacgggtgtacctaaggccgagtttaagaaggaaacctttgacgtcacgttggagccgctttcttttaagaaggaagctgtgcttatccaggccggcgagtacatgggccaacttctcgaacaggctagcttacactttttcgttaccgctcggattaacgagaccagagatgtcttggccaagcaaaagtctacagtactgaccattcccgaaattataataaaggtccgcggtacgcaggtggtcgggagcgacatgacagtcaccgtccagtttactaatcctttgaaagaaaccctgaggaatgtgtgggtgcatctagacggccctggcgtcacccggcccatgaagaagatgttccgggagatccggccgaatagcactgtgcagtgggaagaagtgtgcagaccatgggtttctggccaccgaaagctgatagcctcaatgtcatccgattcccttcgccacgtctatggggaactggacgtccagattcagcgccgaccctcaatg

SEQ ID NO: 9555 - DNA, 2196 bp, synthetic construct
  misc_feature 1..2196: note = source = /note="Description of Artificial Sequence: Synthetic coding sequence"
  source 1..2196: mol_type = other DNA
atgagcgagacttcgcgcaccgccttcggcggacggagggccgtcccgccgaacaattccaacgccgccgaggatgacctgccgaccgtggagctgcaaggagtcgttccacggggagtcaacctgcaggagttcctgaacgtcacctccgtgcacctcttcaaagaacgctgggacaccaataaggtggatcaccatactgataagtatgaaaataataaacttatcgtacgaagaggtcagtcattctacgttcagatcgacttctcgcgaccgtacgatccacgcagagatcttttcagggtggagtacgtaatcggacgctacccgcaagaaaataagggaacttacatcccagtccctatcgtctcggaactccaatccggtaagtggggtgccaaaatcgtgatgcgcgaggatcgctcggtcagactgtcgatccaatcttccccaaagtgcatcgtggggaagttccggatgtacgtggcagtctggaccccttacggcgtgctccggacgtcgaggaacccggaaactgacacgtacattctgttcaatccgtggtgtgaagatgacgcggtctacctggataatgagaaggaaagagaagagtacgtgctgaacgacatcggcgtgatcttttacggagaggtgaacgatattaagacccggtcatggtcatacggacaattcgaagatgggatcctcgacacctgcctgtacgtcatggaccgtgcacagatggacctgagcgggcgcggaaacccgatcaaggtgtcccgcgtgggttcagcaatggtgaacgcgaaagacgacgagggagtgctggtcggctcgtgggataatatctatgcgtacggagttccgcctagcgcctggactgggagtgtggacatcctgctcgaataccgctcgtccgaaaacccggtccgctacggccaatgttgggtttttgctggtgtgttcaacacttttctccgctgcctgggaattccagccagaatcgtgactaactacttctctgctcacgacaacgatgcgaacctgcaaatggatatttttctcgaagaggacggaaacgtgaatagcaaactgaccaaggactccgtgtggaattatcattgttggaacgaagcgtggatgacccgccccgatcttccagtgggattcggaggatggcaggctgtggactcgaccccgcaggaaaactcagatggaatgtacaggtgcgggcctgcaagcgtccaggcaatcaagcacggccatgtgtgcttccagttcgacgcccctttcgtgttcgcggaagtcaattcagacttgatttacatcaccgccaagaaggacggaacgcacgtcgtcgagaatgtggatgccactcatatcggcaagctcattgtgaccaagcaaatcggaggggacggaatgatggatatcaccgacacttacaagtttcaggaggggcaggaagaggagcggctggctctcgaaaccgctctgatgtacggagccaaaaagccactgaacactgaaggcgtgatgaagtcacggtccaacgtggacatggactttgaggtggagaatgcggtcctgggcaaagacttcaaactgtccatcaccttccgcaacaattcacacaaccgctacacgattactgcatacttgagcgctaacatcaccttttacactggagtccccaaagcggagttcaagaaggaaacttttgacgtgactctcgaaccgctctcgtttaagaaggaagccgtgttgatccaggccggcgaatacatgggacaactgctggaacaggcgtccctccacttcttcgtgactgcccggatcaatgaaactcgggacgtgctcgcaaaacagaagtccacggtgcttaccatccccgaaatcatcatcaaggtcagaggtacccaggtggtgggcagcgatatgaccgtgaccgtgcagttcaccaaccctctcaaggagactctgagaaacgtgtgggtgcatttggacggaccgggcgtgacccggccaatgaagaaaatgttcagagaaattcggcccaactcgactgtgcagtgggaggaggtctgccggccgtgggtttccgggcataggaaattgatcgcctcgatgagcagcgacagccttagacacgtctacggagagctggatgtgcagatacaacggcgaccttcgatg

SEQ ID NO: 9556 - DNA, 8832 bp, synthetic construct
  misc_feature 1..8832: note = source = /note="Description of Artificial Sequence: Synthetic coding sequence"
  source 1..8832: mol_type = other DNA
atgacgcttcgcctccttgtggccgcactgtgtgccggaattctggcagaagcacctagagtgagagcccaacatagggaacgggtgacctgcactcgcctctatgccgcagatatagtgttcctcctcgacggctcgtcatcgattggccgctccaatttccgtgaagtcagatccttccttgagggacttgtccttcccttttcaggagcagcatcggcgcagggggtgcggtttgcaaccgtccagtactcagatgacccgaggactgaatttggcctggatgccctgggatcgggaggcgatgtcattcgcgcaattcgggaactctcgtacaaaggaggcaacacccgcactggcgcagcaattcttcacgtggcagatcatgtctttctccctcagctggcaaggcccggagtgccgaaggtctgtatactgatcaccgacggaaagtcgcaggatcttgtggacacggccgcccagcggctgaaaggacaaggcgtcaagctgtttgcggtggggattaagaacgctgaccctgaagaacttaagcgagtggcctcccaaccgaccagcgatttcttcttttttgtgaacgatttttccatcctgcgtacgctcctgcctcttgtgtcgaggagagtgtgtaccactgccggaggtgtccctgtgaccaggcctccagatgatagcacctcggcgcctcgcgaccttgtgctgagcgaaccttcctcccaaagcctgagagtgcaatggactgcagcatccgggcctgtgactggttacaaggtccagtatactcctcttaccggtcttggacagcctcttccatccgaacggcaggaagtcaatgtcccagccggagaaacgtccgtgcgccttagagggctccgccctctgaccgaataccaagtgactgtgattgcattgtacgcaaattccattggagaagctgtgtctggtactgcacggaccactgcgctggaaggccccgaactgactatccagaataccactgcacattcacttcttgtggcctggagatccgttccaggagccacgggttaccgagtcacgtggcgcgtgctgagcggagggcctactcaacagcaagaacttggacctggacagggatcagtgctgctccgtgaccttgaacctggaaccgattatgaagtgaccgtgtcgactctgtttggcaggagtgtcgggccagccacctcccttatggcgcgaactgatgcctctgttgaacagactcttaggcctgtcatccttggtcctacctcgattcttctgtcatggaaccttgtgccagaagctcgagggtacagactggaatggagacgcgaaaccggactggagccaccacagaaagtggtgctgccgagcgacgtcactcggtaccaactcgatggactccagccaggtactgagtaccggctgactctgtacactctcctcgagggacatgaagtcgcaaccccggcaacggttgtgccgacgggaccggagctgccagtgtcacccgtcaccgatcttcaggcaactgaactccctggacagcgcgtgagagtatcgtggtcgccagtccctggtgcaacccagtacaggatcattgtccgctcaactcaaggagtggagcgtaccctggtgttgccaggaagccaaactgcatttgacctcgatgatgtccaagcaggactgtcctacacggtgcgagtgagcgcacgcgtcggaccccgggaaggatcggcctcagtgctcaccgtgcgtagagagcccgaaacgccccttgccgtgcctggacttagagtggttgtgagcgacgcaacccgtgtgagagtggcatggggccctgtgcctggagcctcgggatttcggatctcgtggtcgactggtagcggacctgaatcctcgcaaactctgccaccagattcaaccgcaaccgacattactggacttcaacctggtaccacctaccaagtggcggtgtcggtgcttagaggccgggaagaggggccagcagctgtgattgtggccagaaccgatccacttggtcccgtccgcaccgtgcacgtcacccaagctagctcctcaagcgtcactattacctggaccagagtgcccggtgctaccggataccgtgtatcctggcattccgcacatgggccagagaagtcacagctcgtctctggagaggcaactgtcgctgaacttgatggtcttgaaccggacactgaatacactgtgcatgtaagagcacacgtcgctggcgtggatggtcccccagcatcagtggtggtccggactgcgcccgagccagtgggtagagtcagccgtctccagattttgaacgcatcgtcagacgtccttcgtataacctgggtgggggtgactggcgcaaccgcttaccgcctcgcctggggtagatcagaaggaggtcctatgcggcatcagattctgcccggaaatacggattcggcagaaatccgaggtcttgaggggggagtgtcatacagcgtccgagtgaccgcactggtgggggacagagaaggaaccccagtgtcgattgtggtgaccaccccacctgaagcgcctccagcactcggcaccctccatgtggtgcagagaggggaacactcactccgcctccgttgggagccagtccccagagcacaaggctttctgctgcactggcagcccgagggtggccaggaacagtcgcgagtgctgggtcccgagttgtcatcgtaccatcttgacggattggaacctgccacgcaataccgggtgagattgtcggtgctgggtccagcaggtgaaggtcccagcgccgaagttaccgctcggactgagagtccgcgcgtgccttccattgaacttagggtcgtggacaccagtattgattccgtcacccttgcgtggaccccagtttcgcgggcatcgtcgtacatcctgtcctggcgccccctccgcggcccaggtcaggaagtgcctggatcgccacaaactctcccgggtatttcgagctcccaacgggtgactggtcttgagcctggagtgtcatacattttctcactgaccccagtgcttgacggagtgaggggccctgaggcgagcgtcactcaaacccctgtgtgtcctagaggactggccgatgtggtctttcttcctcatgccacccaggacaacgcacatagagccgaggcaacgcgtcgggtgctcgagcggcttgtgttggcactgggaccattggggccacaagcagtgcaggtgggtttgctctcctactctcatagaccgagcccactgtttccactgaacggtagccacgatctcggtataatcctccagcgcatcagagatatgccgtacatggacccatccggtaacaaccttggaaccgcagttgtcactgcccaccgatacatgctggcaccagatgcgcctggacgccgtcaacacgtcccgggagtgatggtgcttctcgtggacgagccacttagaggcgacatcttttcacctatcagagaggcacaggcgagcggactgaacgtcgtgatgctggggatggcgggagccgatcctgaacaattgaggaggcttgcacctggaatggatagcgtacaaactttctttgcggtggatgatggtccaagcctggatcaagcagtctccggcctggcaaccgcactgtgtcaagcgagcttcaccacccaaccacgacccgaaccttgccctgtgtattgtcctaagggacagaagggggaaccaggtgaaatggggctgagaggacaagtggggccgcccggagatcccggcttgcccggtaggaccggtgcgccaggacctcagggacctcctggctcagcaactgccaagggggaaaggggttttcctggagccgatgggcgccccggtagtccgggtagagcaggaaacccgggaactcccggggcacccgggctcaaggggtccccgggtttgcctggaccaagaggcgaccctggggagcgcggtcctcgaggccctaaaggcgaacccggagcaccaggccaagtgattgggggcgaaggccctggactgcccggacgaaagggtgatccaggcccttcaggaccaccagggcctagaggcccgcttggagatcctggcccgagaggtcctcctggcctgccgggtactgcaatgaagggagataaaggtgatcggggtgaaagaggaccccctggccctggtgagggcggcatcgcacccggtgaacctgggctgcctggactgcccggaagtccaggtccgcagggccccgtcggcccgcctggtaagaaaggagaaaagggcgattccgaggacggagctccggggcttcccggacaacctggaagcccaggtgagcagggtcccagaggacctcccggtgctattgggccaaagggtgatagaggatttcctggtcctttgggtgaagctggagagaaaggcgagcgaggccctcccggcccagcggggtccagaggactgcccggggtggccggccgccccggagcaaaagggcctgaaggcccgccaggtcctactggccggcaaggagagaagggtgaaccagggaggcctggtgaccctgcagtcgtgggtcccgcagtggccggacccaaaggcgaaaagggagatgttggtcccgctggccctcgcggagcaaccggagtgcagggtgaaagaggacctccgggtttggtgctccccggcgaccctggtcctaagggtgaccctggggaccggggaccaattgggctgactggcagagcaggacctccgggcgattccgggccacccggagaaaagggcgacccaggtagaccagggcctccaggcccagtgggacctcgtggaagagatggtgaagttggtgaaaaaggagatgaaggtccgcctggggacccaggcttgccggggaaagctggcgaacgaggactccgtggagcacctggggtgcgaggtcctgtgggcgagaaaggtgaccaaggcgaccccggagaagatggacgcaatggttcgccgggatcatccgggcccaagggagataggggcgagccgggaccgcctggccctcctgggcggctcgtcgatactgggcccggcgcaagagaaaaaggagaacctggtgacagaggacaagaaggacctcgaggacctaagggagatccagggctgcccggcgcgcctggagaacgcggtatagagggatttagagggccgcctggaccccaaggagatcctggagtacggggtcccgcaggcgaaaaaggggaccggggtcccccaggattggatggccggagcggtcttgatggaaaacctggggcagccggaccatccgggcctaacggtgcagcaggaaaggctggtgacccgggtcgtgacggactccctggtctgcggggcgaacaaggcctccctggaccttcaggtcctccaggattgcctggcaagccaggtgaggatggtaagcccggactgaatggtaaaaacggtgaaccgggtgacccaggggaggacggacgaaagggggagaagggcgatagcggtgcgtcgggtagggaaggccgggatggaccaaaaggtgaaaggggtgcaccgggaatcctcgggcctcaaggtccgcctgggctgcccggaccagtgggccctccaggacagggttttcctggagtgcccggtggaaccggtccaaagggcgacagaggtgagactggaagcaaaggggaacaaggactccccggtgagcggggacttcgcggagagcctggtagcgtgcctaacgtcgacaggctgcttgaaactgcaggaatcaaggcatcagcgttgcgggagattgtggaaacctgggatgaatcatcggggagcttcctgccagtgccagagaggcggcggggtcctaaaggtgatagcggcgagcagggtcctccgggtaaggaaggccctattggtttcccaggggaaagaggacttaagggggaccgaggtgatccggggccccaaggcccacccggcctggccctgggggagaggggccctcccgggccttcgggtctggcaggtgaacccggtaaaccaggtatccctggcctgccagggcgagccggaggtgtgggagaggcaggacgacccggcgaacggggagaacgaggggagaaaggggaacgaggtgagcagggaagggacggaccccctgggctgccgggcacccctggtccaccgggcccaccaggtccgaaggtgtcagtggacgaacctggtccaggactctctggcgagcagggccctcctggtcttaagggcgctaaaggtgaacccggatccaacggagatcaaggaccaaagggggatagaggcgtcccaggaatcaagggggatagaggagagccgggtcctcgcggacaggacggcaatccaggtttgcccggggaacgcgggatggccggaccagagggaaagccgggcctccaagggcccagaggtccaccaggtcctgtcggaggacatggggatccgggtcctcctggggccccaggtcttgccggtccagcgggaccacagggcccatcaggactgaagggagaaccaggagaaactgggccacctggcaggggacttaccggaccaactggcgcggtgggtctgcctggaccccccggaccttcggggttggtcggacctcagggatcccctggcctgccaggccaagtcggcgaaacgggcaaaccaggagcgcccggacgtgatggagcctccggaaaggatggggataggggctcgccaggtgtaccgggaagccccggactgcctgggccagtcggacccaaaggcgagcctggaccaaccggtgcccctggacaagcggtggtggggcttcctggagcaaagggtgagaagggggctccgggaggactggccggagatcttgtgggtgaaccgggggcaaagggcgaccgcgggctgcccggaccgcgcggagagaagggtgaggctggtagggcaggcgaacctggggacccaggagaagatggccaaaagggagcacctggacctaaaggattcaaaggtgatcccggcgtgggggtcccgggatccccaggtccgcctggaccaccaggtgttaagggagatttgggattgccgggacttcctggtgcccctggggtggttgggtttccggggcagaccggcccaagaggcgaaatgggacaacctggaccatccggagaacgtggactggccggcccgcccgggagagaggggatacctggtcctttgggacctccaggaccaccaggatcggttggaccgcccggcgcatcgggacttaagggggataagggggatcccggtgttggacttcccggtccacgcggggagagaggggaaccaggtattcgcggagaggatgggcggcccgggcaggaaggtccccgcggtctgaccggtcctccgggatccagaggagaacgcggagaaaaaggtgatgtcggctcagcaggactgaaaggcgacaagggtgattccgcggtgatcctgggaccaccgggacccagaggtgcaaagggagatatgggcgagaggggtccccgggggctggacggggataagggtcctcgtggagacaacggcgacccgggggataagggtagcaagggagaacccggcgataagggctcggcaggcttgcctggtcttagaggacttcttggcccacagggtcaaccaggtgcagccgggatacccggggatccaggttctccaggaaaagatggggtgccgggtataagaggtgaaaaaggagacgtgggatttatggggcccaggggtctgaagggtgagcgtggcgtcaagggtgcctgtggtttggacggagaaaagggtgataagggagaggctggcccaccagggcgacctggactggcgggtcacaagggagaaatgggcgaaccaggtgtgccaggtcagtcgggggcacccggaaaggaaggactgatcggcccaaagggggaccgcggttttgacggacaaccaggacctaagggggatcaaggagaaaagggagagcgcggcacgcctggcattggaggttttcctgggccttccggcaacgatggaagcgcgggccctccgggtccgcccgggtcagtcggacctcggggtcctgaaggacttcaagggcagaagggggaacgtggaccacccggagagcgagtagtgggcgcaccgggagtgccgggcgctcctggagagaggggggaacagggacgcccaggccccgcaggccccagaggggaaaagggagaagcggcgctgaccgaggatgatattaggggattcgtccggcaagaaatgtcgcaacattgtgcttgccaaggtcaattcatcgcctctggcagtagaccacttccttcctacgcagctgataccgcaggttcgcagctgcatgccgtccccgtgctgcgcgtgtcacacgcggaagaggaggaaagagttccaccagaggacgacgaatacagcgagtactcggagtactcggtggaagaataccaagatccagaagccccatgggattccgatgacccttgtagcctccctttggacgaaggatcctgcactgcctacactctccgctggtaccatcgtgcagtcactggatccactgaagcatgccacccattcgtctacgggggctgcggaggtaatgcaaataggttcggcacccgggaggcatgtgagcgccgatgtccaccccgggtggttcaatcgcaaggtaccggcactgcacaggat

SEQ ID NO: 9557 - DNA, 8832 bp, synthetic construct
  misc_feature 1..8832: note = source = /note="Description of Artificial Sequence: Synthetic coding sequence"
  source 1..8832: mol_type = other DNA
atgactcttcggctgctagtggccgcactttgcgccgggatcttggctgaagccccaagggttagggcccagcacagggagcgggttacctgtactcgcctgtatgccgcggacatcgtgtttctacttgatggaagctcaagtatagggcgatccaactttagagaggtccgcagcttcttagagggtctggttcttccattcagcggcgccgcaagtgcacaaggtgtgcgtttcgcaacggtccagtattccgacgatccgcgtactgagttcggacttgatgcactcggttccggtggcgatgtcatacgggccattcgagagttaagctataaaggaggcaacacacgaaccggcgctgcgatcctgcatgtggctgaccacgtgtttcttccacagttggccagaccaggagttccaaaggtgtgcatcctaataactgatgggaagagccaggacctcgttgacacggccgcccagcgcctgaagggccagggggtgaagctgttcgctgttggcataaagaatgctgaccccgaagagctcaaaagagttgcctcccaacccaccagtgacttctttttttttgtcaatgactttagtatcctgaggacgcttctccccctggtgagtcggagagtctgtacaacggccgggggcgtacctgtgactaggccccctgacgatagcacttccgcccctcgggacttggtgctgagcgagccctctagccagtcccttagggtgcaatggaccgctgcctcaggccccgtgactggctataaagtacagtacacacctctgaccggactgggtcagccgctgccctctgagcggcaggaggtgaacgtgcccgcaggggagactagtgtgcgtttgcgtggccttagaccactgacggagtaccaggtcacagtgattgctctctacgccaactctattggtgaggcagtctcgggcacagccaggacaaccgcgctcgaaggccctgagctcacaatccagaacaccaccgcccactctctcttggtggcttggcggagtgtgccgggcgcgacgggatatcgcgtgacctggagagtgctgtctggcggcccgacccagcagcaggaactgggcccagggcagggtagcgtgttactgagagacttggagccagggaccgactacgaggtcaccgtttcaactctttttggacggtctgtggggccagccacatcacttatggccaggacagacgcctcagtggaacagactcttcgccctgtgatactggggcctaccagtatcttactatcatggaatctcgtccccgaagctcgagggtatcgacttgaatggcgacgcgagacaggccttgagccgcctcagaaagtggttcttccttccgatgttacaagataccagcttgatgggctgcaaccgggcaccgaataccgactgactctatacacactcttagaggggcacgaagttgctacgcctgccacagttgtgccaaccgggcccgaactgccagtctcgcctgtgacggaccttcaggccaccgaactgccaggtcagagagtgcgtgtatcctggtctcccgtgcctggcgctactcaatacagaattatagtgaggtccacccagggggtggaacgtactcttgtcctccccggatcacagactgcgtttgatcttgacgacgtgcaggctggattatcctacacggttagagtctctgcacgcgtgggtccccgggagggaagcgctagcgtcctgactgtccgtagagaaccggagaccccactggctgtccccggacttcgagttgttgtgtccgacgctactcgggtgagagttgcctgggggcctgtccctggtgcctcgggcttccgcattagctggtccacaggctcagggccagagagcagtcaaaccctgccccccgacagtactgccacagacattacggggctacagcctggcacgacataccaggtcgcagtgtctgtgctcagagggagggaggaaggacccgcagctgtgatcgtggcaagaaccgaccccctgggtcctgtgcgcaccgttcacgtgacccaggccagctcctccagtgtgaccattacttggacgcgcgtcccaggggccacagggtacagggtctcctggcactctgctcatgggccggaaaagtcccaattagtgagtggcgaggcaacagtggcggagctagatggtttggaaccagatactgagtacacagtgcacgtgagggctcatgtcgcaggcgtagatggcccgcccgccagcgtggtggttagaaccgcgccagagccggtaggaagggtctcacgccttcagattctgaacgcttcgtccgacgtgcttcggattacatgggtgggggtgaccggcgccacggcctatcggttggcctgggggaggtcagaaggaggccctatgaggcaccagatcctcccaggcaataccgactccgcagagatcagaggactcgagggtggtgtttcatactctgtcagagtcaccgccctggtgggcgatcgagaggggacaccggtaagcatcgtggtgacaaccccacctgaggcaccacctgccctgggcacccttcatgttgttcagcgcggcgaacactctctgcggttgcgctgggaaccagtgccaagggctcaaggttttttgctacactggcaacccgagggaggtcaagaacagtcgcgtgtgctgggaccagaactgagcagttaccacctcgacggactcgagccagcaacccagtatcgcgtcagattatccgttctaggtcctgccggagaaggaccctcagctgaggtaacagccagaacggaatctcctagggtgccaagtattgagctcagggtggtggatacatccatcgattcagtaactctggcctggacacctgtgtcccgcgcaagtagctacatactgtcttggagaccactccgcggaccagggcaggaggtcccaggctctcctcaaacactgcctggtatatccagttcgcagcgtgtcacaggtctggagccaggggtgtcttatatcttttcgcttactccagtcctcgacggcgtgcgcggcccagaagcctctgttactcaaactcctgtttgtcctcggggcctggctgacgtggtgtttctaccacatgcaacgcaagacaatgctcacagggcagaagccactcgaagagtgttggagcgtctggttttggctctcggacctctcgggccccaggccgttcaagtggggctgctttcgtactcacatcgaccgagtcctttgttccccctaaatggtagccacgacctcgggattatcctccagcggataagagacatgccctacatggatcctagcggcaacaatttgggcactgctgtagtcactgcccaccgctacatgctagcgcccgacgcccccggccggagacagcatgtaccaggcgtgatggtgttgctggtggacgagcccttaaggggcgatattttctccccaatccgggaggcccaggcctcaggcttaaacgtcgtcatgctaggaatggcaggagccgacccggaacagctccgtcggctcgcacctgggatggatagcgtgcagacgttcttcgcagtggacgacgggccttccttagatcaggccgtgtctggcctggccaccgcactatgtcaggcttccttcacaacccagccgcgacctgaaccgtgccctgtatactgtcccaagggtcagaagggcgaaccaggcgagatgggattgcggggtcaggtaggcccgcctggtgacccaggtcttccaggccggaccggcgcccctggccctcagggacccccggggtcagcaacagctaaaggcgaacgggggttcccaggagctgatgggcgaccagggagtccaggacgagccggaaaccctggtactccaggcgcccctggcctaaagggaagcccaggcctccccggccccaggggggatccaggggagaggggcccgcggggtccaaagggagaaccaggggcccctggccaggtgattggcggtgagggcccgggattacctgggagaaagggtgatccagggcccagtggtcctcccggccccagaggcccactgggggatccgggccccagaggtcctccagggctccctggaactgctatgaaaggcgacaagggagaccgcggagaacggggaccacccgggcccggcgagggggggatagcccctggcgagccaggtctccctggcctgcccggttccccgggtccccagggacccgttgggcctcccggcaaaaaaggagaaaagggagacagtgaagatggcgcccccgggcttccagggcagccaggatcaccaggggaacagggcccccgtggccctccaggggccatcggaccgaagggagacagggggttccccggaccgctgggggaagccggcgagaagggagagcgaggccccccggggcctgctgggtcccgcggtctccctggcgtggccggcaggcccggagccaaagggcccgaaggtccgccagggcccacaggacgccagggtgagaagggggagcctggaaggccaggcgatcccgccgtggttgggccggccgtggccggtccgaaaggtgagaagggtgatgttggccctgccggaccccgcggggccaccggagtccagggagaaaggggccctcccgggctagtgctgccaggagaccccggccctaaaggggaccccggggatagggggccgattggcctgacgggccgcgctgggcctccgggagactctgggccacccggcgaaaagggagacccaggcagaccaggaccgccaggtcccgttggcccacgagggagagacggcgaggtgggcgagaaaggagatgaagggccacccggcgatcccggattgcccggaaaagcgggcgagagaggtttgcggggggctcctggggttcgcggtcctgtgggggagaagggagaccaaggagatcctggggaagacggccggaatggatcaccagggtcttccggtccaaagggagaccggggagaacctggcccacccgggcccccaggacgactggtggacaccgggcctggtgctagagagaaaggcgagccgggagataggggtcaggaaggtcccagaggccctaagggcgatcccggacttccgggagccccgggtgaacggggcatagagggcttccggggaccaccaggcccccagggagacccaggcgtcagaggccctgccggagaaaagggtgatcgggggccgcccggcctcgacggtaggagcgggctcgacggtaaaccaggggctgccgggccatccggacccaatggtgctgccggtaaagctggtgatcccgggcgagatggcctgcctggactccgtggcgagcaaggtctgcctgggcccagtggcccgcctggcctccctggaaaacctggggaggacggcaaaccgggacttaacggaaagaacggtgaaccgggagatcccggagaagacgggcggaagggtgagaaaggcgactctggagccagtggaagagaaggtagggacggacccaagggagagaggggcgctcccggaattcttggacctcaaggcccacccggcctgccgggacctgttgggcctccgggccagggcttccccggagtgcctgggggaaccggacccaaaggcgaccgaggggagacagggtccaagggagagcagggactcccaggggaaaggggacttcggggcgaacccggatctgtcccaaatgtggaccgactcttagagaccgcagggatcaaagcaagcgctctgcgagaaatcgtggagacctgggatgagagctccggctcgttcctaccagtcccggaaagaaggcgcggcccaaaaggtgacagcggggagcagggcccgcccggaaaagaagggcccataggatttccaggggagcgggggctaaagggggatcggggcgacccggggccacaaggcccacctggcctcgcactcggcgaacgcgggccgcctggcccctctggcctcgcgggggagcccgggaaacccggtatccccggacttcccgggcgcgcagggggtgtgggagaggccggtcgccccggagagcggggcgaacgaggcgagaagggagagagaggcgaacaaggaagggatggacctcctgggttgcccggaacacctggcccacctggccctcccgggccaaaggtatccgtcgacgagcctggtccaggcttgagcggtgagcaggggccccccgggttaaagggggccaaaggtgaacccggttccaacggggaccagggtccgaaaggagaccgtggagtgccggggataaagggggatagaggggaaccagggccaaggggtcaggacgggaaccccggattgcctggcgagcgcggtatggctggacccgaaggaaaaccaggcttacaagggcccaggggaccaccagggccagtggggggtcacggggacccaggtccacccggtgctccgggacttgctggaccagcaggccctcaagggccgagtggcttaaaaggggagccaggcgagacgggcccccccggacgaggactcactgggcctacaggagccgtcggtctccccggccctccaggcccctccgggctggtgggccctcagggcagcccggggcttccaggccaggtaggagagactggtaagccaggcgcaccagggcgcgacggtgcttcaggcaaagacggcgatcgcggtagtcccggggttcccgggagcccaggcttacccggacctgtggggcccaaaggagaacctggcccgactggggcacccggacaagcggtagtgggcctacccggtgccaaaggtgagaagggggcgcccgggggactcgcaggcgacctggtaggagaacctggggccaagggggacagagggctgccggggccccgcggtgagaaaggtgaggccggcagagcaggggagccaggcgacccgggtgaggacgggcagaagggcgcgcccgggcctaagggatttaagggagatcccggagtcggcgtcccgggaagtccgggtccccctggccccccaggggttaagggcgatcttggtctcccaggcctgccaggggcccccggtgtggtggggtttcctggccagactggacctcgcggtgaaatgggtcagcccggtcccagcggcgagcgcggattagccggcccgcctggccgtgagggcatccctgggcctctaggcccaccaggaccaccgggaagcgtcggaccccctggcgcttccgggctgaagggcgacaaaggggaccctggagttgggctccctggaccaaggggagagaggggagagcctgggattcgcggcgaagacggacgtcccgggcaggaagggcctcgtgggctaaccggaccaccgggttctcggggggagcgcggagagaagggtgacgtgggctccgccggcttgaaaggcgataaaggtgactctgcagttatcctcggcccaccaggccctaggggtgccaagggagacatgggggagcgtggccccaggggcctggacggagacaagggcccaagaggggataacggagaccctggagacaaagggtcaaagggagagccaggagataaaggcagtgcaggccttccggggcttagaggactgctgggccctcagggccagcccggtgctgctggcatccctggcgatcctggaagccctggaaaggatggtgttcccggaattcgaggcgagaagggcgatgtggggtttatgggacccagaggtctcaaaggagaacggggggtgaagggggcctgtgggctcgatggagagaagggtgacaaaggggaggctggacctcccggaagacctggcttagccggccacaagggcgagatgggtgaaccgggtgtaccaggccaatctggagcgccggggaaggagggattaattggaccaaagggcgatcgtggattcgatggacagcctggtcctaaaggggaccagggagaaaagggcgaaaggggcactcccggaattggcggatttcccggcccctccggaaatgatggctcagccggccctccagggcctcctggctctgttggacctaggggacctgaggggctgcagggtcagaagggcgaaaggggcccccccggcgaaagggtcgtaggagcacccggagtgccgggcgctcccggcgagcgcggcgaacaagggcgcccgggaccggcggggccaaggggcgagaagggtgaggctgctctcactgaagatgatattagagggttcgttcgccaggaaatgagccagcactgtgcttgccaagggcagtttattgctagtggctcccgcccactgccctcgtacgccgccgacactgcagggtcacagctgcatgccgtccctgttctgagagtctctcacgctgaagaggaagaacgcgttcctcccgaggacgacgagtattctgagtactccgaatattcagtggaagagtatcaagaccccgaagccccctgggacagtgacgatccatgctcgttgcccttagatgaagggagttgtaccgcttatacacttaggtggtatcacagagctgtgaccggtagtacagaagcttgtcatcccttcgtgtacggcggatgtgggggcaacgccaacagatttggaacaagagaggcgtgcgagcgcaggtgcccaccgcgagttgtgcagtcccagggtactggcacagctcaggat

SEQ ID NO: 9558 - DNA, 8832 bp, synthetic construct
  misc_feature 1..8832: note = source = /note="Description of Artificial Sequence: Synthetic coding sequence"
  source 1..8832: mol_type = other DNA
atgaccctgcggcttctggtagccgccctctgcgcgggaatcctcgctgaggctcctcgcgtgcgggcgcagcaccgggaacgggtgacctgcactagactgtacgccgccgacatcgttttcctcctggatgggtcgtcatccatcgggcggtcgaactttagggaggtgcggtcgtttttggaaggccttgtgctgcctttctcaggagcggcatccgcacaaggagtccggtttgctaccgtccagtactcagacgacccaaggaccgagttcggactggacgccctcgggtccggaggagatgttatccgggcgatccgggagctgtcgtacaaaggagggaacactaggacgggagcggcgatcctccatgtggcagaccatgtgttcctgccacaactggctcgccccggagtcccgaaggtgtgtatcctgatcactgacggcaagtcacaggatctggtggataccgccgcacaacggctcaagggacaaggagtgaaactctttgcagtgggaattaagaatgcggatcccgaggaactcaagagagtcgcgtcgcagccaacctcagatttcttcttcttcgtgaatgacttcagcatcctgcgcacgctcctgccactcgtctcgcgccgggtgtgcactactgctgggggcgtgcctgtgacccgcccgccagacgattcaacctcagcacctagggacctggtcctgtcggagccaagctcccagtcgcttagagtgcaatggaccgcagcaagcgggcccgtgactggctataaagtgcaatacaccccgctcacggggctggggcagccactcccgtcggaacggcaagaggtgaacgtgcccgccggagaaaccagcgtgaggctccggggactccgcccactgactgaataccaggtgaccgtgatcgcgctctacgctaattcgattggggaagcggtatcaggaactgccagaaccactgcgttggaaggaccggaattgactatccagaatactactgctcactccctgctggtcgcctggcgcagcgtgcccggtgctactggatacagagtgacttggcgcgtcctttcaggtggccccactcaacagcaggagctgggacccggtcagggatctgtgcttttgcgggatctcgagccgggtaccgactacgaagtcacggtgtcaactctgtttggacgctccgtgggacccgcaacctcgcttatggcacggaccgacgcgtcggtggaacagacccttagaccagttatcttgggcccgacttcaatccttctgtcctggaacctggtgcctgaagcaagggggtaccggctggaatggaggcgcgagactgggctcgaacccccgcagaaagtcgtgctgccgagcgatgtcaccagataccaattggacggactgcagccggggacggagtaccgcctgaccctgtacactctcctggaaggacatgaagttgcaaccccagcgactgttgttcccactggaccagagctcccggtgtcgccggtgactgacctgcaagctactgaattgccgggacagagggttagagtgagctggagccctgtgccaggagccacccaataccgcattatcgtgaggagcacccagggggtggagcgcactctggtgctgccgggctcgcagacggcatttgacctggatgacgtgcaagcaggactctcgtacaccgtcagagtgagcgcgagagtgggccctcgggagggaagcgcgtctgtcctgactgtgcggcgggagcccgaaaccccgctcgccgtgccgggactgcgcgtggtggtcagcgacgcaacgcgggtccgggtggcctggggaccggtgcctggagcctccggattcagaatttcgtggagcaccggctccggacctgagtccagccagaccctccctccggactcaacggccaccgatatcacgggactgcaacccggcaccacgtaccaggtggcggtgtccgtactgcgaggtagagaagaaggaccggcggcagtgatcgtggctcgcaccgacccgctgggaccggtgcgcaccgtccatgtgacccaagcctcgtcgtcatccgtgacgatcacttggacgcgggtgccgggcgcgaccggatatcgggtgtcctggcattcggctcacggtccagagaagagccagctcgtgagcggtgaggccaccgttgccgaactggatggcttggagccagatactgagtatactgttcatgtgagagcccacgtggctggcgtggatgggcctccggctagtgtggtggtgcgcaccgcaccagagccggtaggccgcgtgtcaaggctgcaaatactgaacgcgtcctccgacgtccttcggattacttgggtcggagtgactggagcgaccgcctaccggctggcttgggggcgctcggaggggggccctatgagacatcaaatactgccgggaaacaccgatagcgcagaaatccgcggcttggagggcggcgtgtcgtacagcgtgcgggtcaccgcgctcgtgggagatcgcgaggggactccagtctcgatcgtggtgacgactccacccgaggccccgccagccctgggcactctgcatgttgtgcagcgcggtgagcactcgctgcgcctgagatgggagcccgtcccgagagctcagggatttctgttgcattggcagcctgaaggaggccaggaacaatccagagtcctgggtcctgagctgtcatcgtaccacctggacggcctggaaccggcgacccagtatcgggtgaggctgtcagtgctgggcccggcgggagagggacctagcgccgaggtgaccgcccgaacggagagccctcgggtgccctcaatcgaactgagagtcgtcgatacctcaatcgatagcgtcactctggcatggactcctgtgtcaagagcaagctcctacatcttgtcctggcgcccgctgcgcggaccaggacaggaagtgcccggatcgccacaaacgctgccaggaatttcctcctcacaacgggttactgggctggagccaggagtgtcatacatcttctcgttgaccccggtgctcgacggcgtcaggggccccgaggcatcagtgacccagaccccggtctgccctcgcggccttgcggacgtggtgttcctcccgcatgcgactcaagacaacgcccaccgcgccgaggcgaccagaagagtgctggagaggcttgtgttggcgctgggcccacttggcccacaggcagtgcaagttggactgctctcgtactcccatagaccttcgcctctgttcccactgaacggatcgcacgatctcggaatcatcctgcaacggatccgcgacatgccctatatggatccttccggaaacaaccttggtactgcggtggtgaccgctcatcggtacatgctcgcacctgatgctcctgggcggcgccaacatgtcccgggagtcatggtgctgctcgtggacgaaccgctcagaggcgatatcttcagcccgatccgagaagcccaggccagcggtctgaacgtggtgatgttgggaatggcgggtgccgatccggaacagctccgcagactggccccaggaatggactccgtgcaaaccttttttgccgtggatgatgggccttcactggatcaagccgtctcgggcttggcgaccgcgctctgccaggcttctttcacgacccagccacggcctgagccgtgccctgtgtactgccccaagggccagaaaggagaaccgggggagatgggcctcagaggccaagtgggaccgcctggagatccaggcctgccaggacggaccggcgcgccaggtcctcaggggcctccgggttcggcgactgccaagggagaacggggattccccggagcagatggccgcccgggatcaccagggagagctggaaacccgggaactccgggcgccccagggctcaagggctcaccggggcttccaggtccgcgtggtgaccccggtgaacggggaccaagagggcccaagggagaaccgggagcaccaggccaggtcatcggaggggagggacccgggctgccgggacggaagggtgacccaggaccgtcgggcccgcctggaccgcgaggacctttgggagatccaggaccgcggggcccgcccggattgccggggactgcaatgaagggtgacaagggggaccgcggagaacgcgggcctccgggacctggagagggagggatcgccccaggagaacctggactgccgggactgccgggaagcccgggtccgcagggcccggtgggaccgccaggaaagaagggagaaaagggcgattcagaagatggggccccagggctgccgggacaacccggctccccgggagaacagggaccacgcggaccccccggtgcgatcggacctaagggggatcggggattccccggaccgttgggagaggcgggagagaagggggaaagagggccgccgggccctgcgggaagcaggggactgccgggagtcgccggcaggccgggggcgaagggcccggagggacctccgggacctaccggacggcaaggcgaaaagggcgaaccggggcggccgggggaccccgccgtggtcggccctgcggtggctggcccgaagggcgaaaagggagatgtcggaccggccggcccaaggggggcgaccggcgtgcagggcgaacgcgggcctccggggctggtcctgccgggagatccaggaccgaaaggagatccgggcgaccgggggccaattggactgaccggacgggccggacctccgggagattccggcccaccgggagagaaaggggacccggggaggccgggccctccaggccctgtgggaccacgcggacgggacggggaggtcggcgagaagggcgacgaggggcctccaggggatccgggtctgcctggaaaggctggagaacggggcctgaggggcgctcctggagtccggggtccagtgggtgagaagggagatcagggggacccgggcgaagatggcagaaacggatcgcctggctcctcaggaccgaagggagatcgcggagagccggggccaccaggaccaccgggcagactcgtggacactggcccgggcgctcgggaaaagggagagcctggagatcggggacaagagggacctcggggacccaagggggacccgggactccctggggctccgggtgagcggggaattgaaggattcagaggaccacccggacctcagggcgatccaggagtgagaggaccggctggagaaaagggcgaccggggaccgccggggctcgacggccgctcaggactcgatgggaagcctggagcggccggcccgagcggcccaaatggtgcggctggaaaggcgggggaccctgggcgggacggtctgccgggattgagaggagaacagggcttgcctggtccgtcgggccctcccggtctgccgggcaaaccgggagaggatgggaagcccgggctcaatggaaagaacggcgagccaggtgaccctggcgaggacggacgcaagggtgaaaaaggagactccggtgcctccgggcgggagggtcgcgatggccccaaaggagaacgcggagcacctgggatcctgggcccacagggccctccaggtctgccaggtccggtcggccccccaggacaggggttccctggagttccgggagggaccggtccgaagggagataggggcgagactggctccaagggagagcagggactgcccggcgagcgcggtctgcgcggtgagccaggatcagtcccgaatgtggacagactcctcgaaaccgccggaatcaaggcatcagcgttgcgcgagatcgtcgagacgtgggatgagtcctcgggatcctttctcccggtcccggaacggcgccgagggccaaagggtgactctggagaacaggggccgccgggcaaagaaggaccgatcgggttccccggtgagcgcggcctgaagggtgaccggggagatcccggaccgcagggcccaccgggactcgccctgggagagagaggacctcccggaccgagcggactcgcaggggaaccgggaaagccaggaattcctggtctgcctggccgcgcgggaggagttggcgaagctggcaggccgggagaacggggagaacgaggcgagaagggtgagcgcggtgaacaaggacgcgacggaccgccaggcctccccggcaccccagggccacccggaccaccgggaccgaaggtgtctgtggacgaaccgggtccaggactgtccggagagcaaggtccgccgggactgaagggcgccaagggtgaacctggaagcaacggagatcagggccccaaaggagatcggggagtcccgggaatcaagggtgaccggggcgaaccaggcccacgggggcaggatggaaaccccggtctgccgggtgaaagagggatggccgggcctgaaggcaaaccgggactgcagggaccacggggccccccaggccctgtcgggggtcatggagatccagggcctccgggcgccccgggactcgcaggaccagctgggccccagggtcctagcggactcaagggcgagcccggagaaaccggaccaccgggccgcgggctcactggcccgaccggagcggtgggacttcccggaccgccgggaccgtccggactggtgggaccgcagggatcccccggactcccgggacaggtcggtgaaaccggaaagccaggagctcctggacgggacggagcttcaggaaaggacggtgaccgcggatccccgggcgtccctggaagcccaggattgcctggacccgtggggccgaagggcgaaccgggacccactggcgcgccgggccaggcggtcgtcggcctcccaggagccaagggagagaaaggagcgccgggcggactggccggggacctggtgggcgaaccgggcgctaagggagatcgcggcctcccaggtccgaggggagagaaaggagaagcaggacgcgcaggcgaaccgggcgaccctggagaggacggccagaaaggagcaccgggtccgaaaggtttcaaaggggacccaggtgtgggagtcccagggtcaccgggcccccctggaccgccaggagtcaagggggatctgggactgccaggcctgccgggagcgcccggagtggtgggtttcccgggacagactggccctagaggagaaatgggccagccgggcccatccggagaacgcggactggccggccctccaggacgcgaaggaattccaggaccgctcggtcctcctggcccacctggatcagtcggcccgccgggagcttcaggtcttaagggggataagggagatccaggggtgggcctcccgggaccgagaggagaaaggggcgagcctgggattcgcggcgaggacggccgccccgggcaggagggtcctagaggactgactggcccaccgggatcccgcggagaacgcggagagaaaggcgacgtgggatcggccggactgaaaggggacaaaggcgactcggccgtcatcttgggtcctccaggtccgcgcggggccaaaggagacatgggggaaagaggtccacgcggtctggacggagacaagggccccagaggagataacggggacccgggagataagggatcgaagggagagcctggggacaagggctccgccggactgccaggactccgaggactgctgggacctcagggccagccgggagccgccggaatcccaggagatcccggttccccgggcaaggacggagtccctggaatcagaggtgagaagggagacgtgggctttatgggcccacggggcctgaagggagaacgcggagtgaagggtgcgtgcggacttgatggcgaaaaaggagacaagggagaagccgggccgcctggacgcccgggactcgctgggcacaaaggcgaaatgggagagccaggcgtgccgggtcagtccggagctccgggtaaggaaggcttgatcggacccaagggagacagaggcttcgatggccagcccggacccaagggggatcagggagaaaagggagagagaggaactcccggaatcggaggatttcccggtccatctgggaatgacggctcggctggaccgcccggaccgcctggttccgtggggccgcgtgggccggaaggactgcagggacaaaagggcgaaagagggccgccgggagaaagagtggtgggagctccgggggtgccgggagcccctggagaacgcggggaacagggacggccaggcccagcgggcccacggggcgaaaaaggagaggcagcgctgactgaagatgacattcgcgggtttgtcagacaagaaatgtcacaacattgcgcatgccaagggcaattcatcgcctccggctcgcgcccgctgccgtcctacgcggcggacaccgcaggatcgcagcttcacgcagtgccggtgcttagagtctcgcatgctgaggaagaagagcgtgtgcctccagaggacgacgagtattccgaatactcagaatactcagtggaggagtaccaagatcctgaggcgccgtgggattccgacgacccatgcagcctgcccctggatgaaggatcgtgtaccgcgtacaccctccggtggtatcacagagccgtgaccggatcgacggaggcgtgccatccctttgtgtacgggggttgtggcggtaacgcaaatcgttttggtaccagagaggcgtgcgaaagacgctgccccccaagagtggtccagtcgcagggaactggaacggcacaagat

SEQ ID NO: 9559 - DNA, 8832 bp, synthetic construct
  misc_feature 1..8832: note = source = /note="Description of Artificial Sequence: Synthetic coding sequence"
  source 1..8832: mol_type = other DNA
atgacactacgactactcgtcgcagctctgtgcgccgggatactggccgaggctcctagggttagagcacagcaccgagaaagagtaacatgtacccgactgtacgccgctgacattgtgttcctcctagatggctctagctcaattgggagatctaattttcgagaggtgcgcagcttccttgagggcctggtattaccttttagcggagcagcctccgctcagggagtgcggttcgccactgtgcagtattctgatgaccctaggactgaatttggcctcgacgcactgggctctggcggagacgtgatccgggcaattcgcgagctgtcatataaggggggcaatacacgaaccggggccgccatcctgcatgtagccgatcatgtgttcttacctcagcttgcccgtccaggggtgccaaaagtgtgcatactaatcacagacgggaaaagccaggatctggtggacacagctgcacagcgcctcaaggggcagggcgtaaagctgttcgcagttgggataaagaacgccgaccctgaggagctcaagcgcgtcgccagccagcccacctctgactttttcttcttcgttaacgacttctccattttgcggactttactccctctggtgtcacggagggtgtgcacaacagcaggcggcgtccccgtgacccgacccccagacgattccactagtgcccctagagacctagtgctcagcgaaccctcctctcagtctttgcgagtgcaatggactgctgctagtggccctgtgacagggtacaaagttcagtacacccccttaactggcctgggacaacctctgccatcagagagacaagaggtcaacgtccccgccggcgaaacctcagtgcgactgcgaggcctgcgacccctgacagagtaccaggtgaccgtgatcgctctttacgccaactccataggtgaggccgtgtctggcaccgccaggactactgctctcgaagggcccgaactgactatccagaatactaccgcacattctctgctggtagcatggcgctctgttcctggcgccacaggttatagagtgacctggcgcgtcctgtccggcggacccacccagcagcaggagctggggcctggccagggttctgtcctgctgcgtgatctagagcctgggaccgattacgaagtgacagttagtaccctgttcggacggtccgtcggacctgcaacctctctcatggcccggactgacgcatccgtggaacaaaccctgcgcccagtgatcctgggcccaacttccatcctcctgagttggaacctcgtgcctgaagcccgcggataccggttagagtggaggcgcgaaaccgggctcgagccaccacagaaggtcgtgctcccatctgatgttaccaggtaccagctggatggactccagccagggacagagtaccgactgaccctgtacactttgctagaggggcacgaggttgcaacccctgcaaccgtagtgccaactggacccgaactgcctgtttctccagtgactgatttacaggctacagagctcccaggccagcgcgtccgggtcagctggagtcccgttccaggggccactcaatatcggataatcgtaaggtccacccagggtgtggagagaacactcgttctgcctggcagccagaccgcttttgacctggacgatgtgcaggccggcttaagttataccgttagggtgtccgctcgggtgggacctagggaaggcagtgcttccgtgctgactgtgaggcgcgagcctgagacccctctggccgtgccaggtttacgagtggttgtttccgacgccaccagagtgagggtggcctgggggccagtgcctggcgcttccgggttccgaatcagttggtccaccggctccgggcctgaaagctctcaaaccctgcctcctgatagtactgctaccgatattacaggcctgcaacccggcacaacttaccaggttgctgttagcgtgctgcgtggtcgcgaagagggaccagccgcagtgatcgtggcacgcaccgaccctttggggcccgtcagaaccgtacacgtgactcaggcaagttcaagttctgtcaccatcacatggactagggtgccaggagccactgggtacagagtctcatggcatagcgctcatgggcccgagaaatcccagctcgtgtccggcgaagctacagtggctgaactcgacggattagaaccagacaccgagtataccgtgcacgtccgagcccacgtcgctggagtcgatggcccccctgcctctgtggttgtcagaactgctcccgagcctgtgggcagagttagccgcctgcagattctcaacgccagctccgatgtgctgcgcatcacatgggtgggcgtcactggcgctaccgcatatcgcttggcatgggggcgttccgagggaggacctatgcgacatcagatactgccaggcaatactgattccgcagaaataagaggtctagaaggcggcgtatcttactctgttcgagtgaccgctctcgttggagatagagaaggaactcccgtgtctattgtggtgaccaccccacccgaagctccaccagcactcggcactctgcatgtcgtccagcggggcgagcacagcctgcgtttacgctgggaacccgtgccaagagcccagggcttcctgcttcactggcagcctgagggcgggcaggaacaatcacgcgtcctgggacccgaactttcttcctaccatttggacggtctggagcccgccacccagtacagggttaggctgtccgtgctggggccagccggcgaaggcccatccgccgaggttacagcccgcacagaatcccccagggtcccctcaattgaactgcgtgtcgtcgacacaagtattgacagcgtcaccctcgcatggactccagtgagcagggcatctagctatatcctgagttggaggcccctccgtgggcccggacaagaggtgccaggcagccctcaaaccctgccaggaatatccagcagtcagcgggttacaggtctggagccaggggtgagctacatcttctccctgacccctgttctggatggtgtgaggggacccgaggccagcgtgacccagactcctgtttgtccacgcggtctagctgacgtggtgttcctgccccacgccactcaagataacgcacaccgagctgaggcaactagaagggttctagagagactcgtgctggctttgggaccacttggcccacaggctgttcaggtcggcttactgtcctattcccatagacctagcccactgtttccactcaatggctctcacgatctgggcataatccttcagcgcattagggatatgccctatatggatccaagcgggaacaaccttggaacagctgttgtgaccgctcaccggtacatgcttgcccccgatgctcccgggcgccgtcagcacgtccctggtgttatggtgcttctggtagacgagcctctccgcggagatattttttcacccatccgggaggctcaagcaagcggtctgaatgtggtcatgctgggcatggctggtgccgatcctgaacaactgcggcgactggcccccggaatggattccgttcagaccttcttcgccgtggacgacggcccatctctagaccaggcagtcagcggcctggccaccgctctctgtcaggcaagctttacaacacagccacggccagagccttgccctgtgtattgtccaaaagggcagaagggcgagcctggagaaatgggccttcggggccaggtgggcccccccggcgatcccggcctgccaggccgcactggtgccccgggcccacagggcccccccggaagcgctacagccaaaggtgagcggggctttcccggggcagacggaagaccagggtcccccggccgcgctggtaatcctggaacacccggtgctcccgggctaaaaggctcccctggactgcctggcccacggggagatcccggagaacggggacctcgcggccctaaaggggagcccggcgcacctggccaggtgattggcggggagggccccggcttgccaggccgcaagggagatcctgggccttctggtccccccggccccagaggcccactgggtgatccagggcctagaggaccacccggtcttcctggaactgccatgaagggagacaagggggacagaggcgagagaggcccaccaggccctggagagggcggaatcgctcctggggagcctggccttcctggattacccggatctccagggccccaggggcctgtggggccacctgggaagaaaggagagaagggagactccgaggacggcgctcccgggctgcctggccagccagggtccccaggcgagcagggtccacggggcccacctggagcaattgggccaaagggagatagaggtttcccagggccactgggcgaggccggtgaaaaaggcgaacgtgggcccccaggccccgctggttctagaggccttcccggggtagccgggaggccaggggccaagggtcctgagggcccacccggccctaccggcaggcagggcgagaagggggaacccgggcgacccggagacccagccgtggtgggccctgcagtggcaggcccaaagggtgagaagggcgacgtggggcccgctggacctcgaggagctaccggcgtgcaaggggaaaggggacctcccggcttagttttacccggggatccaggccccaaaggagacccaggcgacaggggcccaatcggtctgaccggcagggctggcccacctggcgatagtggaccaccaggggagaagggggacccaggtcgccctgggcccccaggccccgttggccctcggggacgggacggggaagtcggcgagaagggcgacgaaggcccccctggcgaccccggtctgccaggtaaggccggcgagcgcggtttgcgaggggctcccggtgtacggggacctgttggggaaaaaggggaccagggtgaccccggcgaggacggacgcaatggcagccctggctcatctggcccaaaaggggacagaggggagccaggccctccaggcccaccagggcgtctggtcgatacaggcccaggcgcccgggagaagggagaacctggggataggggacaggaaggacctaggggccctaagggcgatcctggcctccctggggctcctggggagaggggcatcgaggggttcaggggccctcctggcccccaaggcgacccaggcgtgcgaggccctgccggagagaagggcgacaggggccctcccggcctagacggccggtctggattggatggtaaacccggcgccgccggccccagtggacctaacggcgcagctgggaaggcaggcgatcccgggcgagacgggcttcctggcctgcggggcgaacaggggctaccaggcccatctggtccccccggtctgcccggcaaaccaggggaggacggcaagcctggtttaaatggcaaaaatggagagcctggcgatcctggagaggacggtcgcaagggggaaaagggcgatagcggggcctctggaagagaaggccgagacgggcccaaaggcgaacgcggcgcccctggaatcttaggtcctcagggcccacccggcctcccaggcccagtggggccacctggtcagggatttccaggcgtgcctggcggaacagggcccaagggtgacagaggtgagaccggctctaagggcgagcagggtttgcccggggaacgaggattgcgtggcgagcctggttctgtccctaatgtggatagactcctagagaccgccgggatcaaggccagcgccctaagagagatcgtagaaacatgggatgaaagtagcggttcctttctgcccgtgcctgaacggagacgagggcccaaaggggactccggggaacagggaccccctggaaaggagggtcccataggattccctggagagagagggctaaagggggatcgaggggatcccggccctcaaggaccacccgggttggctctgggcgagagaggcccaccaggccccagtgggctcgctggagagcctggcaagcctgggattcctgggcttccaggacgtgcagggggtgtcggcgaagccgggcgtcctggcgagaggggagagaggggagagaaaggagagagaggcgagcagggccgggacgggcctccaggcctccctgggacacccgggccccctggaccacctggcccaaaagtgtccgtggatgagcctgggcccggtctcagcggggagcagggcccacctggcctgaaaggggccaagggtgagcccggctctaacggagaccagggccctaaaggcgaccggggcgtgccaggcattaagggagacaggggcgaaccaggaccccgcggtcaggacggcaaccccggcctgcccggtgagagagggatggcagggccagagggaaaacctggcctgcaagggccccgtggccctcccggccccgtcgggggtcatggggacccaggccccccaggggcccccgggctcgctgggccagccggaccacaggggccaagcggcctgaagggcgaacctggtgagactggaccacccggccggggcttaaccggaccaacaggcgcagttggtctgccaggccccccaggcccctctgggctggtgggtccacagggatcacctggcctgcccggccaggtgggagaaactggaaagccaggcgctccagggcgggacggggctagtggcaaagatggcgatagaggctctcctggcgtccctggctctcccggcctgccaggaccggtcggcccaaaaggagaacccggccctactggggcaccaggccaggccgtggttggattacctggagctaagggagagaagggcgcacccggcggcctggccggcgacctggtgggagagccaggcgcaaagggcgacaggggattgccaggcccacgcggcgagaagggagaagctgggcgcgccggggagcccggggaccctggcgaggacggacagaagggcgccccaggacccaagggattcaagggtgatcccggcgttggcgtgccaggttccccaggcccaccaggccctcccggcgttaagggcgatctgggactgcccgggctgcccggcgcccccggggtggttggcttcccaggccaaacaggcccccgcggtgagatgggacagccagggccttctggggagcgtggcctagccgggccaccaggcagagaggggataccaggccccctcggccccccaggtcctccagggtccgttgggcctccaggggccagcgggctcaaaggagacaagggcgatccaggggtaggactgcctggtcctcgcggcgagaggggcgaacctggaatcaggggcgaggacggcaggcccggccaggagggccctaggggcttgactgggccccccggctctaggggggagcgtggcgagaaaggggacgtcgggtcagctggattaaaaggagacaaaggggactccgcagtcatcctgggtccccctggaccacggggggccaagggcgacatgggagagagaggcccaagaggcttagatggcgacaagggacccagaggggacaacggggacccaggtgataaaggttccaagggcgaacccggcgataagggatcagctggcctacctggcctccgagggctgctggggccccagggccagccgggagctgccgggatacccggcgacccagggtctcctgggaaagatggggtgcctggtattagaggcgagaagggcgacgttggtttcatgggtcccaggggattgaagggagaaaggggcgttaagggagcctgtggactggatggcgaaaagggagataaaggggaggcaggccctcccggcaggcctggtcttgccggacataaaggggaaatgggggaacctggggtgcctgggcaaagcggggctcctggaaaagagggcctcattggccccaaaggggacaggggctttgatgggcagcccggcccaaagggggaccagggtgagaaaggtgaacggggcacacccgggatcggtgggtttccagggccttctggtaatgatggcagtgctggtcctccaggcccccccgggtcagtgggcccacgtggacccgagggcctccagggacagaagggagagcggggacctcccggcgagagagtggtgggggctcctggggttccaggcgcccccggcgagcgcggcgaacagggccgacctggaccagctggtcccaggggcgagaaaggagaagccgctctcaccgaagatgacattaggggcttcgtgcgccaggagatgagccagcattgcgcctgtcagggccagttcatcgccagcgggtctaggcctctgccctcttacgccgccgatactgccggctctcaactgcacgcagtgcctgtgctccgcgtgtctcacgcagaagaagaagagagggtgccccctgaggacgatgagtattctgaatatagcgagtatagcgtggaggagtatcaagatcccgaggcaccctgggattcagacgacccctgttctctgcctctggatgaaggctcttgtaccgcatacacactgaggtggtaccacagagccgtgactggttcaactgaggcctgccatccatttgtgtatggagggtgcggtggtaatgcaaaccgtttcggaactagggaggcctgtgagcgccgttgtccccctagggtcgtacagtcccagggtaccggcaccgcccaggat

SEQ ID NO: 9560 - DNA, 8832 bp, synthetic construct
  misc_feature 1..8832: note = source = /note="Description of Artificial Sequence: Synthetic coding sequence"
  source 1..8832: mol_type = other DNA
atgaccctgcgattgctagtcgccgccctctgtgcaggtatcctagccgaggcaccgcgtgttcgggctcaacacagggagagagtgacgtgtacgagactctacgctgctgacatcgttttcctcctggatgggagcagttccattggccgtagtaattttagagaggtgcgaagcttcttagaaggtctcgttcttccattcagcggagctgcctctgctcagggagtgagatttgctactgtccagtattccgacgatccccggacggagttcggactagatgccctaggttcaggcggcgacgtgattagggctatccgggagttgagttacaagggaggaaacactcgcaccggagccgcgatattacatgtggccgaccacgtctttctcccacaactagcccggccaggcgttcccaaggtttgcattctcatcaccgacgggaagtctcaggaccttgtggataccgccgcacagcgcctgaaaggacaaggtgtgaaactgtttgccgtcggcattaagaacgccgacccagaagagttaaaacgagttgcaagccagccgacttccgacttttttttttttgttaacgatttttcgattctcaggacactcctcccattggtgagtaggagagtgtgcactactgccggcggtgtccccgtaaccagaccccccgatgatagtacaagcgccccccgagatctcgtactgtctgagccctcaagccaatccttgagagtgcaatggaccgccgcatcagggcccgtgacaggttacaaggtccagtacactccactgaccggcttgggacagcctctcccctcagagcgccaggaggtgaatgtccccgcaggggaaacatctgttcgcctgagaggccttcggcccctcacagaatatcaggtgacagtgatcgctttgtatgccaactccatcggcgaggcagtcagcggcacggctcgaacaactgctctcgagggtccggagttgacaattcagaacactacagctcattcccttctggtcgcctggagatctgtgccaggagctactggttatcgggtgacctggagagtcctttctggcggacccacacagcagcaggagttggggccaggccaggggtccgtgctcctgcgcgacctggaaccagggactgattatgaggtcaccgtctccaccttgtttggcaggtccgttggtccagccacctctttaatggccagaacagacgctagtgtggaacagaccctccgaccagtgattctaggcccaacctcaatcctgctcagctggaacctcgttcccgaagcaagaggatacaggttagaatggcggagggagacagggttggaaccgccccagaaggtggtccttccttcagacgtcacacggtatcagctggatggactgcagccggggactgaatataggcttactttgtacactctgctggagggccacgaagtagctacaccggccactgtcgtgccaactggccccgaattaccagtgagtcccgtcaccgatctccaggctactgagctgccaggccagcgagtccgggtgtcctggagccctgtacccggggccacacagtatcgcataatcgtacggagtacacagggcgttgaacggaccctggtactccctgggtcgcagacagcttttgatctggacgatgtgcaggccggccttagctatactgttcgcgtatccgctcgcgtagggccgagggaaggctcagcttccgtgctaacggtcagacgagaacccgaaacacccctcgcagtgcctggactgcgcgtggttgtgagtgatgctacccgagtccgagtggcatggggaccagtgcctggcgcatccggctttagaatatcatggtccactggatctggcccagagagcagtcagactcttcctcccgacagcaccgccacagatattactgggctgcagcccggaacaacctatcaggtcgcagtgtcagttctccgtggccgagaagagggaccagcagcagtgattgtagcgcgtacagacccgctgggtcctgtacggactgtccacgtgacccaggccagttcatcctccgtcaccatcacatggacacgcgtgccaggggcgacaggttatagagtctcatggcactccgcacacggccctgaaaaatctcaactggttagtggcgaagccacagtcgctgagctcgacgggctggagcccgacacggagtacactgttcacgttcgcgcacatgtggcaggagttgatggcccacctgcgtctgttgtcgtgagaacggcgccagaacccgtggggagggtatctcggctgcagatcctgaacgcttcctccgatgttctgcggattacctgggtaggcgtgacgggagcaactgcttatcgactggcctggggtcgctcagagggcggcccaatgcggcatcagattttgccaggcaacacagatagcgcggagatccggggcttggagggcggcgtgtcttacagtgtgcgggtgacagcactggtgggcgaccgcgagggcacaccagttagcatagtagtgaccacgccccctgaagcccccccagccctaggcacgttacacgtcgtgcagaggggcgaacactccctgcgcttacggtgggagccagtgcctagagcccaaggcttcctgctccattggcagccagagggagggcaagaacagtcgcgcgttctgggaccagagctcagctcttatcacctggacggcttggagcctgcaactcagtatcgggttaggttgtccgtactggggcctgctggcgagggaccctctgcagaggtgactgctaggacggagtctcccagggtcccatctatcgaactccgagtcgtggacacatccatagattccgtgactctggcatggactccggtgtctcgcgcaagctcttacattttgtcctggcgaccattgagaggcccgggccaggaggtacccggatctccacagactctgcccgggatatcaagctcccagcgtgtgaccggtttggagccaggtgtaagttatatcttctctctgactcccgtccttgatggcgttcgagggcccgaggctagcgtgacacagaccccggtgtgccctagggggctggccgacgtagtgttcctgccccacgccactcaagacaatgcccatcgcgccgaagccacacgaagggtgctggaacggctggttttggctttaggacccttaggtccacaggcagtccaggtggggttgttgagctacagccaccgcccttccccgttgtttcccctcaacgggagccatgatctcgggattattctgcagagaatacgggacatgccttatatggatccttctggcaacaatctcggaacggccgtcgtgactgcccaccgatacatgctggctcctgacgctcctggaaggcgccagcacgtccctggcgtaatggtcttactggtggatgagcctcttcgcggcgatatcttttcccccattagggaagcgcaggcctcagggctgaacgtggtgatgttgggcatggctggggcagatccagagcagctgcgcagactcgcccccgggatggacagcgttcagaccttcttcgctgtcgatgacggaccttcccttgaccaggctgtcagtggcttagccaccgctctgtgtcaagcatcatttactacgcagccgcggcccgaaccgtgtccagtatattgccccaaaggacagaaaggcgaacccggtgagatggggctgagaggacaagtcggtcctcccggcgatcccggattgcctggtagaactggggctcccggaccccagggacctccagggagcgcaacagctaaaggtgaacgaggcttccccggggccgacggcagaccaggcagccctggacgagcaggcaatcctggtacacccggcgcccccggcttgaaagggagccctggtctgccgggaccgagaggtgacccgggtgagaggggcccacggggccccaaaggggagcccggcgcccctgggcaggttattggcggcgaaggacccggcctgcctggaagaaaaggggatcccggcccgagcggccctcccggaccccgggggcccctcggtgatcctggccctaggggaccgccgggactgccagggaccgcaatgaagggggataaaggagataggggagaacgcgggcctcccggtcccggggagggcggcattgcccctggtgaacctggactgcctggcctgccaggctcccccggaccacagggccccgtgggcccccctggcaaaaaaggcgaaaagggcgatagtgaagatggcgctccaggactccccggccagcccgggtcgcctggcgaacagggcccacgaggaccccccggcgctattggcccaaagggcgatcgcgggtttccaggcccactcggcgaggccggcgagaagggtgagcggggtccacccggccctgcaggatcccggggattgccgggcgtggccggccgacctggggctaaaggcccagaggggccccctggccccaccgggcggcagggtgagaagggggagcctggacggcccggtgatcccgcggttgtcgggccggccgtcgccggaccaaagggagaaaagggagacgtcggacctgccggtcctagaggcgctaccggcgtgcaaggagaaagaggaccaccgggcctagtcctgcccggtgatcctggacccaaaggagatccaggggatagaggccccataggcctcaccggcagagctggcccaccaggggattcgggtcccccaggggaaaagggggaccccggccggcctggacctcctggtcctgtaggtccccgtgggcgcgatggagaagtcggcgaaaaaggcgacgaaggtccacccggtgacccgggccttcctggaaaagcgggcgaaagagggctgaggggagcccccggtgtacgaggaccagtgggggaaaaaggagaccagggagacccaggcgaggacgggcggaatgggtcacctggttcctctggccccaaaggagatcgtggtgagccaggaccacccggtccacccggccggttggtggacacaggccccggagctcgagagaagggcgaacccggcgataggggacaggaaggtccccgtgggcccaaaggcgatcccggccttcctggggcccctggggagcgtggtatcgaaggattccgcggcccccctggcccacagggcgatccaggcgtccgggggcctgctggcgaaaaaggcgaccggggccctccagggcttgacggtcgctcggggctggacggcaagcccggagccgcggggccctcaggaccaaatggcgccgcaggtaaggccggcgatcccggcagggatggactgccaggtctgcgaggagagcaggggctgccagggccttctggtccgcctgggctcccaggcaagcccggggaagacgggaagcctggcctgaacggcaaaaacggggagccgggcgaccccggagaagatggcagaaagggcgagaagggagattccggagctagtggccgagagggaagggatggcccgaaaggggaacgaggcgcacctgggattcttggcccacaggggccaccgggattgcccggacccgtaggcccacccgggcagggttttccaggcgtcccagggggcaccggacctaagggggacagaggggaaacaggctctaagggtgaacagggcttacccggcgagaggggacttagaggagaaccaggatctgtccccaacgtcgaccgcctgcttgagaccgcggggattaaggctagcgccctcagagaaattgtggaaacatgggacgagtcttctggcagtttcctgcccgtccccgaacgccgaagaggccctaaaggggattcgggcgagcagggccctcccggaaaggaagggccaattggcttccccggggagagaggactcaaaggagaccggggtgatcccggcccccaaggcccccctgggctggcactcggtgaacggggcccacccggaccctcagggctcgccggcgaacccggaaagcccggtatacctggcctgccagggcgggccggtggagtgggcgaagctgggaggcccggagaaagaggggagagaggcgagaagggggaacgcggggagcagggccgggacgggccgccaggactgccaggaacaccaggacctccagggcctccagggccaaaagtctccgtcgacgaacccggaccaggattgtccggagagcagggccccccagggttaaagggggcaaaaggagagcccgggagcaatggggaccaagggccgaagggggataggggcgttccaggcatcaaaggggacaggggggagccaggtccccgcgggcaggatgggaaccctggcctgcccggcgaacgggggatggcaggaccggaaggcaaacctggccttcagggtcctcgtggaccacctggacccgtgggagggcacggcgaccccggaccgcctggagcccctggactggccggccccgctggtccacaggggccgtccggcttgaaaggagagcctggtgaaacgggaccgcctggccgtggactgaccggtccaaccggggctgttggactgcctggacccccgggaccctcgggacttgtcggccctcagggctccccgggtctgcctggtcaggttggagagacaggcaagccaggggcccctggtagagacggggccagcggtaaagatggggacagagggtcacctggggttccaggctcccctggcttaccggggcccgttggccctaagggagaacccggcccaacaggagcaccggggcaggctgttgtaggccttcccggcgcaaaaggggagaaaggcgcccccgggggacttgccggagacttggtgggagaacctggcgcaaagggagatcgcggtctgcccggcccacggggcgagaaaggcgaggctggccgagcaggggaacccggggatccaggggaggatggtcagaagggtgcgccaggcccgaagggatttaaaggggatccaggagtaggagtgcccggaagcccaggaccaccagggccgcccggcgtgaaaggggacctcggtctccccggccttcccggagcccctggggtcgtgggttttcccggacagactggccccagaggggaaatgggtcagcctggtcccagcggcgagagaggcctggccggaccaccgggacgagaggggatcccaggccctcttggacccccaggcccacctggtagcgtcggcccgcctggcgcttctgggctgaagggagacaagggggatcccggcgtggggttgccaggcccccgcggcgagcgaggcgagcctgggattcgcggcgaagacgggcgacctggccaagaaggacctcgtggactcactggacccccgggtagcaggggagaacggggggaaaagggcgatgtggggagcgctgggctgaagggtgataaaggcgacagcgctgtcattctgggaccaccggggcccaggggcgctaagggcgacatgggggagagaggcccgcgcggtctggatggtgataaaggaccgaggggcgataatggcgaccctggcgacaaaggaagtaagggtgaaccaggcgacaagggatctgcgggtttacccggtcttcgtggcttgttagggcctcaagggcagcctggtgccgccggcatccctggcgatcctggatcccctggtaaggacggtgtgccgggcattaggggagagaagggagatgttgggttcatgggcccccggggcctgaagggggaaaggggcgtgaagggagcctgtggcctggatggcgagaaaggcgataagggagaggcaggcccgccaggtcgtcctgggctcgcgggccataaaggagaaatgggagaaccaggcgtccccggccagtcaggagcaccaggcaaggagggcttgataggccctaaaggggaccgcgggtttgatggacagcccgggccaaagggcgaccaaggggagaagggtgagagaggtactccagggatcggtggctttccaggacccagcgggaatgatggatccgctggcccccccggccctccgggctccgtgggccccaggggacctgaaggtctgcagggacagaagggggagaggggcccgccaggcgaacgggttgtcggagctccaggagtgcccggagcccccggagagcgtggcgagcaggggcggcctggcccagccggaccccggggggaaaagggggaagcagctctgactgaagacgatatcaggggttttgtgcgccaggagatgtcccagcactgcgcatgccagggacagttcatcgcaagcggctcccgccctctgcccagctacgctgccgataccgcaggatcccaactccacgccgtccccgtgctccgggtttcccacgcagaggaggaggagagagtgcccccagaggatgacgaatattcagagtatagcgagtactcagtcgaagagtatcaagacccggaagccccttgggactccgacgatccctgcagtctgcccctcgatgaagggtcctgtaccgcatataccctgcgctggtatcaccgggctgtcactgggtcgactgaggcatgccaccccttcgtttatggaggatgcgggggaaatgcaaatcggttcgggacccgtgaggcatgtgaacggcggtgccctcccagagtcgtccagtcccagggcactggcacagcacaggac

SEQ ID NO: 9561 - DNA, 8832 bp, synthetic construct
  misc_feature 1..8832: note = source = /note="Description of Artificial Sequence: Synthetic coding sequence"
  source 1..8832: mol_type = other DNA
atgactctcaggttgttggtggcagccctttgcgccggaatcctggctgaggcaccgcgcgtcagggctcaacatcgcgaacgcgtcacctgtaccaggctctacgccgcggatattgtattcctgctggatggcagctcgtctatcggcagatcgaacttcagggaagtgagatctttcctggaaggattggtcctgccgttcagcggagctgcctcggcccagggggtccggtttgctactgtgcagtacagcgacgaccctcgcactgaattcggcctggatgcgctcggctcaggaggtgacgtgatacgcgcgattcgcgaacttagttacaagggaggcaataccaggaccggcgcagcgattctgcacgtcgccgatcatgtgtttcttccgcaactggcccgacccggtgtcccgaaagtgtgcatcttgattaccgatgggaagtcacaagacctggtggacaccgccgcccagaggctgaaaggtcagggagtcaagctgttcgcggtgggcattaagaacgcagatccggaagaactcaagcgggtggcgtcgcagcccacgtccgacttcttcttcttcgtgaacgacttttcgatccttcggactctcctcccactggtgtcgcgtagagtgtgcactactgccggaggcgttcctgtgacccggccgcctgacgactcgactagcgcacctcgggacctcgtcctgtccgagccgtcgtcccaatccctgcgcgtgcaatggactgcagcgtcaggtccggtgaccggatacaaggtgcaatacacgccgctgactggactgggacaaccactgccgagcgaacgccaggaggtgaatgtcccagccggagagactagtgtgagactgaggggacttcggccactgactgaataccaagtcactgtgatcgccctgtacgcgaactccattggagaggcggtttccggaactgcacggaccaccgctctggagggcccagagctgactatccaaaatactaccgcccactccctcctggtggcttggcggtcggtcccaggagccacgggttaccgcgtcacctggcgggtgctgtcgggtggtcctacccagcagcaagagttgggaccaggccagggctcagtgctcttgcgggatctggagccgggaacggattacgaagtgactgtttcaactctcttcgggaggtccgtgggaccggctacttccctcatggcaagaaccgacgcctcggtggagcagaccctgcggccagtgattctgggaccgacttcgattcttttgagctggaatctcgtgcccgaagccagaggctaccgcctggaatggagacgagagactggccttgagccgccccaaaaggtcgtgttgcctagcgatgtgactaggtaccagctcgacggactgcaaccgggcactgaataccgccttactctctacaccctcctggaaggacatgaagtggccacccccgcaactgtggtgccgaccggcccggaactgcccgtctctcccgtcaccgatctgcaggctaccgaactcccagggcagagggtgcgcgtctcatggtcgcctgtgccaggcgccacccaatatcgcatcatcgtccggtccactcaaggggtggagcgcactcttgtgctgcctggctcacaaaccgcatttgacctcgatgatgtgcaggctgggctctcgtacaccgtgcgcgtgagcgcgcgagtgggaccaagagaaggttcggccagcgtccttactgtgaggagagaaccggaaaccccgctggccgtgcctggccttagagtggtggtgtctgatgccacccgggtgagggtcgcctggggacccgtgcctggagcctcgggcttcagaatctcatggtcaactggtagcggtccagagtcgagccagacgctgccgccagactcaactgcaaccgacatcactgggctgcagcctggaacgacctaccaggtggccgtctccgttctgcgcggcagagaagagggcccagcagctgtgatcgttgcccgcaccgacccactgggaccagtgcggaccgtacatgtgacccaggcgtcatcgtcgtcggtgacgatcacttggacccgcgtaccgggcgccacgggttaccgggtatcatggcactcagcccatggtcctgagaagtcgcaactggtatcaggagaagcgaccgtcgcagagctggacggcctggaaccagacactgagtacaccgtgcatgtgcgggcccacgtggcgggtgtggatgggccgccggcgtccgtcgtggtgcgcactgcacccgaaccggtcggacgggtgtccaggctgcagatcctgaacgcctccagcgacgtcctgcgcatcacctgggtgggcgtcaccggtgccactgcctacaggctggcatggggaagaagcgagggtggaccaatgagacatcaaatcctcccgggaaacacggactcggcagaaatccggggactggaaggcggagtgagctactcggtccgggtgaccgcgctggtgggtgaccgggagggaactccggtgagcatcgtggtaactacccctccggaagcgccgcctgcactgggaaccctccacgtggtccagcgaggagagcattctctcaggttgcgctgggagcccgtccctcgggcacagggatttctcctgcactggcagcctgaaggcggccaggagcagtcacgggtcctgggacctgaactctcctcgtaccaccttgacggactcgaacctgcgactcagtacagagtgcgcctgtcggtgttggggccggccggagagggtccgtcagccgaagtgacggcgcggaccgagtcgccacgggtgccttcgatcgagctgcgggtcgtggatacttcgatcgactccgtcaccctggcgtggactccggtttccagggcaagctcctacatcctctcgtggcggcctctgaggggcccgggccaggaggtccctgggtcgcctcagactctccctggaatctcctccagccagcgggtgactggacttgaaccgggagtctcttacatcttctccctgacgcctgttctcgacggagtgcgcggaccggaagcgagcgtgacgcaaactccggtctgcccaagaggacttgcggacgttgtattcctcccgcacgccacccaggataacgctcatcgcgccgaggccacccgtagggtcctcgaacgcctcgtcctggccctcggaccactggggccgcaagcagtgcaagtgggtttgctctcatactcacaccgcccttcaccacttttcccattgaatgggtcacacgacttgggaattatcctgcaacgcatcagagatatgccttacatggacccaagcggaaacaatttgggaaccgctgtggtgacggcccacaggtacatgttggctcccgatgcgccgggccgccgacagcatgtgccaggggtgatggtgctcctggtggacgagccactgagaggcgacatcttctcaccgatccgcgaggctcaagcctcgggccttaacgtggtgatgctcggaatggcaggggccgacccggagcagctccgtaggctggcgcctggtatggattcggttcagaccttcttcgctgtggatgatggtcccagcttggaccaggccgtgtccggactggcaaccgcgctctgtcaggcctcctttaccactcaaccgcgcccggagccctgtccggtgtactgccccaaaggacagaagggagaacccggcgagatgggattgcggggacaggtgggaccgccgggcgacccgggcctccccggccgcaccggagcaccaggacctcaagggcccccggggtctgctaccgcgaaaggagaacggggattcccaggcgccgacggacggcccggaagcccgggaagagccggtaacccaggaactcctggcgcgccgggactcaagggaagcccgggactcccgggaccacgaggggacccgggagagcgcggaccgcgcggacctaagggagagccaggagccccagggcaggtgatcggcggagaaggacctggactcccaggaagaaaaggcgacccagggccctcgggtccaccgggaccgcgcggaccacttggcgatccgggaccacggggacctccgggactcccgggcactgcaatgaagggagataaaggggaccgcggcgaaagggggcctccgggaccaggagagggaggtatcgcgccgggagagccgggcctccctggattgcctggatcgcctggaccacagggaccggtgggcccgccgggaaagaagggagaaaagggagactcggaggatggggccccagggctcccaggtcagcctggttccccaggtgagcagggcccgcgcggacccccaggtgctatcggaccgaagggagacaggggattccccgggcctctcggcgaggccggagagaaaggtgaacggggaccaccgggccctgccggttcgagaggcctgcctggcgtggccggccggccgggggcaaagggtcctgaaggcccgcccggcccaacgggccggcaaggcgaaaagggcgaaccgggtcgcccgggggatcctgccgtcgtcggtccggcagttgccgggcccaaaggggagaagggggacgtcggaccggctggaccacgcggagctaccggggtccagggtgagaggggaccaccgggattggtgctgcctggggatccggggcccaaaggcgacccgggagatcgcggtcctatcggactgactggacgggctggcccaccaggtgactcgggcccgccaggtgagaagggagatccgggccggcccggaccgccaggtccggtcgggccacggggccgcgacggagaggtgggagagaaaggggacgaaggacccccgggggatccaggcctgcctggaaaggccggggaacgcggacttcggggtgcaccgggagtgcggggaccggtcggagaaaaaggggaccaaggagatccgggggaagatgggaggaacggaagccctggaagcagcggaccaaagggcgacagaggagagccgggacctccgggcccaccagggcgcctcgtggacactggaccgggcgcgcgcgaaaagggtgagccaggtgacagaggacaggaaggacccagagggccgaaaggagatccgggacttcccggagccccaggagaacgcggcattgaaggatttaggggaccccccggcccccagggcgatccaggcgtgcgcggccctgctggagaaaagggggatcgcggtccgccagggctcgatggcaggagcggactggatgggaagccgggggccgcgggcccgagcggcccgaacggcgccgccggcaaggcaggagatcctggacgagatggcctgccgggcctccgaggagaacagggactccctggcccgtccggcccgcccggcctccccggaaaacctggcgaggacggaaagcctggactgaatggtaaaaacggcgagcccggcgatcccggcgaagatgggcgaaagggcgagaagggggacagcggcgcctcgggacgggaaggacgcgacggccccaagggagaacgcggcgcgccaggaatcttgggaccccaagggccgccgggcctccctggaccagtgggaccgcctggccagggattcccgggggtgccaggaggcaccggaccgaagggtgacagaggagaaactggaagcaagggcgaacagggtttgcctggagaaaggggactccggggagaaccaggatccgtcccgaacgtggatcgcctgttggagactgcaggtatcaaagccagcgcactcagagaaatcgtggaaacctgggacgaatcgagcggcagcttcctcccggtcccagagagacggagagggccgaagggtgactccggtgagcagggacctccgggcaaggaaggtccaatcgggttccctggagaacgcggattgaaaggcgatagaggagatccaggaccacaaggcccgcctgggctggccctcggagaacgcggaccgccggggccgtcagggctggctggggagcccggaaagccgggaatcccgggactgcctggacgcgcaggaggagtgggggaagcgggcagaccgggtgagcggggagagcggggcgaaaaaggcgagcggggcgagcagggaagggatggaccaccaggacttcctggcactccgggtcctccgggaccgcccgggccgaaagtctccgtggacgaaccgggacccggactgtccggggagcaaggaccgccggggcttaagggagccaagggcgaacctgggtcaaacggagatcagggacccaagggcgaccggggagtcccaggcattaagggggaccgcggtgaaccaggcccgagaggccaggatggaaacccaggattgccgggagaacgggggatggctgggcctgaaggaaagccaggcctgcagggaccacgcggcccaccgggacccgtgggcgggcatggggatccgggaccgcccggagcgccgggtcttgcgggacctgccggcccacaggggccatccggactgaagggggagccgggcgaaaccggaccaccgggacgcgggctgactggccccaccggcgcagtgggactccccggtcctccggggccgtctgggctggttggaccacagggaagccccgggttgcctggacaggtgggtgagacgggaaaacctggagccccgggcagggacggcgcgtccggcaaggacggagatcggggctcccccggggtgccaggctccccaggactgccgggaccagtcggaccaaagggagaaccgggccccactggagcccctggacaagccgtggtgggacttcccggggccaagggagaaaaaggagcccctggaggactggctggagatctggtcggcgaaccgggagctaagggcgatcgcggattgccgggtccccggggggaaaagggcgaagcgggccgggccggcgaaccaggcgaccctggagaagatggacagaaaggtgcgccgggacctaaaggatttaagggtgaccctggtgtcggcgtcccaggatcgccgggcccgcccggcccaccgggtgtgaagggcgacctcggacttccgggattgccaggagcgccgggcgtcgtgggttttccgggtcagaccggaccgcgcggtgaaatgggacagccgggcccatctggcgagaggggcctcgctggcccacctggtcgcgaaggaattccaggaccgctcgggccgccgggcccacctggatctgttggacccccaggggcatcaggcctgaaaggagataagggcgaccccggagtcggactgccgggaccgcggggcgaacgcggagagccgggcatcagaggcgaagatggtcggccaggacaggaaggaccaagaggccttactggtccgccgggatccagaggagaacgcggagagaagggggatgtgggatcagcgggtctgaaaggcgacaagggggactccgccgtgatcctcggtccaccaggaccgcggggagcgaaaggtgatatgggggagcgcggaccaaggggtctggacggggacaagggaccacgcggggataatggtgatccgggggacaagggctcaaaaggagaaccgggagacaagggctccgcaggactcccgggtctgcgggggctgctgggaccgcaaggccagccgggagctgcgggtatccccggtgacccgggatccccgggaaaagatggggtccctggcatccggggtgagaagggagacgtggggttcatgggaccgaggggacttaagggagaacgcggagtgaagggggcgtgcggactggacggggaaaagggcgacaagggagaggctggtccacccggacggcctggactggctggacacaaaggtgagatgggagaaccgggagtgccgggacaaagtggtgcaccaggcaaggaaggcctgataggacctaagggtgatcgggggttcgacggtcaaccgggacccaagggtgatcagggggaaaagggcgagcgagggaccccgggaatcggaggtttcccaggtccttccggcaatgatggcagcgcaggccctcctggaccccctgggtccgtgggcccacgcggcccggagggactccaggggcagaagggtgagcgggggccgcctggagagcgcgttgtaggagcaccgggggtgccgggagcgccaggagaacggggagagcaagggaggccaggaccggcgggaccgagaggcgaaaaaggcgaggcagcgctgaccgaggacgacatcaggggctttgtccgccaagagatgtcgcagcactgcgcctgccaggggcaattcatcgcgagcggatctcgcccgctgccttcgtatgcggccgatactgcaggctctcaactgcacgctgttccagtgctgagggtgtcacacgccgaagaagaagagcgtgtccctccggaagatgacgaatatagcgagtacagcgaatacagcgtggaagaataccaagatccggaggcaccctgggattcggacgatccgtgcagcctgccgctcgatgagggatcatgcaccgcatacaccctccgctggtaccatagagccgtcactggatcgaccgaggcatgtcatccattcgtgtatggaggttgtggaggaaacgccaatagattcggaactagagaagcgtgcgagaggcgctgcccgccgcgcgtggttcagtcacaaggaaccggaaccgcccaggat

SEQ ID NO: 9562 - DNA, 8832 bp, synthetic construct
  misc_feature 1..8832: note = source = /note="Description of Artificial Sequence: Synthetic coding sequence"
  source 1..8832: mol_type = other DNA
atgacccttcggctgctggtggccgcactgtgcgctggcatcctggccgaagcccccagagttcgagcccagcatcgcgagcgtgtcacatgcacaaggttgtacgcggcggacatcgtgttcctgctcgatgggtccagctccatcgggcggtcgaacttccgggaagtgcgtagttttctggaaggtctggtactgccattcagtggcgctgcgagtgcccagggcgtgaggttcgctaccgttcagtattctgacgatccgaggacagagtttgggctcgatgccctgggctctggtggcgacgtgattagggccatccgagagcttagttataaaggggggaacacccggacaggtgcagccatcctgcacgtagctgatcacgttttcctcccgcagctggcccggcctggcgtacccaaggtctgcatcctgataaccgatggaaagtctcaggatctggttgacacagcagcacagcgcctgaagggacagggggtcaaactctttgcagtggggatcaagaatgcagatcccgaggagttaaagcgggtcgccagccagccaacaagcgatttcttttttttcgtaaatgatttttccattttgaggacacttttgccgctggtgagcaggagggtctgtaccacagcaggcggggtccctgtcactcgtccacctgatgacagcacaagcgcgccccgcgacttggtgctctctgagccatcttctcagagtctgcgtgttcagtggaccgccgcatccggccctgtgacaggatacaaggttcagtacacacctttgactggcctggggcagcccttgccttcagaacggcaggaggtgaacgtgcccgctggtgaaacatccgtgaggttaagaggattgcgtcccctgaccgagtaccaggtcacagtgatcgctttatacgctaattccatcggcgaggctgtgagtggtacagcccggactaccgcactggagggccccgagctgacaattcagaacaccacagctcacagcctcctggtggcttggcggagcgtacccggcgctacagggtatcgcgtcacctggagggtactttctggaggaccgacccagcaacaagagctgggtcctggacagggctctgttctcctgcgggacctggagccaggcaccgattatgaagttaccgtcagtactctcttcggcagatcggtcggaccagcaacatcgttgatggccaggactgacgcgtccgtagaacaaactctgaggcccgttatcttgggacccacgtcgattcttctttcatggaatcttgtgccagaagctcgtggctaccgactggagtggcggagggagaccggtctggagcctcctcaaaaagtcgtcctgccttccgatgtgaccaggtaccaactagatggacttcagcctggaacagagtaccgcctcacattatataccttgctggagggtcatgaggtggccacgcctgccaccgtcgtgcctaccggacctgagctgcctgtgtcccccgttacagatctgcaggccacggaattgcccggccagagagttcgggtgagttggtcccccgtcccaggggctactcaatacaggattatcgttagaagcacgcagggagttgaacgcacgttggtactgcctggttcccagactgcgttcgatctcgatgacgtccaggcaggcctgagctacacagttcgagttagcgctagggtgggaccaagggaaggttcggcgagtgtgctgacggtgaggcgggagcctgagacaccgttagctgtgccaggcctgcgcgtggtagtatctgacgccacacgcgtaagggtggcatggggacccgttcctggcgccagcggtttcaggatttcctggagtactggttcaggccctgaatccagccaaacactgcctccagatagcactgcaacagacataacggggttgcagccaggaacaacctaccaggtagcagtctcggtcctgcgcggcagggaggaaggtcccgctgcggtgattgtggcaagaacagatcctctgggtcccgtgaggaccgtacacgtgacacaggccagtagctcctccgtaacgatcacgtggacgcgagtgccaggggcgaccggctacagggtgagttggcattcagcccacggccccgagaaaagccaactcgtctccggggaggctactgtcgcagaactggacgggctcgagcctgataccgagtacactgtacatgtgcgggcccatgtggcaggagtggatggacctccagcgagcgttgtggtgcgaaccgcgcctgagcctgtgggtagggtgtcaaggctgcagattctaaacgcgtctagtgacgtgctgcggatcacatgggtgggggtgaccggagccacggcttatcgactcgcctggggacggagcgaagggggcccaatgcgacaccagatcttgcctggaaacaccgactctgcagaaatcaggggcttagagggcggagtctcttatagcgtgcgcgtcaccgctcttgtcggggaccgcgaaggcacccccgtgtcgattgtagtcaccacacccccagaagcccccccagccctcggtaccttgcatgtcgttcagagaggggagcacagcctgcgcttgcgttgggagcccgtgccgcgggctcaaggcttcctgcttcattggcagcccgaggggggacaggagcaatcccgtgtcctcgggccagagctgtccagttatcatctggacggtctcgaacccgctactcagtacagggtgcgcctgtccgtcctcggtccggcaggggagggcccatctgcggaggtcacggcccgtacagagtcacctcgagtgccaagtattgaactccgtgtcgttgatacctcaatagattcagtgacacttgcatggacccctgtcagccgagcatcctcttatatcctgtcctggcggcctctgaggggtcctggccaagaagtcccaggctccccccagaccctgcctggtatatcatcttcccagcgtgtgactggacttgagcccggcgtctcatatatattttctttgacgcctgtgctagatggggtgaggggcccagaggcaagcgtaacacagacaccggtgtgtccacgaggcctggccgacgtggtcttcctcccacacgccacccaggacaacgcgcacagggctgaagctactcgcagggtgctggaacgcctggtgttggctctggggcccctgggcccgcaagctgtacaggtggggttgctttcttacagccaccgccccagtccattattcccgctgaatgggtctcacgatttgggtataattctgcagcgaatcagggacatgccctacatggatccgtcgggtaataatctggggacagcagtggtcaccgcacataggtacatgcttgcgcccgatgcccccgggaggcgccagcacgtgcccggagttatggtcttgcttgtggatgagcctctaaggggcgatattttttctcctatccgggaagctcaagcatcgggcttgaacgtggtgatgctgggcatggcaggcgcagacccagagcagcttcgacggctggctcccgggatggactctgtacagaccttctttgcggtggacgatggtccctcactggatcaggctgtgtccggtctggccaccgcgctgtgtcaggcgtccttcacaacccagccccgaccagaaccctgtccagtttattgccccaaaggtcaaaagggtgagcccggagagatgggactgcgagggcaagtgggccctccaggagaccccggactcccgggacggacaggggccccgggaccacagggtccccctgggtcagccacagcgaaaggggaaagagggtttccaggagcagatggaagacctggcagtccaggtcgggccgggaatcctggcacacctggcgcaccaggattgaagggatctccaggcctcccaggaccaagaggtgacccaggtgagcgtggccctagaggacccaaaggtgaacctggcgcacccgggcaggtgatcggtggggaagggcccgggctgcccggcagaaagggggatccgggcccctccggtccccccgggcctcggggtcccttgggcgatccaggcccacgtggaccccctgggctgccaggcacagcgatgaagggtgacaagggagaccgaggggaacgcgggcccccaggccccggggagggcgggattgcacccggtgagcctgggcttcctgggctgcccgggagccccggtccacagggtccggtcggtccgcctggtaaaaagggtgaaaagggagattccgaagacggggcacctggattgcctggccagcccggcagtcccggcgaacagggtccacgtggaccccccggcgcgatcggtccaaagggcgataggggcttcccaggacccctcggcgaggccggcgagaaaggagagcgtggaccacctgggccagccggatctcgcggactcccaggtgtggccggcagacccggcgcgaagggccctgaggggccgcccggaccaacagggcggcagggcgagaagggcgagcctggacggccaggcgatcctgctgtggtgggccccgccgtagcgggccctaagggggaaaaaggagacgttggcccagcgggaccccggggagccactggtgtgcagggcgaaagggggccacccggtctggtgttgcccggagacccaggtcccaagggggacccgggcgatcgcgggcccatcggactgacaggacgcgccggtcctcccggcgattctgggcctcccggtgagaaaggagacccgggtcgtccaggaccacctggccccgtgggtcccagggggcgggacggcgaagtgggcgagaagggggacgaggggcccccaggcgatccaggtttgcctgggaaggcaggcgaaagaggtctacgcggcgccccaggggtgagaggaccagtcggcgagaagggagatcagggggatccaggggaggatgggaggaatgggagtccgggctcaagcggtcctaagggggataggggggagccagggcccccaggaccgcctggtcgactggtcgatacagggcctggggcccgggagaagggggagcccggagacagagggcaggagggccccaggggccccaagggcgacccgggactcccaggggccccgggagaaagggggatcgagggctttcggggacctcccggtcctcaaggtgacccaggagtccgcggacctgctggggaaaaaggagacagaggacccccgggccttgacgggagaagcggcctggacggcaagcccggagcagcaggcccaagcggtccgaatggagccgcaggcaaggctggagatcccggccgggacggactgcctggactcaggggtgaacagggcctgccagggccatctggacctcccgggcttcccggaaagcccggcgaagacgggaagcccggactgaatggaaaaaacggagagccgggtgaccccggggaagacggacgcaagggggagaagggggacagcggagcctccggacgggaggggcgggacgggcctaaaggcgaacgtggtgcaccaggcatcttgggtccgcagggcccgccaggactgccaggaccagtgggcccacccggccagggcttcccaggagtgccgggcgggaccggtccgaaaggcgatcgcggcgagacaggaagcaagggggagcaggggctgcccggagaacgcgggctgcgaggggaaccgggctccgtgcccaacgttgatcggctcttggaaactgctggaattaaggcaagtgcactccgagaaattgtggagacctgggatgagtcatctggctcctttctgcctgttccagagaggagacgtggcccgaaaggcgattcgggggaacaagggccccctggaaaagaaggccccattggcttccccggggagaggggactcaagggcgatcgaggggatccgggccctcagggccccccgggactggctctgggcgaaagggggccccccgggcccagtgggctggccggggaacctggtaagcccggcattcctggtctgcccggacgcgccggaggggtgggcgaggcaggtcgacctggtgagcggggagagcgtggagaaaaaggtgagaggggtgagcagggccgtgatgggccccctggtctgccgggcacacctggtccacccggtcctcctggacctaaggtcagcgtggatgagccgggccctggtctgagcggcgaacaggggccaccgggtctcaaaggcgcaaagggagaacctggcagcaacggagaccagggtcccaaaggtgatagaggggtgcccggcattaagggagatagaggcgaaccaggtccaaggggtcaggacggaaaccccggtctccctggcgaaagaggcatggcgggccccgagggaaaaccgggtcttcagggcccccggggaccacccggccctgtgggcggccatggcgacccaggccctcctggcgcccccgggctggctgggccagcggggccacagggtcctagtggtctcaagggggagcccggggaaaccgggccacccggccgcggtttgacaggaccaacaggtgccgtcggtctgcccggtccccccggacctagcggattggtaggaccacagggctcacccggtctccccggtcaggttggtgagacaggaaagcccggtgctcccggcagggatggagcgtctgggaaggacggcgacagaggatcccctggggttcctgggagcccaggcctgccgggccccgtcggccctaagggggagccaggaccaacaggggctccagggcaggcagtggtcggcttgccaggcgccaagggcgagaagggcgctcccggcgggcttgccggcgacctggtgggtgagccgggcgccaagggggacaggggccttcccggccctagaggagagaagggggaggcaggacgagctggcgagcccggagatcctggcgaggacggacagaaaggggcccctggcccaaaaggttttaaaggtgacccaggcgttggagtgccaggcagccccgggccaccagggccccccggggtgaagggtgatctgggcctccccggattgcccggcgctcccggcgttgttgggtttccaggacagactggaccacgaggtgagatgggtcagcccgggccctccggtgaacgggggcttgcgggcccaccagggcgggagggcattccaggccctctgggcccacctgggccccccggctcagtgggaccaccaggtgcctccggcttgaagggggataagggtgacccgggcgtcgggcttcctgggccaagaggcgaaagaggagaacccggaatcagaggagaggacggaagacccggccaggaaggaccccgcggcctgacagggccaccaggatcccggggcgaacggggcgaaaaaggggacgttgggtctgctggattaaaaggggataagggcgactctgctgtcattcttggacctcccggcccaagaggcgcgaagggtgatatgggggagcggggtcctaggggcttagacggtgacaaggggccccgcggcgacaacggagatccaggagataaggggtccaagggcgaacctggcgataaggggagcgccgggctccctggtttgagaggacttctagggcctcagggccagccaggcgctgccggtattcccggcgaccctgggagtcccgggaaagacggggtgcctggcattcggggtgagaagggagatgtaggattcatgggaccacggggcctgaaaggcgaaagaggtgttaaaggagcctgcggactcgacggggaaaaaggggacaaaggcgaagccggaccccccggacgccctgggctggccggccataagggcgaaatgggagagcccggcgtgcccggccagagcggggccccaggcaaggaggggttaatcggccccaagggcgataggggatttgatggccagccaggcccaaagggcgatcagggggagaaaggggaaagaggcactcctggaatcggaggctttcccggaccaagcggaaacgacggttctgctggtcctcccgggccacctggctctgtgggcccaagaggacccgagggcctgcaggggcagaagggtgaacgcggacctcctggtgagagggtggttggcgcccccggtgtccctggcgctcctggtgagcgaggagagcaggggcggcccggacctgcgggccctcggggtgagaagggggaagctgcactgaccgaagatgacattagaggatttgtgagacaggagatgtcccagcattgtgcctgccaggggcagttcatcgccagcggctcccgcccacttccgtcttacgcagccgacaccgctggcagccagcttcacgctgtgccagtgctccgcgtgagtcacgctgaagaagaggagagagtgccccctgaggacgatgaatattctgagtactccgaatattctgttgaggaatatcaggatcccgaagccccatgggactccgatgacccatgcagtctgccgttagacgaagggagctgcaccgcttacacccttaggtggtatcatagagcagttaccggatcgacggaggcatgccacccttttgtatacgggggctgcggtggcaacgcaaacaggttcggtacacgcgaggcctgtgagcgcagatgccccccacgggtggtacagtcccagggaaccggcactgcccaggac

SEQ ID NO: 9563 - DNA, 8832 bp, synthetic construct
  misc_feature 1..8832: note = source = /note="Description of Artificial Sequence: Synthetic coding sequence"
  source 1..8832: mol_type = other DNA
atgaccctgcgtctccttgttgcagccctttgtgccggcatcctcgcagaggcaccacgcgtgcgcgctcagcacagagagagggtcacttgtaccagactctacgcagcagacattgtgttcctgctcgacgggtcctcgtccatcgggagatcgaacttcagagaagtgcgttcatttcttgaaggcctcgtccttccgttttctggagcagcaagcgcgcagggagtgcgatttgcgaccgtgcagtactcagatgacccccggaccgaatttggactggacgccctggggtcaggaggtgacgtgattcgggcgatccgggaactcagttataagggcggtaatactagaaccggagcagcaattcttcatgtggcggatcacgtgtttctcccacaactggcacggcctggagtgcccaaagtgtgtattttgattactgatgggaaatcccaggatctcgtggacaccgcggcacaaagacttaaagggcaaggtgtgaagctctttgcagtcggaataaagaatgcagaccctgaagaacttaagcgcgtcgcctcgcaaccgacgtccgatttcttcttctttgtgaacgatttttccattcttagaactcttctgcctctggtcagcagaagagtgtgcaccactgcgggcggggttccagtcactaggccccccgatgattcgacctcggcaccacgagatcttgtgctgagcgagccttcgtcccaatcactgagagtccaatggactgcagcatcaggtcctgtgaccggatacaaggtccaatacactcccttgaccggtttgggccagccgcttccatcagagcggcaagaggtgaacgtcccggcaggtgagacgtccgtgcggctgagaggcctgcgtccacttactgaataccaggtgactgtgatagccctttatgcaaactctatcggtgaagccgtgtcgggaactgcccgcactaccgccctggagggcccagagctcaccattcaaaacactaccgcacattcacttctggtggcatggcgctcggtccctggagctactggctacagagtcacttggcgggtgctgtcaggagggccgactcagcaacaagaactgggaccaggtcagggttcggtgcttcttagagatctggagcctgggactgattacgaggtgaccgtgtcgacgctttttgggaggtctgttggaccggccaccagcctcatggcccgtaccgatgcatccgtcgaacaaactcttagacctgtgattctgggacctaccagcatactcctttcctggaatctcgtccctgaggcacgcggatacagacttgagtggcgccgtgaaaccggtttggagccacctcagaaggtcgtgctgccttccgatgtcacgcggtaccaactggatggtctgcagcctggaaccgaataccgcctgaccctgtacactctccttgaagggcatgaggtggccacccccgctactgtggtgccgactggtcccgagctgcctgtctcgccggttaccgacttgcaggcaaccgagcttcctgggcagcgcgtcagggtgtcctggtcccctgtgcccggtgcgactcaataccgaatcattgtgcgctcgactcaaggcgtggaacgcaccctggtgctgccgggatcacagactgcgttcgatcttgatgatgttcaggccgggctttcgtacaccgtcagggtttcggcccgagttggaccaagagaaggcagcgccagcgtgctcaccgtgcgaagagaacctgagactccgttggcagttcctggccttcgggttgtggtatcagatgcaacgagggtgcgggtggcctgggggccagtccctggtgcatccggctttagaatctcgtggtctaccgggtcgggaccagaaagctcgcagactctgcctccagattcaaccgctaccgatattactggactgcaaccaggaaccacttaccaagtggcagtgtccgtgcttcgtggtagggaggaagggcccgcggccgtgatcgtggcaagaaccgatcccttgggaccagtgaggaccgtgcatgtgactcaggcgtcctccagctcggtgactatcacttggacccgagtgccaggtgcgaccgggtacagagtctcgtggcattccgcccatggtcctgaaaagtcccagctggtgtcaggagaagcgacggtggcagaactcgatggattggaacccgataccgaatacactgtgcacgtgagggcacatgtcgcaggtgtcgatggtccgcccgccagcgtggtggtccgcaccgcgccagaacccgtgggaagagtttcaagactgcagatattgaatgcgagctctgacgtccttcgcataacttgggtgggtgtgactggcgcaaccgcgtaccgtcttgcatggggacggtcggagggtgggcctatgcgacaccagatccttcccggaaacacggatagcgcagagattcgcgggctggaaggtggtgtttcatattcagtgagagtcaccgcattggtgggtgaccgggaaggcacccccgtgtccattgtggtcacgacgccaccagaggcccctccagcgcttggaacgctccacgtggtccaaaggggtgagcattccttgcgactgcgatgggagcctgtgccacgcgcacaaggcttcctgcttcactggcagccagagggaggacaggagcagagccgggtgctgggtccggaactgtcatcctaccatttggacggcctggagccagccactcagtacagggtcagacttagcgtgttgggacctgcaggagaagggccttcagctgaagtgacggcccggaccgagagccctagggtcccttcgattgagctccgcgtggttgatacttcgattgattccgtgacccttgcatggactcctgtctcgagagcttcctcatacattttgtcctggcgtccgctgagagggcccggacaagaagtccctggctctcctcaaacgctgcctggaatctcgtcatcgcagagagtcaccgggcttgaaccaggcgtgtcatatatcttctcgcttacgcctgtgctggatggtgtgagagggccagaagcctcggtgacgcaaaccccagtgtgtccccgaggactggcagatgtggtgttccttccacatgccactcaggacaacgcgcatagggctgaggcaaccaggcgggtgcttgaacggctcgtcttggcacttgggcctttgggaccacaggcagtccaggttggactgctctcgtactctcatagacccagcccgctgtttcctctgaacggatcacacgatttgggaattatcctgcaacgtatcagagatatgccttacatggacccgtccggaaataacctcgggaccgcagtggtgaccgcacatagatacatgctggccccagatgcacctggtcgcagacagcacgtcccaggagttatggtgctgctggtggatgaacctctcagaggtgacatattcagccccatcagggaagcacaggccagcggacttaacgtggtgatgcttggaatggccggagccgatccagaacaacttagacggctcgcgccaggaatggattcggtgcagacgttctttgcggtggatgatggcccatcactcgatcaagcagtgagcggcctggcaaccgcactctgtcaagcctccttcactacgcagcccaggccggaaccctgtccagtgtactgtcctaagggtcaaaagggagagcctggcgagatgggactccgggggcaggtgggtccccccggcgaccccgggcttcctggaagaaccggagccccaggtcctcagggccctccaggaagcgccactgccaagggtgaacgtggttttcctggtgcggatggtcgaccagggtcaccgggcagagcaggaaacccggggacccctggagcccccggtctgaagggatcccctggactgcctgggccaaggggagatcctggcgaaagagggcctaggggaccaaaaggagaacccggtgcacctggccaggtcattggaggtgaaggtccgggactgcctgggaggaagggagatcctgggccatcgggaccgcccggacctagaggtcctctcggagatcctggcccccgcgggcctcctggccttccaggtaccgccatgaaaggtgataagggggaccgcggcgaacggggaccccctggcccaggggaaggagggatcgcaccaggggaacctggactgcccggactccctggatccccaggacctcaaggaccggtgggcccccctgggaaaaaaggagaaaagggtgactcggaggacggtgcaccaggcctgccaggccagccaggcagccctggtgaacagggacccagaggtccccccggtgcaattggacccaaaggtgataggggttttccaggacctctcggggaggcaggggagaaaggagagagagggccacctgggcctgccggctcaagaggactccctggagtcgctggtagaccgggtgcaaaggggcccgagggaccacctggaccaactggacggcagggagaaaagggagaacctggtcgccccggtgatccggcagtcgtggggcccgcagtggcaggtcccaagggcgagaagggtgacgtgggacccgcaggcccaagaggagctactggagtgcaaggggaaaggggaccgcccggactggtgcttccaggggatccaggacctaagggcgatccaggagatagaggccctatcggtcttaccgggcgagccggacctcctggggacagcggcccacctggagaaaaaggagatcctggcagacctggcccaccaggacctgtggggccccggggtcgtgatggagaggtcggcgaaaagggggacgagggaccacctggtgaccccggactgccaggtaaggcaggcgaacgtgggctgcggggcgcacccggagtgcgaggacctgtgggtgagaaaggggatcaaggagatcctggagaagatgggcgcaatggttcgcctggaagctcgggccctaagggtgatcggggggagcccgggcctccaggtccgcctggtcgccttgtcgatactggtccaggggcaagagagaagggggaaccaggagatcgcgggcaggagggcccaagaggtcctaagggagatcccggcctccctggggcgcctggagaacggggaattgaagggtttagagggcctccggggccgcaaggagatcccggagtgcgcggccccgcgggagagaaaggcgatcgtggaccaccaggacttgatggtcggtcgggtctggatggaaagcctggcgcagctggaccatccggtccaaatggcgctgcagggaaggccggagatccaggaagagacgggctgccaggtctgagaggtgagcaaggacttccaggaccgtccggcccgccagggcttcctggcaagcccggtgaagatggcaagcctggactcaacgggaagaacggagagcccggtgaccctggtgaggacggacgtaagggagaaaaaggggatagcggtgctagcggacgcgaaggacgagatggtccaaagggcgagcggggagcacctggtattctgggaccccagggacctcctgggcttccgggtcccgtcgggccgccagggcagggattcccgggcgtccccggggggaccggaccgaaaggagatagaggtgaaactgggtccaaaggagaacaaggtctgcccggtgagcgtggacttcggggagagccaggttccgtcccaaacgtcgaccgactgcttgaaactgccggaatcaaggcctccgcattgcgggaaattgtggaaacctgggacgaaagcagcgggtcgttcctcccagtccctgaacggaggaggggacctaagggagactcgggtgagcaaggcccacctggcaaagaaggacctataggatttcctggtgaacggggcctcaagggagatcgaggagatccggggccgcaaggtcctcctggactggccctcggagaacggggccctccaggaccatcgggtcttgccggtgagcctgggaagcctggaatccctggcctgcctggtagggccggaggagtgggggaagcaggtagaccgggcgaaagaggagagcggggggaaaagggagaacgtggagaacaaggacgtgacggtccccctggactgcctggcactcctggcccacctggacctccaggccctaaggtgtcggtggacgagcctgggcccggtctgtcgggagaacaaggacccccaggtctgaagggcgcaaagggagaacctggttcgaacggcgaccagggaccaaagggggaccgtggagtgcccgggatcaaaggggataggggtgagcctggacctcggggccaagatggaaaccctggattgcctggagaacgcggcatggctggaccggaaggaaagcctggccttcaggggcctcgtggtccccctggaccagtcggtggacacggagatcctggacctcctggcgcaccaggtctggcaggacctgcaggccctcaaggaccttcaggtttgaagggagaacctggcgaaaccggcccacccggacgtggactgacgggaccaaccggagcagtcggacttcccgggcctccgggacctagcggactggtggggccacagggaagtcctggattgccaggacaggtgggagagactggtaagcctggtgcaccaggacgggatggggcgtcgggaaaggacggcgatcgtggatcgccaggagtgcctggatccccaggactgcccggccctgtcggtcccaagggagaacccggccctactggagctcctggacaagccgtggtgggtttgccaggtgccaaaggagaaaagggagcaccaggagggctggccggtgaccttgtcggggagcctggagccaaaggagatagagggctcccagggcccagaggagaaaaaggtgaggcaggaagagcaggtgagccaggagatcccggtgaagatggtcaaaagggggcacctggacctaagggatttaagggcgaccctggtgtgggcgtgcctggtagccctggcccgccaggtccaccgggagtgaagggggatctgggtctgcctggactgcctggtgccccaggtgtggtgggattcccgggtcagaccggacctagaggagagatgggacaacctggaccgagcggagaaagaggtctggccggaccccctggtagagaaggtatcccgggtccattgggaccacctggacctcctggtagcgtgggaccaccaggtgcatcaggcctcaaaggggacaaaggagatcctggagtgggtctgcctggacctcgcggcgaacgcggagaacccggtatccgtggagaagatggacggcccggacaggaaggcccgaggggtttgacgggtccacctggatcccgaggagaaagaggtgaaaaaggggatgtcggcagcgcaggtctgaagggagataaaggagactccgcagtgatccttggtcccccaggacctaggggtgctaagggagacatgggagaacgcggtcctcggggacttgatggagataagggccctaggggtgacaacggggatcctggagataaaggatccaagggagaacctggggataaaggaagcgcaggacttccaggactgaggggcctgctcggacctcagggacagcccggagcagcggggattccaggtgatccgggatccccaggcaaggacggagttccagggattagaggagagaagggtgatgtcggattcatgggaccacgcggcttgaaaggcgaacgtggagtgaagggagcttgtggcctggatggagaaaagggtgataagggtgaagccggtccacccgggcggcccggcctggcgggtcacaagggggagatgggcgaaccaggcgtccctggacaatcaggggctcctggtaaggaaggcctgatcggtcctaaaggcgaccgtggcttcgacggacaacccggacctaaaggagatcaaggagaaaagggagaacgaggtaccccagggattggcggttttcccggcccttcgggcaacgatgggtcggcagggcctcctggaccgcctgggagcgtgggacctcgtggtcccgagggccttcaaggtcaaaagggtgaacgcggacccccgggcgaacgagtggttggtgcacctggtgtgcctggggcaccaggagagagaggagaacagggccgcccaggacctgcgggaccacgcggcgaaaaaggtgaagcagcacttaccgaggacgatatccgcggctttgtcagacaggaaatgtcccagcattgcgcctgtcagggtcagtttattgcaagcgggtcccgtccattgccatcttacgctgcagacactgctggcagtcaacttcatgccgtgcctgtgttgcgagtgtcccatgcagaagaggaagagagagtgccgccagaagatgacgaatactcggaatactccgagtacagcgtggaagagtaccaggaccctgaagcaccctgggattccgatgatccttgcagtctcccactggatgaaggatcgtgtactgcatacactttgcggtggtaccatagagcagtgaccggttcgactgaggcatgccatccattcgtgtacgggggatgtggaggaaacgcaaatagattcggtacgcgagaggcgtgcgaaaggaggtgcccaccgagagtggtgcagagccagggcaccggaaccgcgcaggat

SEQ ID NO: 9564 - DNA, 8832 bp, synthetic construct
  misc_feature 1..8832: note = source = /note="Description of Artificial Sequence: Synthetic coding sequence"
  source 1..8832: mol_type = other DNA
atgaccctgaggctccttgtcgcggccctatgtgccgggattttggccgaagcacctagagtgagggcccagcatagagagagagtaacctgtacccgactgtatgcagcggatatcgtgtttctcctggacgggagttcttctattggccgttctaacttcagagaagtgcgttcatttctggagggacttgtgttgccgttctctggggcagccagcgctcaaggcgtgcgctttgccaccgtccagtattctgacgaccccaggaccgaattcggtctagacgcattggggtccggcggtgacgtcattcgtgcaatcagggagctaagttataaggggggtaataccaggactggagctgcgatactgcacgtggccgaccatgtgttcctccctcaactagcacgacccggcgtccccaaagtgtgcattttgattactgatgggaagagccaggatttggtggatacggctgctcagaggttaaaggggcagggcgtgaaactgttcgcagtgggtattaagaacgccgatccagaggagctcaagcgcgttgcgtcccagcctaccagcgactttttcttcttcgtgaatgattttagcatattgagaacactcctaccactcgtctcccgacgggtgtgtactacagctggaggagtgcccgtgacccggcctcccgatgactcgacatccgctcctagagatctcgttctgtcagaaccaagcagtcaatccctgcgggtgcagtggacagctgccagcgggcccgtaactggctataaagtgcagtataccccattgactgggctgggtcagccccttccatcagaacgacaggaggtgaatgtgccagccggagaaactagcgttcgactgagaggtctccgaccactgaccgaatatcaggtgactgtgatcgccttgtatgctaatagcattggagaagccgtctccggcactgccagaactacagctttagaaggacctgagctgaccattcagaatacaaccgcgcacagcctactggtggcatggagatctgtccctggagccactggttatagggtaacttggcgagttctgagtggcggtccaacacagcagcaggagctcggaccgggacaggggtctgtcctgcttagagacttagagcccgggacggactacgaggtaaccgttagcactctctttggcaggtccgtagggcctgccactagcctcatggccaggactgacgccagcgttgagcagacccttaggcccgttatcttggggcctaccagcattctgctgtcctggaaccttgtacctgaggccagggggtatagactggagtggagacgtgagaccgggctggaaccaccgcagaaggtggttctcccatctgacgtcacacgataccagctggacggcttacaacccggcactgaataccgactgaccctttataccttgctggagggtcacgaggtggctacccctgccaccgtggttcccacagggccagaacttccagtctccccggttaccgacttgcaggcaactgagctgccaggtcagagagtcagagtgagttggtcccccgtccctggagccacacagtatcgaatcatcgtgagaagcactcagggcgtagaaaggactttggtgctaccagggtcccaaaccgcctttgacctggatgacgtccaagctggtcttagctatacggttcgcgtatcagctcgagtaggccctcgagagggatccgcgtctgtcctcactgtgcgtcgagaaccggagacccctctcgccgtgccgggcctgagagtggttgtgagcgatgctaccagggtgcgagtggcttggggcccagttcctggtgcctcgggttttcgaatttcgtggtctaccggaagcggaccagagtcctctcaaaccctgcccccggactcgaccgcgactgacatcacaggtctgcagcctggaacaacatatcaggtggcagtgtccgtattgcgaggacgggaagagggccctgcggccgtgatcgtagcaaggacagatccactagggccggtgcgtacggtgcacgtgacgcaggcttcgtctagctccgtgacaattacctggacacgggtccccggtgccactggatacagagtgtcatggcactccgcccacggacccgaaaagagtcaattggtgtctggtgaagccacagtcgccgagctcgatgggttggagccagacaccgagtacaccgtgcatgtgcgcgcccatgtggctggcgttgatggcccccctgcgagcgtggtcgtgcgaaccgccccggaacccgttggacgtgtgtcaaggctgcagatcctcaacgccagtagtgacgtgcttaggatcacttgggtgggtgtgactggcgctacggcttatcgactggcatggggccgatccgagggtggaccaatgcgacatcaaatcttacccgggaataccgattcagccgagatccgagggcttgaaggaggcgtgtcatatagcgtgagggtaaccgccttagttggagaccgagaaggaacgccagtctctattgtcgtgacgacaccccccgaggccccgccagccctcgggacactacatgtggtccagcgtggcgaacactccctgagattgaggtgggaacccgttccacgcgctcagggattccttctgcactggcagccagaaggagggcaggaacagtctcgagtgctcggcccagagctctccagttaccacttggacggactggagccggctacgcaatacagagtccgactcagcgttctcggacctgccggcgaagggccttctgctgaagtaaccgccaggacagaatccccccgtgttccctctatagagcttcgagtggtcgataccagtatagattctgtcaccctggcctggacccccgtttccagggcctcgagctatattttgtcttggagacccctgcgggggcctgggcaagaggtccccgggtcgccacagacgctccccggtatttcatcctcccaaagagttaccggtctggagcccggtgtgtcatatatcttctcgctgacgccagtactggacggtgtgagaggcccggaagcttccgttactcagacaccggtctgtccccgtgggcttgctgatgtagtcttcctgccgcacgcaactcaggataatgcacaccgagcagaggccacacggagggtattggaaaggttggtgctagctctggggccactgggcccacaagcggtgcaggtgggtcttctttcatactcgcatagaccttcgccactgtttccattaaatgggagccatgacttaggcatcatcctccagagaattcgagatatgccctacatggacccatccggtaataatctgggcacagcagtagtgacagctcacagatatatgctcgccccggatgcccccggcaggaggcaacacgtccccggcgtcatggtcctgctcgtagacgagcctttgagaggagacatattctcccctataagggaggcacaggcttcggggctcaatgtggtcatgctcgggatggctggggcggaccccgagcagctgcgaaggctggctcctggcatggattccgtacagacctttttcgctgtcgacgatggccctagcctggatcaggcagtcagtgggctggctacggccctgtgtcaggcgtcctttaccactcagccgcgccctgagccatgcccagtctactgcccaaaggggcagaagggggagccgggcgagatggggctacgaggccaggttggtccacctggagaccccggactgccgggacgaactggggcccccggtccccaggggccccccggatcggcaaccgctaagggcgaaagaggatttcccggcgccgacggtaggccgggctcccccggtcgcgcaggtaaccccggcactcccggtgcacctggtctaaagggaagtcctggccttccgggacccagaggcgacccaggagaaagaggtccacggggtcctaagggagaacctggagccccagggcaagtgattggtggcgaaggccctggtctccctggtagaaaaggcgaccctggccccagcggaccacctggcccacgaggaccactgggagatcctggtccgcgcgggccacctggcctacccggcactgccatgaagggcgataaaggggatcgaggagaacgaggaccaccgggacccggtgagggcggcattgccccgggcgagccagggctgcccggtttgcccggcagccccgggcctcaggggcctgtgggtccccccggcaaaaagggcgaaaagggcgactccgaagacggtgcccccggtctgcccggccagccgggcagccctggggaacaaggcccgcgagggcctccaggcgcgatcgggcccaagggagacaggggatttcccggcccgctgggagaggccggagagaaaggggaaagaggtccccctggacccgctggcagcagaggactgccaggggtcgccgggcgaccaggcgccaaagggcccgaggggcctcctggcccaacaggcagacagggcgaaaaaggggagcccggcagacccggggaccctgcggtggttgggcctgctgtggctggacctaaaggcgaaaaaggcgatgtcggcccagccggaccacgtggtgccacgggtgttcagggagagcgaggccctcctggtctcgtactgcccggggaccctggaccaaagggcgatcccggagatcgtggccctatcggcctgaccgggagagccggcccaccaggagactccggaccaccaggcgaaaaaggagacccgggccgacctggaccccctggcccggtgggacctaggggacgggacggagaagtcggggagaagggcgacgaaggccctccaggcgaccccggtctgccaggtaaggcaggtgaacgaggactccgaggagcaccgggcgtgagggggcccgtgggcgagaagggggaccagggcgacccaggcgaagacggaaggaacggatcacccggatcatcaggcccgaaaggagatcgtggagaacccggccccccaggccctccggggaggctggtggacaccggaccaggtgcccgcgagaaaggagagcctggcgatcgagggcaagagggtccaagggggcctaagggcgatccaggtctacccggagcgcccggcgagcgagggatagaaggcttccggggcccccccggccctcagggggaccctggtgtgaggggaccagccggggaaaagggtgaccgcgggcctccgggcctagacggccgatccggcttggatggaaagcccggcgcagccggcccaagcggacccaacggggcagcaggcaaagccggcgaccccgggagggatggtctgcctggcctgaggggtgagcaggggttacccggaccctccggccctcccggactgcccggaaaacccggagaggacgggaagccaggcctgaacggtaaaaatggcgaacccggagaccccggcgaagatggaaggaaaggcgagaagggcgactcaggagcctctggccgtgaggggcgagatggaccaaaaggggaaagaggcgccccaggaattctcgggccccagggccctccagggttacctggccccgtgggccctcctggccaaggttttccaggcgtacccgggggtacagggcctaagggagataggggagaaacaggctccaaaggcgaacaaggactgccaggtgagagaggcctgaggggtgaacccggttcggtgccaaacgtcgataggctcttagaaacagccggaatcaaggcctccgccctgagggaaattgttgaaacctgggatgaaagctccggcagtttccttccagtcccagagcggcgccgaggccctaaaggggatagcggagaacagggtccccccggcaaggagggaccaattggctttccgggcgaacgaggattaaaaggagacaggggtgaccccgggccccaggggccacccggactcgcattgggcgagcgagggccccctgggccttctgggctcgccggagagcctggcaaacctgggatcccgggattacctggtcgtgctggtggtgtgggcgaggccgggaggccaggcgaacgaggggaacggggggagaagggtgaacgaggggagcagggtagggacggcccacccggcctgcccggtacacccggtccccccggccctcctggaccaaaggtgagtgtggacgagccaggccccggtctgtcaggcgaacaggggcctccaggtctgaagggggcgaaaggagagccgggctctaacggagaccaagggcccaaaggggaccgaggggttcccgggataaagggggatcgaggcgagcccgggcctcgaggccaggacgggaacccagggctaccaggagaacgtggtatggccggtcccgaaggcaagcccgggctgcaaggacctcgcggtccccccggtcctgtaggaggccacggagatcctgggcccccaggagcccccgggctggcgggcccagccgggcctcagggccccagcggtctgaagggagagcctggggaaacaggccccccgggcagaggactcacgggccccacaggcgccgttggcctcccaggccctccagggccctcaggcttggtagggccacagggaagccctgggcttccaggacaggttggggaaaccggcaagcctggagcacctggtcgagacggtgcctctggcaaggatggggataggggcagcccaggcgtgccaggatctccagggctcccaggccctgttggtcctaaaggggaaccaggtccgaccggcgcacctgggcaggccgttgtcggcctgccgggagctaagggagaaaagggtgctcccggtggcctagcaggggacctggtcggcgaaccgggcgccaagggagatcgcggactgccaggcccacgaggagaaaagggagaagccggacgggctggcgaacccggcgaccccggcgaagatggccagaaaggggcacccgggcccaagggctttaagggcgatcccggagtcggtgtgcctggcagcccagggccccccggccctcccggcgtaaagggcgacctaggcctgccgggacttcctggcgcacctggagtcgtaggatttcctgggcagacagggcctcgtggggaaatggggcagcccggaccatctggcgagagaggactggccggccctcctggcagggaagggatcccagggcctctcggacctcctggcccccctgggtccgtcgggccaccgggagcctcaggactgaaaggcgacaagggggatccgggtgtgggcttgcctggcccaaggggtgagagaggtgagcctggaattaggggggaagatggacggccggggcaggaaggacccaggggcctcacaggccctcccggctcacgtggagaaaggggcgagaagggagatgtgggcagcgccggcttgaagggggacaagggggattcagcagttattctagggccgcctggacctcgcggggcgaagggagacatgggtgaaagagggcctcgcggcctagatggtgacaaggggccccgcggagacaatggcgatccgggtgataagggcagcaagggcgagcctggcgacaaggggtctgccggcctgcctgggctgaggggactgctgggaccccaaggccagccgggcgcggccgggatccccggcgaccctggatcccccggtaaagacggagtccccgggattaggggggaaaagggcgatgttgggttcatggggcccagaggccttaagggggaaaggggggtgaagggtgcctgcggcctagatggcgagaagggagacaagggggaggctgggcccccgggccgaccgggacttgcagggcataagggagaaatgggggaacccggcgtgcccgggcaatctggagctcccggcaaggaggggctaatcggccctaagggagatcgaggattcgatgggcaaccaggccccaagggcgatcagggggaaaaaggggagcgcggcaccccgggcatagggggttttcctgggcctagcggaaacgacggttccgccggtccgcctggccctccgggcagtgtaggaccaagagggcctgaagggctccagggccaaaagggcgaaaggggccctccaggggaacgcgtggttggcgctcccggagttcccggagcccccggcgagcgaggagaacagggccgacccggccccgcgggacccaggggagaaaagggggaagcagccttaaccgaggacgatattagaggattcgtccgccaagaaatgtcccaacactgtgcttgtcaggggcagttcattgccagtgggtcacgacctctgcccagctatgctgccgacaccgctggttctcagctacatgccgttccagtgctgcgagtgagccatgcagaagaagaggagcgagtcccccctgaggacgatgagtacagcgaatattccgagtactccgtcgaagaatatcaggacccggaagctccatgggactcggatgatccctgtagcctccctctggacgagggttcctgcacggcgtacaccttgcggtggtatcatagagcagtgaccgggtccaccgaggcatgtcatccctttgtgtatgggggctgcggaggcaatgccaaccgattcggtactagagaggcttgcgaaagaaggtgcccaccaagagtggtccagtcccagggcaccggaacagctcaggac

SEQ ID NO: 9565 - DNA, 8832 bp, synthetic construct
  misc_feature 1..8832: note = source = /note="Description of Artificial Sequence: Synthetic coding sequence"
  source 1..8832: mol_type = other DNA
atgactcttagactgctggtggcagcactgtgcgcaggaattctggccgaagcaccccgcgtgagggcccaacatcgggagagagtgacttgtactaggctttatgcagccgacattgttttcctgcttgatggttcctcgtcaattggacggagcaattttcgcgaggtgcggtcctttctggagggacttgtcttgccattttccggagcagccagcgcgcaaggtgtccggttcgctaccgttcaatacagcgatgacccacggaccgagttcggtcttgacgcgctgggaagcggtggagatgtgatacgggccatcagagaattgtcgtataagggcggaaatacgcgcaccggcgctgccattctgcatgtggcagatcatgtctttctgcctcaactcgccagacctggggttcctaaggtgtgtatcctcattaccgatggtaagagccaagatctggtggatactgctgcacagagactgaagggacaaggtgtcaagctgtttgccgtaggtatcaagaacgcagatcctgaggagctgaagcgagtggccagccaacctacgtcggatttctttttcttcgtgaatgacttctcgatactgcgcactctgctgcctcttgtgtcacggcgcgtgtgtactaccgccggcggagtgcctgtgactcggccccctgatgactcaacctccgccccgagagatttggtgcttagcgaaccgagctcacagtcgctgcgagtgcagtggacggcagcatcgggaccggtcactggctataaggtgcagtacacccctttgaccggactcggtcaaccactcccttccgagaggcaagaagttaacgtgccagctggcgagacttccgtgcgcctgagagggcttcgtcctcttaccgaataccaagtcaccgtgattgcactttatgcaaattccattggggaggcagtgtccggtaccgcacgaaccactgcattggagggaccggaactcactatacagaacacgactgcacattcgctgctggtggcctggagatcggtgcctggagctaccggttaccgtgtcacttggcgcgtcctttcgggaggtccaacccaacagcaagagcttggacccggtcaaggtagcgtgttgcttagagatcttgagcctggaaccgactacgaggtgaccgtctcgacgctgttcggccgctcagtggggcctgctacttccctgatggcaagaactgatgcatccgtggaacagacgcttagacccgtcattctcggtcctacctcgattctgttgagctggaaccttgtccctgaagccagaggatacagactggagtggaggcgtgaaaccggtcttgaacctccgcaaaaagtcgtgctgccatcagatgtgacgagataccagctggacggacttcaaccgggtaccgagtaccgactcaccctgtacaccctcctcgaaggacacgaggtggcgacccctgctactgtggtgccgaccggtccagagcttcctgtgtcgcccgtgaccgacctgcaagcaactgagcttcctgggcagcgcgtgagggtttcgtggtcccctgtgccaggggcaacccagtacagaatcattgtgcggagcactcaaggagtcgaaaggaccctggttctccctgggtcccagactgcctttgacctggacgatgtccaggctggtctttcgtacacggtgagggtatctgcacgggtaggccctagagagggctccgcaagcgtgctcactgtgaggcgggaacccgaaacccctctcgcagtgccaggtctgcgagtggtcgtgtcagatgcaacccgtgtccgtgtggcctggggacctgtgcccggagcgtccggcttccggatctcttggtcaactgggtccggacctgaatcatcgcaaactctccctcccgatagcactgcaaccgatattaccgggctccaaccgggaactacgtaccaggtggctgtgtcggtgctccgaggacgagaagaaggtcctgcagccgtcatcgttgcgcgtactgatccacttggtcctgtacgaactgtgcatgtgacgcaggcctcctcctcctcggtgactataacttggacgagagtcccaggcgcgaccggttacagggtgtcatggcacagcgcacacggtccggagaaatcccaacttgtcagcggtgaggcaaccgtggcggagttggatgggctggaaccagacaccgaatacactgtccatgtgagagcacatgtggccggtgtggatggccccccagcctccgttgtggtgagaactgcccctgaaccggtggggagggtatcccgactgcaaattcttaacgcctcgtctgatgtgcttcgcattacctgggtgggagtgaccggtgcgactgcataccgccttgcctggggacgctccgaaggaggacctatgaggcatcagattcttcctgggaacaccgattcggcagagatccgcgggcttgaaggaggggtgtcatactcggtccgggtgaccgcactggtgggtgatagagagggaactccggtcagcatagtcgtcaccactcctccagaggcacctcccgcactggggactcttcacgtcgttcagaggggagaacattcccttcgcctgcggtgggaacccgtgcccagggcgcaaggatttcttctccattggcagcctgaggggggacaggaacaatcacgggtgctcggtccagaactgtcgtcctaccatctggatggactcgaacctgcaactcagtatagagtgcgtctgtcggtgctcggccctgcaggtgaaggccctagcgcagaagtcaccgctagaactgagtcacccagagtgccttcgatcgaacttcgcgtcgtggatacttctatcgattccgtgaccctggcatggacgccggtgtcaagggcgtcgtcctacattctctcttggcgtccgctgcgaggccctggtcaggaagtgcctggatccccgcagacgttgcctggcatctcatcgtcccagagggtgaccggcttggaacccggtgtgtcttacatcttttcacttaccccagtccttgatggagtccgaggtcctgaggcgtcggtcactcagacccccgtctgcccacgcggacttgcagatgtggtgtttctgccgcatgcaacccaagataacgcccatcgcgcagaagctactcgccgcgtgctggaacgtctggtgcttgccctggggcctctgggaccacaggcggtgcaggtggggctcctgtcctattcccaccgcccctcccctctctttcctcttaacgggtcgcacgatctgggcatcatcctgcagcgcatcagggatatgccatacatggacccgtccggaaacaacctcggaaccgcagtggtcacggcacatcgttacatgttggcaccagatgcaccaggacgtagacaacacgtccccggagtcatggtcctgctggtggacgagcctttgagaggcgacatctttagcccaatccgggaggcccaagcatccggactgaacgtggtgatgctgggcatggcaggggcagacccggagcagctgcggcgccttgcaccaggtatggactcagtgcaaactttctttgcagtcgatgatggtccttcacttgatcaagcagtgtctgggttggccaccgcgctctgtcaggcatcgtttactacccagccacgaccagaaccttgccctgtgtactgtccaaagggtcaaaagggagaaccgggagaaatgggacttagaggacaggtaggacctccgggggatcctggcctgccaggcagaactggagcccctggtcctcaaggaccaccgggatccgcaaccgcaaaaggtgaacgaggtttccccggtgcagacgggcgaccagggagccctgggagagcagggaatcctgggacgcctggtgcgcctgggctcaaaggttcacccggattgccggggcccagaggtgacccgggtgaaagaggtccacgcggaccaaagggcgaacccggggctccgggtcaggtgattggcggagagggaccaggactgccaggtcgaaaaggggatcccggaccctccggaccgccagggccacgcgggcccttgggagatccaggccctaggggtccaccaggcctgcctggtaccgcaatgaaaggcgacaaaggagataggggagagcgtggacctccaggaccaggagaaggtgggatagcccccggtgagccaggactgcccggtctgccaggttcgccgggaccccaaggtcctgtcggaccgccgggcaagaagggagaaaagggagattcggaagatggcgccccgggacttcctggacaacctggcagcccaggagaacagggtccaaggggaccacccggtgcaatcggccccaaaggagatcggggatttcctggacctctcggtgaagctggggaaaagggggaacgaggacctcctgggcccgccggctcccgtggactccctggggttgccggaaggcctggtgcgaagggaccagaggggcctccaggaccaactgggcgccagggagagaaaggagaaccaggcagacccggtgatcctgccgtggtggggcctgctgtggcaggtccaaaaggagagaaaggggatgtggggccggcgggaccccgaggagcaaccggggtccagggtgaacgggggccacctgggctggtgctgcccggtgaccccggtcccaaaggtgaccctggagatagaggtccaatcgggcttaccggcagagcaggacctcctggagactccgggccgcctggagaaaaaggtgaccctggacgtcctggaccacccggcccagtcgggcccagaggtcgggatggtgaagtgggcgaaaaaggcgatgaaggacctcccggcgatcctggccttcctggaaaggcaggcgaaagagggctgcgtggcgcgcctggggtgagaggacccgtcggagagaagggtgaccaaggagatcccggtgaggatggtcgaaatggatcccctggctcaagcggtccaaagggagatcgtggagaacctggtcctccgggtcctcctggcaggcttgtggatactggaccaggagccagggagaagggggaaccgggtgaccgaggtcaagaaggacctcggggtcctaagggagatcctggactccccggtgcgcccggtgaaagaggaattgaaggctttcgtgggcctccaggccctcagggagatcccggggtccgcgggccagcaggtgagaagggagacagaggacctccgggactggacggtcgctcgggacttgatggtaagccaggtgcagcgggcccatcaggtccaaatggtgcggcaggcaaagctggagatcctggtagagatggactgcctgggctccgcggagaacagggcctgccagggccgtcaggacctccagggcttcctggtaaacctggtgaggacggtaagcccggcctgaacggaaagaacggcgaaccaggagatcccggagaagatggaagaaagggtgagaaaggggattccggagcatcgggacgggaggggcgggacggaccgaagggagaacggggcgccccgggtattctcggaccacaaggacccccaggactccccggacctgtcggacctcctggacaaggattcccaggagtgcctggaggtaccggcccgaagggcgaccgcggagaaaccggtagcaagggcgaacaaggcctcccaggggaacgcggtttgcgcggcgagcctggttcagtgccaaacgtggatagactccttgaaactgcaggcattaaagcaagcgcactgcgggagattgtggaaacgtgggacgagagcagcgggagctttctccctgtgcctgagaggcgcagaggacccaagggtgattccggcgaacaagggccgccaggaaaggaagggccaataggtttcccaggcgaacggggcctgaagggtgacagaggcgacccgggaccgcagggtccacccggactggcactgggggagagaggtccacctgggccttcgggcctcgccggagaacctggaaagcctggaatcccaggtttgcccggtagggccggtggtgtcggagaggcaggtcgaccgggggaacggggcgaacggggtgaaaagggcgaaagaggtgagcaaggcagggacggaccccctggactgccaggcacccccggaccgcccggcccaccaggtcctaaagtctcggtcgatgagccgggtcctggcctcagcggagagcagggaccgccaggcctgaagggcgctaagggggagcccgggagcaatggcgatcaaggtcccaaaggggaccgcggcgtgccaggtattaagggagatagaggggaacccggccccagaggacaagacggcaatcctggtttgccaggagaaaggggtatggcaggtccagaaggtaagcccggactccaaggaccaagaggacctcccggaccagtcggaggccacggagatcctggacctccaggagcacccggccttgcaggtcccgcagggccccaaggcccatctggtcttaagggggaacctggggaaaccgggccaccaggtagaggtcttaccggaccaaccggggccgtggggctgcccggtccgccaggcccgtctggtctggtgggaccacaaggtagtcctggattgcctggccaggtgggagaaactggaaagcctggagcgcctgggagagacggtgcaagcggaaaagatggtgacaggggttcaccaggagtcccaggttctcccgggctgcctggaccagtgggcccaaagggagagcctggacccactggagcacccggacaagcagtagtgggacttccgggggccaagggtgagaagggagcccctggtggactcgccggtgaccttgtgggggaacctggcgcaaaaggagatcgagggcttcccggaccccgtggagaaaagggggaggctggacgtgccggagaacctggagatcctggtgaagatggacaaaagggagcacctggcccaaaaggatttaagggggatcccggcgttggcgtgccggggtcgcctggtcccccaggccctccaggagtcaagggtgacctgggcctgcccggccttcccggcgcaccgggagttgtggggtttcctggtcaaaccggccctcggggtgaaatggggcagcctggccccagcggtgaacgtggtcttgcgggacctcctggccgggaaggtatccctggcccacttggccctccgggtccgcctggatcagtcggacccccaggtgcctcaggcctcaagggggataaaggggaccctggcgttgggctccctggacctcgtggtgaaaggggcgagcctggaatacgtggagaagatgggcgtccgggacaggaaggtccccgcggactgactggccctcctgggtcacgcggtgaacgcggggagaagggtgacgtcggcagcgcaggactgaagggagacaaaggtgatagtgctgtgattcttggcccgccgggacccagaggggcaaagggtgatatgggagaacgggggcctagaggtttggatggagacaaggggccgcggggcgataacggcgacccaggggacaaaggttccaagggtgagccgggtgacaagggaagtgctggacttcctgggctgagaggacttcttgggccccagggccaaccaggggcagccgggattccaggtgatccaggatccccaggaaaggatggcgtgcctgggattagaggagagaagggcgacgtcggattcatgggtccacgcggcctcaagggcgaacgcggtgtcaagggtgcctgtggactcgatggagagaaaggagataaaggagaagctggcccacccgggcggccaggactggcaggccataaaggggaaatgggcgaacccggggtgcccggtcaaagcggcgcaccaggcaaagaaggtctgattgggcccaagggagatagggggtttgatggtcagccagggcctaaaggagatcagggcgagaaaggcgagcgcggaaccccaggaattggtggctttccaggtccctccggtaacgatggttcggcgggtcctccagggccacctggttcagtcgggcctcgcggacccgaaggcttgcaaggacagaaaggggagcggggtccaccaggcgagagggtggtcggagcgcctggtgtccctggtgcacctggagaacgtggtgaacaaggtaggccgggaccagccggacctagaggagaaaaaggtgaagccgctcttaccgaagatgacattcgtggtttcgtgcggcaagaaatgtctcaacactgtgcctgccaaggtcagtttatcgcaagcggatcgcgccctctcccatcatacgccgcggataccgccggatcccaactgcacgcggtgcctgtgttgagagtgtcgcatgctgaggaagaagaacgtgtgccacctgaggacgacgaatacagcgaatactccgaatactcggtcgaggagtaccaggatcctgaagcgccgtgggacagcgacgatccatgttccctgccacttgacgaaggctcgtgcaccgcatacactcttcggtggtaccacagagcagtgactggctcaaccgaggcgtgtcatccgtttgtgtacgggggttgcggaggaaacgcaaataggtttggtactcgtgaagcatgcgaacggcgttgcccccctcgagttgtccagtcccagggtaccggaaccgctcaagac

SEQ ID NO: 9566 - DNA, 8832 bp, synthetic construct
  misc_feature 1..8832: note = source = /note="Description of Artificial Sequence: Synthetic coding sequence"
  source 1..8832: mol_type = other DNA
atgaccctgaggctgttggtggccgcactgtgcgcggggattctggcagaagctccaagggtgagggcccagcaccgggaaagggtgacttgtacaaggctctatgcagccgatatagtgttccttctggatggaagctcttccatcggtaggtccaactttcgtgaggtcaggtcattcctagagggcctcgtgctgcctttctctggtgccgcatccgcgcagggcgtgagatttgccactgtacagtactccgacgaccctcgaaccgaattcggactcgacgctctgggctccggtggagacgtgatcagagctattcgcgaacttagttacaaaggaggaaacactcgcacaggtgccgctatccttcacgtggctgaccatgtgtttctgccccaacttgcgagaccgggtgttcccaaagtgtgcattctgatcaccgatggaaagtcccaggatcttgtggacaccgcagcacaacgcctcaagggtcagggtgtgaagctcttcgctgtgggcatcaagaacgctgaccccgaagaactcaaaagagtggcaagtcaacctactagtgactttttttttttcgtgaacgattttagcatcctcaggaccctgctgcctcttgtaagcagacgcgtctgcactacagccgggggagtgccggtgacaaggccgccagacgactctactagtgccccacgggacctcgtcctatctgaaccttcctctcagagcctccgggtgcaatggacagctgcctcgggaccagttaccggatacaaggtgcagtacacgccacttactggcctcgggcagcccctgccttctgaacggcaagaggtgaatgtaccagcgggcgaaacctccgttaggctgaggggcctgcgccccctgactgaataccaggtgactgtgatcgccttatacgctaattctataggggaagccgtatccggaactgccagaacaaccgccctagaaggcccagaattgacgatacagaatactacagcccacagtctgttagttgcttggaggagtgtgccaggggcaactggttatcgcgtgacctggcgtgtgctttctggcggccctactcagcagcaggagttaggacccgggcaggggtccgtcctgttacgggacctcgaaccaggaacagattatgaagtgacagtgtcgactctgtttggcagatcagtcggtcctgcaacgtcactgatggcccggactgacgcctctgtggagcagaccctgcgaccagttatcctaggacctacctcgatattgctctcatggaatctcgtgccggaggctagaggctaccgccttgagtggcgccgcgagaccggactagaacccccccaaaaagtcgttcttccttcagatgtgacccggtatcaactggacggactgcagcccggaacagagtatagacttacattatatactttgttagaagggcacgaggtggctacaccagctactgtagttccaacggggccggaattgcccgtttcaccagtgactgatctacaagctaccgaattacccggccagagggttcgcgttagctggtcacccgtcccaggtgctacccagtaccgaatcattgtgcggtctacacagggagtagaaagaacgttggtcctgcctggaagccaaacggcgttcgacctggacgacgtgcaggccggcctgtcatacactgtccgggtgagtgccagagtcggaccacgagagggctccgcctctgtgctgactgtacgcagagagcccgaaacacctctggccgtgcccggactgagggtggttgtctcagatgcaaccagggtaagagtggcatggggtccagtgcccggcgcctcagggttccgcatctcttggagtaccggatccggtcccgagagttcccagactcttcctccagactctaccgccacagatatcaccgggttgcagcctggaaccacctaccaggttgccgtgtcggtgttgaggggtcgcgaggaagggcctgccgctgttatcgtggctcgtaccgatccacttgggcctgtacgaacagttcacgtgacgcaggcaagtagcagctcggtcactatcacctggaccagagtccccggagcaaccgggtatcgagtttcctggcattccgcccatgggcccgagaagagtcagctggtgtcaggggaggcaaccgttgccgaacttgatggattggaacctgacacagagtacaccgtgcacgtcagagcccacgtagccggcgtagacggacctcccgctagtgtcgtggtccgaaccgccccggagcctgtgggtagagtgagcaggttgcaaatcctgaacgccagttctgacgtgctgaggatcacttgggtgggggtaacaggcgcgacggcatatcgactcgcgtggggacgttcagagggaggacccatgaggcaccaaattctgccaggtaacaccgactctgccgaaattcgcggactggaaggaggagtctcatatagcgtccgggtgacagcgctagtgggtgaccgtgagggtacccccgtgtcaatcgttgtgaccacccccccagaggccccgccggcactggggacacttcatgttgtccagagaggagagcatagcctgaggctccggtgggagcctgtcccgcgtgcccagggctttcttctgcattggcagcccgagggcggtcaggagcagagccgggtgctgggcccagaactgagctcatatcacctcgacggactcgagcctgccactcagtaccgcgtccgcttgagcgtgttaggtcccgcgggcgaaggcccatcggccgaagtaacagccagaacagagagcccccgagtgccctcaatcgaattacgggtcgtcgatacttcgatcgatagcgtcacactggcttggacccccgtctccagagctagttcatatattctgtcttggcgacccctgcggggtcctggccaggaggtacctgggtcacctcagacactacctggcatatcaagttctcaacgggttacaggcctcgaaccgggcgtgtcttatatcttttccctcacccccgttctggatggcgttcggggccctgaagcctcagtcacccagactcccgtgtgcccacggggactggcggacgtggttttcttgccacacgcgacgcaggataatgcacatcgagccgaagccacccgaagggttcttgagcggctagtcctggccttgggacctcttgggccccaagcagtgcaggttggcctcttgagttactcccacaggccttcacctctgttcccactaaacggctcgcatgaccttggtatcattctacagaggatccgagatatgccatatatggacccatccggtaacaaccttggaaccgctgttgtcaccgcccaccggtacatgttagcccctgacgctccagggcgcaggcagcacgtccccggagttatggttcttttggtggacgagccactgagaggagatatctttagtccaattagagaggcccaggcgtccgggctgaatgttgtgatgctaggcatggcgggcgccgacccagaacagctgcgtcgtctagccccaggcatggatagcgtgcagactttcttcgcggtcgatgacggaccaagcctagatcaggcggtttctggtctcgcaacagctttatgccaagcctctttcacgacccagcccaggcccgagccatgccctgtttactgccctaaggggcagaagggggagccgggagagatgggccttagggggcaagtcgggccacccggagatcccgggctaccagggcgcactggtgctcccggcccccagggcccgcccggctccgcaaccgcgaaaggtgagcgcggctttcctggagcagatggacgcccgggctctccaggtagggccgggaaccctggaaccccaggcgctcccgggttaaaaggctccccggggctgccgggtccgcgtggcgaccctggggaacggggaccaagaggtcctaaaggggaaccaggtgcgccgggacaggtgattggaggagagggccccggtcttcctggcaggaagggagacccaggcccctcaggaccccctgggccacgtggcccactaggtgacccagggcctcgagggccgccagggctgccaggcactgccatgaagggtgacaaaggagaccggggagaaagggggccacctgggcctggcgagggaggcatagccccaggcgaacccggcttaccaggtcttcccggttcccccgggcctcagggcccagttggtcctccgggtaaaaagggggaaaagggcgacagcgaagatggagcacccggcctgcccggtcagccaggtagccccggtgagcagggtccccggggtcctccgggtgccatagggcctaagggcgataggggatttcctggtcccctgggcgaggcgggcgagaagggggagaggggcccaccagggccagctgggtctaggggactgcccggagtggcaggcaggcctggagctaagggacctgagggcccccctggccccactggaaggcagggcgagaagggggagccagggaggccaggggatccagctgtggtagggcccgccgtggccggccccaaaggagagaagggggatgtggggcctgccgggccacgcggagctacaggagtgcagggcgaacggggtccgcccggcttggtgctgccaggcgatcctggaccaaaaggggaccccggggatcgtgggccaattggattgacagggcgcgctggaccacccggagattccggtccaccaggagagaagggggatcctggacggccaggtccccctggccctgtggggccgagaggccgagacggagaagtcggcgagaagggggacgagggccctccaggagacccgggtctgcccggcaaggccggcgagaggggactgaggggagctccgggcgttaggggacccgttggcgaaaagggggaccaaggcgacccaggtgaggacgggcgaaacggcagcccaggatccagcgggcccaagggtgatcgcggcgagcccgggcccccaggccccccggggcgactggtggacacaggccccggtgctcgcgaaaagggagaacctggtgaccgcggccaggaggggccgcgggggcccaagggcgatccaggtttgcccggagcaccaggggagagaggcatcgaagggttccggggaccacccggcccgcagggagacccaggcgtgcgaggccctgcaggtgagaagggggatcgggggcctccaggactggacggacgtagcgggctcgacgggaagcccggagccgcggggccatcaggccccaatggagccgctggaaaagccggtgaccccggacgcgatggtctccctggtctgcggggagagcaagggctgccagggccttccgggccacctggcctgcctgggaagcccggggaagatggaaagcccggtctgaatggaaaaaatggtgagccaggcgaccccggggaagatggcaggaagggtgagaagggagatagtggcgcatctggccgagaggggagggacggtcccaagggcgaacgtggcgcaccgggcatcctcggcccccaagggccgccgggactccctggccccgtggggccgccgggtcagggtttcccaggggtgcccggtggaaccggccccaagggggaccgtggcgagacaggcagcaagggagagcagggcctgccaggcgaacgtggcctgagaggcgagcctggatctgtgcccaacgttgaccggctgcttgagacggcgggcatcaaggctagcgcactgagggagattgtggagacgtgggacgagagtagcgggagcttcctacctgtgcccgaacgccgcaggggccccaaaggtgattcaggagagcaggggccccccggcaaggagggacccatcggatttccaggggagcgaggcctgaagggagaccgcggtgatccaggcccccagggacccccaggtctcgccctaggagaacggggccctcctggtccgagcggtcttgcaggtgagccagggaaacccggcatccctggccttccaggaagggcagggggtgttggtgaagccggccgaccaggggagagaggcgagcgcggggagaagggagagcgcggggagcaaggcagagacggcccacctgggcttccagggactccaggaccaccgggacctccaggtccgaaagtgagcgtcgacgagcctggacccggcctcagtggcgaacaggggcctcccgggctgaaaggcgctaaaggcgagccaggctctaatggagatcaaggtccgaagggtgatagaggcgttccaggaattaaaggagaccgtggggaaccaggaccccgcggccaggatggaaatccaggtctgccaggcgaacgcggtatggccggacccgaagggaaacctggtctgcagggcccccgcggcccacctggcccagtgggaggtcacggcgaccccgggcctccaggggcccctgggctggccggacccgctggtccccagggtccttctgggttgaaaggcgagcccggcgagacgggtccccccggcagaggtttaacgggcccaacgggggcagttggactccccggaccccccgggccctccggactcgttggacctcagggctcacccggcctgcctggccaggtaggcgagacaggcaaaccaggcgcccccggccgggacggagcaagtggtaaggacggagaccggggatctcccggagtgccgggtagtccgggattgcccggcccagtggggcccaaaggggaaccaggacccacaggtgctcccggccaggctgttgtcggattgccaggagccaaaggagagaaaggtgcacctgggggactggccggcgacctcgtgggcgaacccggcgccaagggtgaccgaggcctccctggaccacgtggggagaagggtgaggccggccgagccggagagcccggggaccccggcgaggacggccagaagggagccccagggcctaagggatttaagggagacccaggcgtgggcgtgccaggttctcctggtcccccaggtcctccgggcgtgaagggagatctggggctgccaggccttcccggggcccctggggtcgtgggcttcccaggtcagacgggcccacggggggagatggggcagcccggaccctctggggagcggggactggcaggacccccaggacgggaaggcatccccggtccactgggcccccctggtcccccgggctctgtcggaccgcccggagcaagcggtctcaaaggggataagggagatcctggcgtgggcttgcccggacctcgcggcgaaaggggagagcccgggatccggggagaggatggccgaccaggccaggaaggcccccgaggtctgactggcccccctggatcaaggggtgagcgcggagaaaaaggcgatgtgggttcagctggactgaagggggataaaggagacagcgctgtgatcctcggcccacctgggcctaggggagcaaaaggcgatatgggggagcgaggccccagaggactcgacggagataaaggcccccgaggcgacaacggagaccctggcgataagggttcaaagggggagccgggggacaagggctctgcgggactgcctggactgcggggactgctggggccccaaggacagccgggagcagcaggcatcccgggcgatcctgggtccccgggcaaagatggagtccccggtatccggggcgagaagggcgacgtcggttttatgggacctagggggctgaagggggagcgcggcgtgaaaggagcctgcgggcttgacggggagaagggtgacaagggggaggctggcccccctggcaggccaggcctggccggacataaaggagagatgggtgagccgggcgtccccggccaatctggggcacccgggaaagagggacttatcggaccaaagggggacagaggctttgatggacaaccgggcccgaagggggaccaaggggaaaagggcgagcggggcactccgggcatcggaggatttcctggtccttccggaaacgacggctccgccggccccccggggcctccaggaagcgtcgggcctagagggccggagggcctgcaggggcagaagggagagcggggcccaccgggcgagagagtggtaggggcgccaggcgtcccaggcgcgcctggtgaacgcggcgagcaggggagaccagggcctgccggccccaggggggagaagggtgaagccgcactgaccgaagatgacattcgtggcttcgttagacaggaaatgagtcaacactgtgcttgccaaggtcagttcatcgcatccggctcaaggcctctcccgagctatgctgcagataccgcgggaagccagctgcatgctgtgccagtgctgagagtaagtcacgctgaggaggaggaaagagtgccccctgaagatgacgaatacagtgaatactctgagtactcagtggaagaataccaagaccctgaggccccttgggattcggacgacccatgtagcctgccattagatgagggctcctgtactgcctacacgctacggtggtaccaccgcgctgtgacgggaagtactgaggcgtgtcaccccttcgtgtacgggggatgtgggggcaatgcgaaccggtttggcacacgtgaggcctgtgagcgccgttgtccaccccgtgttgtccagagtcagggaaccggaactgcccaggac

SEQ ID NO: 9567 - DNA, 8832 bp, synthetic construct
  misc_feature 1..8832: note = source = /note="Description of Artificial Sequence: Synthetic coding sequence"
  source 1..8832: mol_type = other DNA
atgacgctgagacttttagtggctgctctatgtgcgggtattctggcagaggctccacgcgtgcgagcgcagcatcgtgagcgggtcacctgtactcgtctttatgctgcagatatagttttcctccttgatggatctagttcaatcggaagatctaattttcgtgaagtaagaagttttctagaaggtctagtactaccgtttagtggagctgctagcgcccagggtgtgagatttgccacagtgcaatatagcgatgatccgaggacagagttcggattggatgcgcttggaagcggtggagacgttattcgggccatcagggagttgtcatataagggagggaatacgagaacaggagcagctattctacacgttgccgatcatgtctttttaccacaactggcccgtccgggagttccaaaggtgtgcattttgatcaccgatggcaagtctcaagatttagtggatacagctgcacagagattaaaaggacaaggagttaagctttttgcagttggaattaaaaacgccgatccagaggagcttaaacgcgttgcttcgcaaccaacctcggatttcttcttttttgttaacgatttctccattctacggaccttgcttccgcttgtgtctcggagagtatgcacgactgctggaggtgtcccagtgacacggccgccggatgattcaacatctgctccacgtgatctagtgctatcagagccatcatcccagtcccttcgggtgcagtggacagcagcttcaggtccagttaccggatacaaagtgcagtacactccgctcacgggtctcggccaacctctcccaagcgaaagacaagaagtaaatgtcccagctggagaaaccagtgtacgattgcgtggtctcagaccacttacggaataccaagttacagtgatcgcattgtatgccaattcgattggagaggctgtttcgggaaccgctaggacaacagcactagaaggaccagaacttacaatccagaacactactgcccattctttgttggtggcttggcggtctgttccaggagccacgggatatcgggttacttggagagttctcagtggggggccaactcagcaacaggagcttggtccaggacaaggctcggtgttattaagagatctcgaacctggaacggattacgaagttacagtctcaactcttttcgggcgatcagttggacctgctacttcgctcatggctcgcactgatgctagcgttgagcaaacacttcgaccagtaattttaggaccgacatcgattctactgtcttggaacttggtgccagaggctcgagggtatcggcttgaatggcgacgggaaacaggtctagagccacctcaaaaggttgtcctgccaagtgatgttacaagataccagctagacgggctacagccaggaaccgaatataggttaactctttatacacttctcgaaggacatgaggtggcaaccccagctacagttgtgccgactggaccagaactgccagtctctccggtgacagacctacaagctacagagctaccagggcagcgagtccgggtttcgtggtcaccagttccaggagcaacccagtatcgaattatagtgcgttcgactcagggagtggagcgtacattggttctaccaggcagccaaactgcttttgacctcgatgatgtccaggctggactctcgtatacagtgcgagttagtgctcgagtgggaccacgagagggtagcgcatctgtacttacagtccgcagagaacccgaaacacctttggctgttcctggattgcgtgtggtagtttcggatgcaactagagtacgtgttgcttggggaccagttccaggagcttcaggattccgaatctcatggagtaccggatctggaccagagtcatcacagactttgccacccgattcaaccgccacagatatcactgggttgcaaccaggaacgacttatcaagtcgctgtaagtgtgcttcgagggagggaggagggtcctgcagctgtcattgtcgctcgaactgaccctttaggaccagttagaactgtacatgtgacgcaggcgtcctcgtcatccgtgacaattacttggacaagagttccgggtgctactggttatagagtgtcgtggcattcagcacatggtcctgaaaaaagtcaattggtcagtggcgaggcgacagtcgccgagcttgatggattggagccagacaccgaatatacggttcatgtacgagcccacgttgctggagttgacggacccccagcatctgttgtggtaaggaccgcccctgaaccagtcggacgtgtttcaagactccagattctaaatgcttcgtccgatgttttgcgtattacttgggtcggagtaactggagctactgcttatagactagcttggggaagatcagaaggagggccgatgagacatcaaattttgccagggaatactgactccgctgagattagaggactggaaggtggtgtatcatattccgttcgggtcaccgcacttgtgggagacagagagggaacgccagttagcatcgttgtgacgacgccaccagaggcaccaccggcactgggaacattgcatgttgtgcaacggggggagcattcgttgagactcagatgggaaccagtgccaagagcccaagggtttttgcttcattggcaaccagagggtggccaagagcagtctcgtgttctcggaccagaactgtccagttaccacctggatggtcttgaaccggcaacgcaatatcgagtccggctttcggtcctcggaccagcgggcgaaggaccaagtgcagaggtaactgctagaacagagtctccgcgggttccaagcattgaactgcgtgttgtggatacaagtattgatagcgtaactctagcttggacgccggtctctagagcgtcgtcatatattttgagctggcggcctcttagaggtccaggacaggaagtgcctggatcaccacagactctcccgggaatctcaagttcacaacgtgttacaggactggaaccaggagtgtcttacattttttcccttacgcctgtgttagatggcgttcgtggacctgaagccagcgttacacagacgcctgtatgtccgcgaggtttagcagatgtcgtgttcttgcctcatgccacgcaagataatgctcatagagcggaggcgacgaggagggtattggagaggcttgttctagcacttggacctcttggaccccaggcagtccaagttggattactaagttattcacaccgcccatcaccactatttccacttaacggtagccacgatttgggaataatcctccagcgtatccgtgatatgccatacatggacccatcggggaataacttgggaactgcagtggtgactgcacatcgttacatgctggcaccagatgcaccgggacgtcgtcaacacgtacctggagtgatggtattgttggttgatgaacctttgcgaggagatattttctccccgattagagaggcccaagctagtggacttaatgtggtcatgttgggaatggcaggggcagatccagagcaacttcgtagattggcccccggaatggatagtgtccagactttcttcgcggttgacgacggaccctcgttggaccaagctgtgtcgggtctggcaacagctctctgtcaggcctcttttacaacacagccacgaccagaaccttgcccagtatattgtccaaaaggtcaaaaaggagagccgggagaaatgggacttcggggccaagtgggacctccaggggatcccggacttccaggcaggacaggcgcgcctgggccacagggaccaccaggcagcgcaactgcgaaaggagagcgaggatttccgggtgctgatggtcgaccaggttcgcctggacgtgcaggaaatccgggtacaccgggagctccaggtctcaaaggcagcccaggtttgccagggccacgaggcgatccaggagagcggggtccaagaggcccaaaaggagagccaggcgcacctggacaggttatcggcggtgaaggaccaggactgccagggcgtaaaggagaccctggtccatctggtccacctggacctaggggaccattgggagatccaggtcctcgcggaccgccagggctgccaggaacagctatgaaaggagataaaggtgaccgtggagaaagaggaccacctggacctggtgaaggaggaattgcgccgggagagccagggcttccaggattgcccggctcgccagggcctcaaggacccgttggtcccccaggaaaaaaaggagagaaaggagactcagaagacggagccccaggactcccaggacaaccgggttctccaggtgagcaaggcccacgaggacctcctggggctattggtccgaaaggagacagaggatttccaggtcctcttggagaagctggagaaaagggagaaagaggaccaccaggtcctgctggatcacgaggactcccaggtgttgcaggaagacctggagcgaaaggaccagagggtcctccaggacctaccggacgtcaaggtgaaaagggagaaccaggaagacctggagatccggcagttgtaggacctgcagttgccggtccaaagggagagaaaggagacgtgggaccggcaggtccacgtggcgctacaggagttcaaggagagagaggaccaccgggattggttctacccggagatccaggaccaaaaggagacccaggagatcgtggaccaatcggcctgaccggacgagccgggccaccaggtgattctggaccaccaggagaaaaaggagatccaggccgcccaggcccaccaggaccagtgggacctagaggaagggacggcgaggtgggagagaagggagatgagggaccaccaggtgacccagggcttcctggaaaggcaggagaaagaggactcagaggtgcgccaggcgtgagaggaccagttggagaaaaaggtgaccaaggggatcctggcgaagacggacgaaatggatcgccaggatcatctggaccaaaaggtgatagaggagagccaggaccgccaggaccaccggggcgattagttgacacagggccaggcgcgcgcgaaaaaggagaaccaggtgatagaggacaagaaggaccaagaggaccaaaaggagatccgggcttaccaggagcccctggagagcggggaattgaaggattccgtggcccacctgggccacaaggtgatccaggggtccgtggtcctgcaggagaaaagggcgatagaggaccaccgggactagacggacgttcaggattggatggaaagccaggcgcggctggaccatctggacctaatggggccgcgggcaaagctggagatccaggtcgcgatggattaccggggttgcgcggggaacaaggtctaccgggtccttcaggaccaccagggcttccaggaaagccgggagaagatggaaagccaggattaaatggaaagaacggagaaccgggtgacccaggcgaggatggaagaaaaggagaaaaaggagattcaggagcctcgggaagagaaggacgagatggacccaaaggagagcgaggtgctcccggaattttgggacctcaaggacctccaggactgcctggaccagtcggaccaccaggtcaaggattcccgggagttccaggaggaacaggtccaaaaggggataggggagagacagggagtaagggagagcaaggtctaccgggcgagagaggtcttagaggtgagccaggctctgtaccaaatgttgatcgtctgttggaaactgcaggaattaaggcatcagctttaagggaaatcgtggaaacatgggacgaatcttctggatcgtttctaccagtcccagaacgtcgtcgaggacctaaaggagattcaggtgaacaaggccctccgggaaaagagggaccaattggattcccaggagaaagaggtctaaagggtgatcgcggtgaccccggtcctcaaggacctccgggtctcgcactaggagaacgagggccgcctggacctagcggacttgcaggagaaccgggtaaacctggaattccaggactgccaggtcgcgcaggaggggtcggagaggccggtagaccaggcgaacgaggggagcgcggagaaaaaggagaacggggagagcaaggaagagacggaccgccgggcttgccagggactccgggacctcccggacctccaggaccgaaagtaagtgtcgacgagccaggacctggcctcagtggtgaacaaggaccacctggtctcaaaggtgctaagggagagccagggagcaacggagatcagggaccaaagggtgataggggagttccaggaattaaaggggaccgtggagaaccagggccgcggggacaagatggaaatcccggattgcctggtgaacgcggaatggctggaccggaaggaaaaccaggattgcaaggccctagaggaccaccgggaccagtggggggacatggagatccaggaccacccggagcgccaggcctggcgggaccagctggaccacaaggacccagtggtttgaaaggagaacctggagagacgggaccacctggacgtggattgaccggaccgaccggagccgttggacttccaggcccgccagggccttcgggactggtcggaccgcaaggttctccgggactcccgggccaggttggagaaacagggaagccgggagcgccagggagagacggtgcttccggaaaggacggagaccgaggatcaccaggagtccctgggtcgcctggtctccctgggccggtagggcctaaaggagaaccaggaccaacaggggctccgggacaggcggtagtaggattaccaggagccaaaggcgagaaaggtgccccgggaggcctcgctggagacttagtgggagagccgggagctaaaggagatagaggattgccaggaccaagaggagagaaaggagaggccggaagagccggagagccaggagatccaggagaagacggacaaaaaggtgctccgggccctaaaggatttaaaggggacccaggagttggggtcccaggatctccaggcccaccgggaccaccaggagtaaaaggagatctgggtctgccaggactgccaggagctccaggagtggtgggttttccgggacaaacgggaccacgaggcgaaatgggacaacctggacccagtggagagcgtggtctggctggaccaccgggcagggaaggaataccggggcctttggggccaccaggtccaccgggatcagtggggccaccaggagcttctggattaaaaggagataagggtgatccaggagtcggtcttccgggcccaagaggagagcgaggagagccaggtatccgtggggaggatgggcggccaggccaggaaggacctagagggcttacagggcctccgggatcccgaggagaacggggagagaaaggtgatgtcgggtctgcaggcctaaaaggagataaaggcgattcagcagttattttaggaccaccaggaccacgtggtgccaagggagatatgggagaaagaggacctcgaggacttgacggagataaagggccacgaggagataatggagatccaggagacaaaggctcaaaaggcgaacccggtgacaaaggctccgctggtttgccaggtcttagaggacttttaggaccacaaggacagcctggagctgccggaattcctggagacccaggatcaccagggaaagatggagtgccaggtattcgcggagaaaagggagacgttggattcatgggaccacgtgggctgaaaggagagcgcggagttaagggagcatgtggattggatggcgagaaaggagataaaggagaagctggaccgccgggacgtccgggtttggctggacacaaaggagaaatgggagaacccggtgttccaggtcaatcgggtgctccgggaaaggaagggttgataggaccaaagggagatcgaggatttgatggtcaacctggaccaaaaggtgatcaaggagagaagggtgagcgcggaactccaggaattggtggattcccgggcccatcaggtaatgacggctctgctggacctccagggccaccaggttcggtcggaccacgcggacctgaaggcttgcagggccaaaaaggtgagcgtggaccaccgggagaacgtgttgttggagctccaggagtaccaggagctccaggtgaacgtggagaacaaggtcgaccagggcccgctggaccaagaggagagaaaggagaagcagctctaacagaggatgatattcgaggctttgtacgacaagaaatgagccaacactgcgcctgtcaagggcaatttattgccagtggatcccgacctcttcctagttacgctgctgatacagctgggtcgcagttacatgccgtcccagtccttagagtcagtcatgcagaagaagaagaacgggttccgccagaggatgatgaatattctgaatattcggaatactccgttgaagaataccaagatccagaggcgccatgggattcagatgatccttgctcccttccactcgatgaaggatcctgtacggcttatacactcaggtggtatcatagggcagtaactgggtctaccgaagcttgtcaccctttcgtctatggaggatgtggaggtaatgcaaatcgctttggaacacgtgaggcctgcgagcgtcgatgtcctcctagggtggttcagtcacaaggaactggaactgcccaagat

SEQ ID NO: 9568 - DNA, 8832 bp, synthetic construct
  misc_feature 1..8832: note = source = /note="Description of Artificial Sequence: Synthetic coding sequence"
  source 1..8832: mol_type = other DNA
atgacccttagactcttggtggctgcactttgtgcaggtattttggcagaagctccacgggtgcgggcccagcatagggagcgtgtgacctgtactcgattgtacgccgcagacatagtgttcctccttgatggttcctctagcattggaagatcgaactttcgcgaagtgcgatcgtttcttgaaggtctggtgctgccttttagcggtgcggcgtccgcacaaggagtgagatttgctactgtgcaatacagcgatgaccctcggacggaatttggactggatgcactcgggtcgggtggtgacgtgatacgtgcaatcagagaactctcctacaaaggaggaaacactcgcactggagcggcaattcttcatgtggcagaccatgtgttcctgccacaactggcaagaccgggtgtgccaaaggtgtgcattcttataactgatggcaaatcgcaagatctggtcgataccgcagcgcagcgccttaagggtcaaggagtgaagctctttgcagtcggtatcaaaaatgcagaccccgaagaactgaagcgtgtcgcatcgcaacctacctcggatttcttcttttttgtgaacgatttttcgatcttgagaactcttctgccacttgtgtcaagacgcgtttgcactaccgcgggtggtgtgcctgtgacccgaccaccagacgatagcacttccgcaccacgcgatcttgtgctcagcgagccttcgtcacagtcccttagagtgcaatggacggcagcctcgggcccagtgaccggatataaggtgcagtacacccccctcaccggacttggacagcctcttccgtcggagcgccaggaagtgaacgtccccgcgggtgaaaccagtgtgcggctgcgcgggctgcgcccactgacggagtaccaagtcacggtgatcgcactttacgccaactccattggagaagcagtgtccggaactgcgaggactactgctctcgaaggacctgaactcactattcaaaacactaccgcacactcgctgcttgtggcctggagatccgtgccaggagcaacgggttaccgggtgacttggcgcgtgctgagcggcggtcctacccagcaacaggaattgggtcctggtcaaggatcggtgctcctgcgagatctcgaacctggaactgattacgaagtgaccgtgagcactctcttcggccgctcggtcggtcctgcgacctcccttatggccagaacggatgcctcggtggaacaaactctgcgaccagtcattcttggccctacttcaatcttgctgtcgtggaaccttgtccctgaagcgcgcggttatcgcctggaatggcggcgagaaaccggcctcgagcctcctcaaaaggtcgtgctgccgtctgacgtgaccagataccaacttgatggtctgcaaccaggcaccgaatacagactcactctctacactcttcttgagggacatgaagtggcaacccctgccactgtcgtgcccactggacctgagctcccagtgtcgcccgtcacggatctccaggcgacggagctgcctggtcagcgagtgcgggtcagctggtcccctgtgcctggagcaacccagtacagaatcatagtgcgtagcactcagggagtggaaaggaccctcgtgttgcccggttcacaaactgcctttgatctggatgacgttcaagcgggcctgtcctacactgtcagggtttcggctagagtgggtcctcgagaggggtcggcatccgtgcttaccgtgaggcgcgagcctgaaacccctctggctgtgcctggactgcgtgtcgttgtctcggatgcaactcgtgtgagggttgcatgggggcccgtgcccggtgcctccggctttcgcatatcatggtccactggatcgggacccgaaagctcgcaaactctccctccagattcaactgccaccgacatcaccggccttcaacccggtacgacttatcaggtcgcagtgtcggtgctgcggggaagagaggaaggtcctgcagcagtgattgtggcacggaccgacccacttgggccagtgcgcaccgtgcacgtcactcaagcctcgtcgtcgagcgttactataacttggacccgcgtgcctggggcaaccggttacagagtgagttggcactcggcacatggtcctgaaaaatcgcaactggtgtcgggagaggcaaccgtcgctgaactggatggcctggagcccgacactgagtataccgtgcacgtccgagcacatgtggcaggcgtggacggacccccagcatccgtcgtcgtgcgcaccgcccctgagcctgtgggtcgggtcagtcgcctgcaaatccttaatgcgtcaagcgatgtgctccgcatcacctgggtcggcgtcactggcgcgacggcataccgactggcatggggtcggagcgagggaggacctatgagacaccaaatcctgcctggcaacaccgattcggccgagattcgtggactggaagggggtgtgtcatacagcgtgcgggtgactgctctcgtcggggatcgcgaagggaccccggtgtcgattgtggtcaccactccgcctgaagcacccccggcactgggtactctgcacgtggtgcagcgcggagaacactcgctccgactcagatgggagcctgtccctagggcccagggtttcctcctgcattggcaaccagaaggcggacaggagcaaagcagagtgcttggacctgagctttcctcctaccatctggatggacttgaaccagccacccagtacagagtgcgcctgtcagtccttggcccagcaggagaagggccatcggccgaagtgactgcgagaaccgaatcccctagggtccctagcatcgagctccgagtcgtggacacttcaattgattctgtgactctggcgtggacccccgtctcacgggcatcatcgtacattctgtcctggaggcccctcagagggcctggacaagaagtgccgggaagcccacaaactctcccaggtatctcatccagtcaaagagtcaccgggcttgagcctggagtgtcctacatcttttcccttacccctgtgcttgacggcgtgcgggggcctgaagccagcgtgacgcaaaccccagtctgtccccgcggccttgcagatgtggtgtttcttccgcatgcgactcaggacaacgcccaccgcgccgaggctacccgacgcgtcctcgaaagacttgtgcttgcactggggccactgggaccccaagcagtgcaagtggggcttctctcatatagccatcgcccttccccgctgtttccacttaacggctcgcatgaccttgggattattcttcaacgaattcgagatatgccatatatggatccttccggaaacaacctcgggactgcagtggtcactgcccatagatacatgctcgcaccagacgcccccggacgtagacaacatgtgccaggggtgatggtgctccttgttgatgaacctttgcgcggtgacatctttagccccatacgcgaagcccaagcctcaggactcaacgtggtgatgcttgggatggccggggccgacccagaacagctgagacgcctggcacctggcatggactcggtccagacctttttcgccgtggacgacggaccgtcactcgaccaggcggtcagcggccttgcaaccgccctttgtcaggccagcttcaccacccagccacgacctgagccttgtccggtgtactgtcctaaaggtcagaaaggagagcccggagaaatgggactcagagggcaagtgggacctcctggggacccaggactgcccggacgaaccggcgctcctgggccgcagggccccccgggttcggccactgctaagggagaaaggggctttcccggagcggatggccgtccgggatcccctgggcgtgcaggtaacccaggaactccaggggcacccgggctcaagggatcacctggtttgcctggaccaagaggtgacccgggagaaagaggacctaggggacctaaaggcgaacccggagcaccaggccaagtcattggaggagagggtcctggactcccaggacgcaagggcgatcctgggcccagtgggcctcctggtcctagaggccctctcggagatccgggtccacgcggtccacctgggcttcccggtactgccatgaagggagataaaggtgacagaggcgaacgaggcccgccgggcccgggcgagggaggtattgcaccaggagaacctggtctgccaggtttgccgggatcgccaggaccgcagggtcccgttggtccaccaggtaaaaagggtgaaaagggtgacagcgaggatggcgcacccggcctgccaggacaacctggatcacccggggagcagggaccacgggggccccctggggcaattggacctaagggagatagaggctttcctggccctcttggtgaggcaggagaaaagggagagcgcggtccaccaggacctgcgggttcaagaggtctgcctggggtcgcaggccgacctggtgcaaaaggtcccgagggtccccctggacccactggtagacagggggaaaagggagaacccggacggccaggcgatccagctgtggtgggtccagcagttgcaggccctaagggagaaaaaggtgatgtgggccccgcaggaccacggggtgctaccggcgtgcaaggagaaagaggtccgccaggactggtgctgcccggagatcccgggcctaagggggatcctggtgatagaggacctatcggactgactggccgtgcaggtccccccggagactcaggtccccctggggagaaaggggaccccgggcggccaggcccacctggcccggtgggtccaagaggacgcgacggagaagtgggagaaaagggcgatgaaggtccacctggagatccagggcttccgggtaaagccggagaacggggtctgcgtggtgcccccggagtccggggtcctgtgggcgagaagggagatcaaggtgacccaggtgaagatggacgcaacggttcgccgggtagcagcggacccaagggtgaccgaggtgagcctggaccacctggtccgccaggccgcctcgtcgatacgggtcctggagccagagaaaagggtgagccaggagatagaggtcaagagggcccacgtggtccaaagggagatcctggactgcctggagcaccaggggaaagaggaatcgagggattcagggggccaccagggccccagggagatcctggagtgaggggtccagcaggcgagaagggagatcgggggccaccaggtctggacggtagatcaggactggatggtaagccaggtgcagcggggccatcgggacccaacggagcagctggtaaagctggtgatccaggaagagacgggcttcctggactgagaggagaacaaggtctgcccggaccatcgggtccgcctggcctgcctggtaagccaggggaagatgggaagccaggtcttaacggaaagaatggtgaacccggagatcccggcgaagatggacggaagggcgagaagggagattcgggagcctcgggaagagaaggacgtgacgggcctaagggcgagcgcggcgccccgggaattctcggaccacagggacctccaggacttcctggacccgtggggccgccaggccaagggtttcccggagtgccaggcgggaccggtcctaagggtgaccgcggagaaaccggatccaagggtgaacagggcttgcctggagagcgaggcctgaggggagaaccaggatccgtgccaaacgtcgacaggctgctcgaaaccgcaggtattaaggcctccgcacttagagaaattgttgaaacctgggacgaatcctcgggtagctttcttcctgtccctgaaagacgccgaggccctaagggagatagcggcgaacaaggtccacctggcaaggagggaccgataggttttcctggtgaacggggtcttaaaggggaccggggagatccaggacctcagggacccccggggctcgcacttggagaaaggggacctccaggaccttcgggacttgcgggcgaacctggcaagccaggcattcccggactccctggaagggccggaggggtgggagaagcaggtagacctggagagcggggagaaaggggcgaaaagggtgaaagaggtgaacaaggacgcgatggaccaccgggcctcccagggacccctggcccaccaggcccacctgggccaaaagtgtccgtggacgaacctggtccaggcctctccggtgaacaaggacctccgggacttaagggtgccaagggagaacctggatctaacggtgatcagggtcccaagggcgacagaggtgtgcctggtatcaagggggataggggagagccaggacctcgtggacaagatggcaatccaggtctgcccggagaacgtggaatggcgggaccagagggtaagcccggtctgcagggtcctcggggtccgccaggacctgtgggtggccatggggacccagggcctcctggtgcaccgggccttgcaggaccagccggaccgcaaggaccctccgggcttaagggtgagcctggagaaaccggcccccctggaagaggacttaccggtccaactggcgcagtgggactccctggaccccccggccccagcggacttgtcggcccacagggatccccaggattgccaggtcaagtcggagaaactgggaaacctggagcacccggaagggatggggcaagcggaaaggatggggatcgtggatctcccggtgtgccaggatcaccgggtctgcctggacccgtcggtcctaagggtgaacctggtccaactggcgcaccaggccaagccgtggttggacttcctggagcaaaaggtgaaaagggtgcccctggaggactcgctggtgatcttgtcggagaacctggggcaaaaggggatcggggactgcccgggccgagaggagagaagggagaggccggtcgggctggggagccaggtgacccaggagaggacggacagaagggtgccccgggaccaaaaggttttaagggtgaccccggagtgggtgtgcctggatcccctggcccgcctggacctccaggggtgaagggagatctgggactgccagggcttccaggagccccgggtgtggtgggcttccccggtcaaaccgggccccgcggtgaaatgggacagcctggtccttcgggtgaacgcggacttgcagggccgcctggtcgtgaaggaattccaggccccctcggtcctccaggtcctcccggatcggtgggtccccccggagcatcaggtttgaagggtgataagggcgatcctggggtcggtttgccaggcccccgtggagagcgaggtgaacccggaatacgcggagaagatggtcgaccagggcaagaaggacctagagggttgaccgggcctccgggatcgcgtggagaacgcggggagaagggcgacgtcggatcggcaggccttaaaggcgacaagggagattccgcagttatcctgggtccccctggtcctagaggtgcaaagggcgatatgggggagaggggacctcgcggtctggacggtgacaaaggtccgcgtggagataatggtgatccaggagacaaggggagcaaaggggaaccaggtgataagggaagcgcgggattgcccggactgagaggattgctgggccctcaaggtcaacctggagcagcaggaataccgggggatccaggaagcccaggcaaggacggcgtccctggtatacgtggcgaaaaaggggatgtgggatttatgggccctaggggtctgaagggagaacgcggagtcaagggggcatgcggtctggatggtgaaaagggtgacaagggagaggcaggaccccctggacgaccaggactggccggacacaaaggggagatgggcgaaccgggggtgccggggcaatcaggcgcacccggcaaggaaggacttattggaccaaagggcgatcgaggttttgatggccagcccggaccgaaaggtgatcaaggagaaaaaggggaacgcggtactcccggcattggtggatttcctgggccgtccggaaatgacggctctgccgggcctcctggaccaccaggttcagtcggtccccggggacctgaaggtctgcaaggacaaaagggtgaaagaggtccaccaggggaaagagtggtgggggcacctggggtgcctggggcacccggagaacggggggaacagggacggccggggcccgctggaccaagaggagaaaagggcgaagcagcactcactgaagatgatattcgcggatttgtgcgtcaggaaatgagccaacattgtgcctgtcaggggcagtttattgcatcggggtcacggcctctgccatcatacgcagcagatactgcaggatcccaacttcatgccgtgccagtcttgagggtcagccatgcagaggaagaagagcgagtgccgcctgaggacgatgaatactcggagtattcggagtactccgtggaagagtaccaggaccccgaagcaccatgggattcggacgatccatgctcactgcctcttgatgaggggtcctgcactgcatacactcttagatggtaccatagagctgttactggctcgactgaagcatgtcatccattcgtgtacggtgggtgcggcggtaacgccaaccgctttggtacccgagaagcctgtgaaaggaggtgtccaccaagagtcgttcaatctcaaggtacgggaaccgcacaggat

SEQ ID NO: 9569 - DNA, 8832 bp, synthetic construct
  misc_feature 1..8832: note = source = /note="Description of Artificial Sequence: Synthetic coding sequence"
  source 1..8832: mol_type = other DNA
atgacgctgcgactgctggtcgctgccttgtgcgctggcattctggcagaggcaccgcgagtccgtgcacaacaccgagagagggttacttgtactcgtctatatgcggcggacattgtgttcttgcttgacgggtcctcatcaatagggcgaagtaacttccgagaggtgagatcattcctggaggggctcgtccttccattctccggcgcggcctcagcccagggtgtaaggttcgcaaccgtacaatacagtgacgatcctcgaacggaatttggactggacgcgcttggatccgggggcgacgtgatccgcgccattagagagctgtcttataaaggggggaacactcggaccggagcagccattctacatgtggcagaccatgtcttcttgccacaactcgccagaccaggcgtgccaaaggtctgtattctgattactgacggtaaatctcaggatttagtcgacactgctgcccagaggctaaagggtcaaggggtaaagcttttcgccgtgggcatcaagaacgccgaccccgaagaactgaagagagtagctagtcagccaacaagcgatttctttttctttgtcaatgatttcagcatcttaaggaccctgttgccactggtcagtaggagggtgtgtaccactgcgggaggagtgcccgtaacacgaccccctgatgatagcacctcggccccaagggacctggtcttgagtgagcctagttcacagtcccttagagtgcagtggaccgctgctagcggccctgtaaccgggtataaggtgcagtacactcctctaaccgggttaggacagccactgcccagtgagagacaggaggtaaacgtcccggcaggagaaacttcagtgagactgaggggattacgcccacttactgaataccaggtaaccgttatcgcactttacgctaatagtatcggagaagccgtctcaggcaccgccagaactacggctctcgaaggacccgagctgactattcagaacacgaccgctcacagtctgctggttgcttggcgatctgtgcccggagccacaggatacagagtgacttggcgcgtgttatccgggggcccaacgcaacaacaggaactgggtcccggacaggggtccgtactgttaagggacctggagcctggtactgactacgaggtgacagtctctactttatttggccgaagcgtgggaccagcgacctccctgatggcaagaacggatgctagcgttgaacaaactttgagacctgtcatcctgggtcctacatctatccttctgtcatggaatctggtgcccgaggctcgtggctatcgcctcgaatggaggagggaaactggactggaaccacctcagaaggtcgtccttccatcagacgtaacgcgataccaactggacggcttgcagcctggcaccgagtataggctgacactgtacactttgctggagggccatgaagtggcaactccggcaactgtggtgccaacgggccccgaattacccgtctcccctgtcactgaccttcaggccactgaacttcccggccagagggtaagagtgagctggtcccccgtgcccggagcaacccaatacaggatcattgtgagatccacccagggggtggaaagaaccctcgtgcttcctggctcccagacggcgttcgacctggacgacgtgcaggccggcctcagttacacagtacgggtgtccgctcgggtcggaccacgtgaaggatctgcatctgtgctcacagtcaggagagagcctgaaactcctcttgctgtgcccgggctccgagtggtggtttcggatgccactagagtaagggtggcgtgggggcccgtgcctggagcttcggggttccggatctcttggagcaccgggtcaggcccagagagctctcagactctgcctcctgatagcaccgccaccgacataacaggactgcagccgggtacgacttatcaggttgcagtcagcgtcctccgtggtagagaagaaggccctgccgcagtcatagtcgcgcgcacagaccccctgggaccagtgagaacggtgcacgtcacacaggccagcagttctagtgtgaccatcacatggacccgagtacccggcgccaccgggtacagagtttcatggcacagcgcccacgggcccgagaaaagtcaactggtttctggagaggcgaccgtggccgagcttgacggactggagccagacacggagtacaccgttcacgtgcgagcccatgtagcaggagtggatggaccacccgcctctgtggtggtgcgaaccgcccctgagcccgtcgggagagtgagcagattgcagattctcaatgcttcctctgacgtactcagaatcacatgggtgggcgtcaccggggcaaccgcctaccgacttgcctggggccgaagtgagggggggcccatgcgccaccaaatcctacccggcaataccgatagtgcggaaatcagaggtttagagggcggtgtctcatattcggtgagggtaacagccctggtcggagatcgagagggaacacctgtcagcattgtcgttaccacgccacccgaggccccgcctgcacttgggacattgcatgtcgtgcagagaggggagcatagcctgaggctgcgatgggagccagtgcccagggcccaaggctttttactccactggcagcccgagggaggccaagagcagtcccgtgtcctgggcccggaactgtcatcatatcatcttgacggactagagccggctactcagtacagggtgagactgagcgtgcttggccctgcaggtgaaggcccatccgcagaagtcactgctagaacagagtcccccagggttccatctattgagctgcgtgtggtggatacctccattgactccgtaacactagcctggaccccagtgtccagagccagcagttatatcctgtcttggcgacccttacgtggcccaggtcaggaagtgcccggcagtcctcagaccctcccggggatctctagttcccagagagttacgggactggaacccggtgtgagctatattttttcacttacgccggtgctcgacggagtgaggggccccgaggcctcagtaacgcagactccagtgtgccctcgaggcctggctgacgtggtattccttccacacgcgacccaggataacgcacacagagccgaggccactcggagggtgctagagcgactagtccttgctcttggacccctgggtccccaggctgtccaggttggccttctgtcctattctcaccgacccagcccactatttcccctgaacggctcccatgacttaggcatcatcttgcagcggatccgcgacatgccttacatggacccctcagggaataaccttggaactgcagtggtgaccgcacaccgttatatgcttgcgccggatgcacccggtagaaggcagcatgtgcctggcgttatggtgctcctcgtggacgagccactgaggggcgacatcttctcccccatcagggaagcgcaggcgagtggtctgaacgtcgtcatgctgggtatggctggcgcagatccggagcagttgcgcagattagccccagggatggacagcgtgcaaaccttttttgccgtggatgatggtccttcactagaccaagcggtatctggccttgcaactgccctgtgccaagcctcttttacaacccaaccaaggccagaaccgtgtcccgtgtattgcccaaagggtcagaagggcgaacctggtgagatggggctaaggggtcaagtggggcctcccggcgatcccgggctgccgggacgcaccggtgcgcccggaccacaggggccgccaggctcagctactgccaaaggcgaacgtggatttccgggtgcagatgggcgacccgggtcacctgggagagcgggtaaccctggaacacctggagcccccggcctgaaaggttcgcccgggctgcccgggccccggggagacccaggggaacgaggaccccgtggccccaagggggaaccaggggcccctgggcaagtgattggcggcgaaggccccggactcccaggccggaagggggatcctgggccgagtggccctccaggtccacgaggccctctgggtgacccaggaccccgtggccccccaggcctccctggaaccgctatgaagggcgataagggagatagaggagagcgagggcctcctgggcccggggaaggtggaattgcaccaggagaacccggtctgccggggctgccaggctcacccggcccccagggtcccgtaggcccccctggaaagaaaggggaaaaaggggattctgaagacggagcccctggcctccctgggcagcctgggtctcctggggaacagggcccaagagggcccccaggcgccataggcccaaaaggcgataggggattccctggccccctgggcgaagccggcgagaaaggcgagcgtgggcccccaggtccagctgggagcagggggcttcccggagtggctgggagacccggagctaagggacccgaggggcctcctggccccactggaaggcagggtgagaaaggagagccaggacgccctggagatcccgcggtcgtgggtccagctgttgcgggacctaaaggcgagaagggagatgtgggacctgcaggaccacgaggcgcaacaggagtgcaaggtgaacgagggccaccaggcctggtgctgcccggagacccgggtccaaaaggagatcccggggacagaggtccgattggtctgaccggccgagccggcccaccaggagactctggtccacctggcgaaaagggtgacccaggcaggcccgggcccccaggaccggtcggcccccgaggcagggacggagaagtgggtgaaaagggcgatgaagggccacccggggacccaggccttcctggtaaggccggggaacgcgggctgcgcggggcgccgggggtgagagggccagttggtgaaaaaggcgaccagggagacccaggcgaagacgggcggaacggatccccgggttcaagcggtccaaagggagatcgaggcgaaccaggcccacctggcccgcctgggcgcctagtagatacagggcctggagcccgcgaaaagggtgagcccggcgatagaggccaggaggggccgcgaggaccaaagggcgatcctgggctgcctggagcacccggcgagcgcggaatagaagggtttaggggaccgcccggacctcagggcgatcccggggtacgcggaccagccggagagaagggagatagaggtccaccagggctggatggaagaagcggcttagatgggaagccgggcgcggccgggccttctggacccaatggcgcagcaggcaaagcaggtgaccctggccgagatgggctaccaggactaaggggagaacagggtctgcctggaccatctggcccaccagggctaccaggcaagcccggcgaagatggaaaaccaggactgaacggcaaaaatggtgagccgggggatccgggcgaggacggtcgaaagggggagaagggagactccggagcttccgggagggagggcagggacgggccgaaaggcgagagaggtgcccccgggatactgggaccacaaggaccacccgggctccctggaccagtgggccctcccggtcagggatttcctggcgttccaggtggaactgggccaaagggcgacagaggcgagactggttctaaaggggagcagggactcccgggggagagaggtctccgcggtgaaccagggtcagtgcccaacgtcgataggcttctggagacagccggaatcaaggcgtctgccttacgagaaattgttgagacctgggatgagagcagcggtagctttttaccagtccctgagcgacgccggggccccaaaggcgacagcggcgagcagggcccacctggcaaggagggacccattggctttcccggcgagcgcggactgaaaggggaccgaggcgacccaggcccacaagggccccccggccttgccctgggagagcggggtccaccaggaccatccgggttggctggggaaccaggaaaaccgggaattcccggtcttcccggtcgggcagggggggtgggcgaagccggccgacccggcgaaagaggcgagagaggtgagaaaggcgaacgaggtgaacagggcagggatggcccccctgggctgcctggcacccccggaccacccggacctcctggcccaaaggtgagcgtggatgagcctggccctggactctccggggagcagggccccccagggttaaaaggggctaagggcgaacccgggtcaaatggcgatcaaggacccaaaggtgacaggggagtccccgggattaaaggggatcgtggtgagcctggaccgcgaggccaggacgggaatcccggtctgcctggagaacggggaatggccggtccggagggtaaacctggcctgcaggggccccgagggcctcctggccctgttggcggccacggggaccctggccctccgggtgcgcctgggttggctggacctgccggcccacaagggccaagcggcctgaaaggggaacccggcgagaccggccctccgggccggggactgaccggtcccacgggtgccgtgggtctgccaggccctcctgggcccagcgggctggttggaccccagggctctcccggactgcctggacaggtgggtgagactggaaagccaggcgcaccagggcgagacggagcaagcggaaaggatggggatcgagggagtccgggagttccgggctctccaggtcttcccggaccagtgggccctaaaggcgagcccgggcctactggggcgcctggccaagcagttgtcggtctccccggagccaagggcgaaaaaggtgctcccgggggcctggcaggcgatctggtgggagagcccggcgcaaagggggatcggggactgccgggccccaggggcgaaaaaggcgaagctggcagggccggcgaacccggtgatcctggcgaagacggacaaaaaggcgctcccgggcctaagggatttaaaggagatcctggggtcggagtgcctggttcgcccggccctcccggcccgccaggagtcaagggcgatctggggcttccagggttaccgggcgcacccggagtggtggggttccccggccagacaggtcctaggggggagatggggcaacccggaccttctggcgagcgggggttggccgggccgcctgggagagagggcatccctggcccccttggacctccaggtcctccaggtagtgtggggcctcctggtgcatctgggcttaaaggcgataaaggcgaccctggggtagggttacctggtccacgaggggagcgtggcgagccaggaatccgaggggaagacggacgacccggtcaggagggacctagaggcttgaccggacctcctggatccaggggggaacgcggagaaaagggggacgtggggagcgctggactaaaaggagacaaaggggactcagctgttatccttggcccaccaggccctagaggtgctaaaggggacatgggcgaaagaggccctaggggtctggatggagataagggccctagaggcgataatggggaccctggcgacaaaggcagcaagggagaaccgggggataaggggtccgctgggctgcctgggctgcgaggactactcggaccccaaggccagccaggagccgcaggtattccgggcgacccaggctctcccggcaaggacggtgtcccaggtattaggggggaaaagggggatgtggggtttatgggtccaaggggattgaaaggcgagcgtggggtgaagggggcctgcggccttgacggtgagaaaggcgataagggagaagcgggcccacccggcaggcctgggctggcaggccataaaggagagatgggcgagccgggggtgcctggccagagtggggcaccgggtaaggagggtttaatcggcccaaagggtgacagaggatttgacggccagcccggaccaaaaggggaccaaggggagaaaggcgagcgcgggacccccgggataggcggtttccccggacctagcggcaatgacggttctgctgggcctccaggcccaccagggagcgttgggcctcgaggcccggaagggttacagggccagaaaggagagaggggaccccctggggagagggtagtgggcgctccgggtgtgcccggcgcacccggagaacgaggcgagcaaggccgccctggtcccgccgggccaaggggcgagaagggggaagccgccctgactgaagatgatattagggggttcgtgcgtcaagaaatgtcacagcactgtgcctgccaggggcagttcatagcctccggatcaaggcccctgcccagttatgccgctgatactgcggggtctcaactacatgcagtgcctgtgctgagggtgtcacacgccgaagaagaagagcgagttccgcccgaagacgacgaatattctgagtattctgagtactccgtggaggaataccaggacccagaggcgccctgggatagcgacgacccatgttcactgccccttgatgaggggtcctgcaccgcttacacgctgagatggtaccatcgggcggtaacaggaagtacagaagcatgtcacccatttgtctatggagggtgtggcggtaatgccaatcgctttggcacgagggaagcctgcgagagaagatgccccccacgagtggttcagagtcaaggaaccggaactgctcaggat

SEQ ID NO: 9570 - DNA, 8832 bp, synthetic construct
  misc_feature 1..8832: note = source = /note="Description of Artificial Sequence: Synthetic coding sequence"
  source 1..8832: mol_type = other DNA
atgactctgagactgctcgtggctgcactgtgtgctggcatcctcgctgaggcccccagagtcagggcccaacaccgcgaaagggtaacttgcacaaggttatacgctgccgacatcgtcttcctgctcgatgggagctctagtatcggcagaagcaatttccgtgaggtcaggtctttcctagaaggacttgttctaccattcagcggtgcagcatctgcacagggcgtacgcttcgctaccgtacaatattccgacgatcccagaacagaattcggcctggacgcgttggggagcggcggagacgtaatcagggccatacgggaactgagctataaggggggcaacactcggacaggcgctgcgatcctacacgtggccgaccacgtgttcctaccccagcttgctcggcccggtgttcccaaagtatgtatactgattacagatggcaagagccaggacctcgtggatactgctgctcagcgactgaagggccagggcgtgaaactgtttgccgttgggataaaaaacgccgaccctgaagagcttaaacgtgtagcttctcagcccacttccgacttcttcttttttgttaatgatttcagtatcctcagaacactgctgccacttgtatcacggcgggtctgtaccactgctggaggtgtgccggttacacggccaccagacgattctacatctgctcccagagatctagtgctctcagagcccagttcccagtcactccgggtccagtggaccgccgcctccggacccgtgacaggttataaggtccagtatactccccttaccggactgggacagcctttaccctcagagcgtcaagaggtgaatgtcccggctggggaaactagtgtgcggcttcgcggactgaggcccctgaccgagtatcaggttacagtgattgccctgtacgctaattccattggtgaggccgtgagcggtacggcccgaactactgccttggaaggccccgagctgacaatccagaatacaaccgcacactcgctgctcgtcgcatggcgctctgtaccaggagccacgggataccgcgttacctggcgggtgctgtccggaggacccacacaacagcaggagctcgggcccggtcagggcagcgtattattaagagatctcgagcccggcactgattacgaagttaccgtgtccaccctgttcggcagaagtgtgggcccagccacttcccttatggcacgcacagacgcgtcggtggaacagacattgcgacctgttattttagggcctacttctattctgctctcttggaacctcgtgcctgaggcgagaggctacaggctggaatggaggagagaaaccggtctcgaaccaccacagaaggtagtgttgccaagcgatgtcacacggtatcagttggacggtctgcagccaggcactgagtaccggctgaccctctacaccctcctggaaggtcacgaggtcgctacacccgctaccgttgtgcctactggccctgagttgcccgtgtcccccgtgactgatttgcaggccacggagctgccggggcaacgcgtgcgtgtttcctggtctcccgttcctggggccacccagtatcggatcatagtgcgaagcacgcagggtgtggagagaacgctggtactccccgggagccaaaccgcgttcgatctggacgacgtccaggctggactgtcatatactgtgagggtatctgctcgcgtcggccctcgggaaggctccgccagcgtgctgacagtacggagggaaccggaaactccactcgccgttcctgggttgcgtgtggtcgtaagcgatgcgacacgtgtcagagtcgcctggggcccagtgcccggtgcttcaggcttccgcatttcttggagtactggatcaggacccgaatcaagccaaaccttacctcccgacagtactgcgaccgacataaccggcctacagccaggcacaacttaccaagtggccgtgtctgtcctaagagggagggaggagggtcccgctgccgtgatcgtggcccgaactgaccccctggggcccgtccggactgtgcacgttacccaggctagttcttcatcagtcacgattacttggactagagtgccaggcgctacaggatatcgagtgtcctggcactccgcacacggacctgaaaagtctcagctggtgtcgggcgaagcaaccgtggcagagctggatggtcttgagcccgataccgagtatactgtgcacgtaagggctcacgtggccggcgtggatggccccccagcctccgtggttgttcgcacggcgccagagccagtcggacgcgtcagcaggctccaaatactgaatgccagttcagacgtgctgcgaatcacgtgggttggggtgacaggggctaccgcctatcgcttagcatgggggaggtcggagggcggccccatgcgtcatcagatcctgccaggcaatacagactcagctgagatcagggggctggaagggggggtgtcttatagcgtgcgggttaccgctctggtgggagatagagagggcactccagtaagtattgtggttacaaccccgcctgaagcaccgcccgcactgggcacactgcatgtggttcaaaggggggaacacagcctccgactccgctgggaaccggtcccaagagctcaaggctttttgctccattggcagcctgagggcgggcaggagcagtctagggtgctaggcccagagctgtcatcgtaccatctggatggcttggagccggcgacccagtacagggtgcgtctctctgtgctagggcctgcgggagagggccccagtgcagaggtcactgctcgcacagagagtcctagggtgccctctattgaactcagagtggtagatacatccatcgatagcgttacactagcctggactcccgtgtcacgagccagctcttacatactatcttggcggccgctccgtggtccaggccaggaagtcccgggatccccacagactctgcctggaatctctagttcacagcgagtgactggtctagagcctggggtcagctatatttttagtcttacacctgtcctcgacggcgtgcgggggcctgaggcatccgtgacgcagacaccggtatgcccccgggggctagctgatgtggtgttcctgccccacgctacacaggacaatgcccaccgcgcagaagcgacgcgccgggtgctggagcggctggtgctcgctttgggcccactgggtcctcaggcagtgcaagtgggcctgctctcttattcacaccgtccgtccccattgtttccgctcaacggaagccacgatctgggcatcattctccagcgcataagagatatgccttatatggacccatctggaaataacctggggacagccgtcgtgaccgcgcatcgctatatgctcgcccctgacgctccgggtcggagacaacacgtgccaggcgtgatggtactacttgtggatgaacctctgcgcggcgacatcttctcacccataagagaagcccaggcttctggtttgaatgtagtcatgctggggatggctggcgcggatccagagcagttgcgacgtctggcaccgggcatggactctgtgcagacgttcttcgcggtggatgatggcccctccctcgaccaggcggttagcgggttagctactgccctgtgccaggcctctttcacgacccagcctaggcccgaaccttgcccagtttactgtcccaagggccagaagggggagccaggcgaaatgggtcttaggggacaggtcggccctcccggcgaccccggactaccagggcgcacaggtgctcccgggccgcagggaccacccggcagcgccacggctaagggggagaggggttttccaggggcggatggacggcctggcagcccaggccgagccggtaatccaggcacacctggagcgcccggacttaaggggagcccaggattgcccggaccccggggagaccccggagagcggggacctagggggccaaagggcgaacccggcgcaccagggcaggtgatcgggggcgagggcccagggctgccgggtcgtaaaggcgaccccggtcctagcgggcctccgggacccagaggtcctctgggcgaccccggaccacgcggccctcctggcctgcccggaaccgcaatgaaaggcgacaaaggcgatcgtggagagaggggaccaccaggtccaggcgagggaggtattgcaccaggggaacccggattgcccgggctcccaggcagtcccggcccccaaggccctgtggggcctcctggtaaaaaaggtgaaaagggagatagcgaagatggggctcctggactgcccggccagcccggatccccaggtgaacaggggcccagagggcccccaggggctataggccccaaaggagatcgagggtttcccgggcctttgggcgaggccggggaaaagggcgaacgcggaccccctgggcctgctgggtcacgcggactgcccggggtcgcggggagacctggcgcaaagggtccagagggaccacctggccccaccgggaggcagggagagaaaggggagccagggaggccaggcgacccggcggtggtggggcccgcagtggcagggccaaagggtgaaaagggcgatgtaggccccgccggtcccaggggtgccacaggcgtccaaggagagcgcggccctccaggactggtgcttccaggcgaccctgggcccaagggtgacccaggggacagggggcccattggactaaccggccgcgccggccctcccggcgatagcggccccccaggcgaaaaaggagacccaggccggcccggccccccgggtcctgtaggccccagaggaagagatggggaagtcggagaaaaaggcgatgaagggcccccaggagaccccggactccctggcaaagctggcgaaaggggtctgcgtggtgcccctggggtcagaggtcctgtcggcgagaagggagaccaaggcgatccgggagaggacggcagaaacggaagcccagggtcatccggacctaaaggagacaggggagaaccagggcccccagggcctcccgggcgactcgtggatacaggacccggtgcaagggagaagggcgagccgggggacagaggccaggagggaccaagagggccaaaaggcgatcctgggcttcctggggctccaggcgagcgcggcatcgagggtttcagaggtccccctggccctcagggggatcccggcgtgcgagggccagccggggagaagggggatcgtggacctcccgggctggacggcaggtccgggctagacgggaaacccggcgcagctggacctagcggccctaatggggccgcaggcaaagccggcgatcctggccgagatggcctgcctggcctgcgtggtgaacagggcttgcctggtcctagcggtccccctgggctccctggtaaaccgggcgaagacggtaaaccaggtctcaatggcaaaaatggcgagcctggcgacccaggcgaagacgggagaaagggggaaaagggagactccggcgctagtgggagagaaggacgtgacggacctaaaggtgagcggggcgcaccaggtattttgggaccccaaggaccgccagggctgccaggcccagttggacctcccggacagggcttccccggagttccagggggaacagggcccaaaggcgatagaggagagactggatccaagggtgaacaggggttgccaggtgagaggggcttaagaggggagcccggctcagtgcccaatgtagacaggctcctggagactgcaggaattaaagcctcagccctgcgtgaaatcgtagaaacctgggatgaatcatctggaagttttcttcctgtgcccgagcgacggagaggccctaagggcgatagcggcgagcaaggcccacctggaaaggagggtccaattgggttcccaggagagagaggcctcaaaggcgacaggggcgaccccggcccgcaggggccgcctgggctggcgttgggtgaaagaggcccacccggcccttcaggcttagccggagagcctgggaaaccggggattcctggcctccccggaagggccggaggcgtgggagaagctgggcggcccggtgaacggggggagcggggggaaaagggtgaaaggggtgaacagggtcgtgatggaccacccggtctcccaggcacacccggcccgcccggtccaccagggccaaaagtgtctgtggatgaacctggcccaggtctgtctggagagcagggaccccctggcctgaagggagccaaaggtgagcccgggtcaaatggggaccagggccctaagggggacagaggggtgcctgggatcaagggcgatcggggggagcccggcccccgcggccaagatggcaaccccgggctgcccggggaaagaggaatggccggtcccgagggtaaacccggtctacagggtcccaggggcccaccaggccccgtcggaggacacggtgaccctggcccacccggagccccaggactcgctggccccgctggaccccagggcccaagcgggctaaaaggagagcccggagaaactggacctcccggtcgcggactgactggacccacaggtgccgtgggcctgcccggaccgcccggcccgtcagggctggtgggcccacaaggatccccgggactaccaggacaggtgggcgagaccggcaaacctggcgctccaggccgtgatggggcctcgggaaaagacggagaccggggatcacccggggtgcccgggtctccaggactgccaggtcccgtcggtccaaaaggggagcccgggccaacaggagccccaggccaggcagtcgtaggcctcccgggtgcgaagggcgagaaaggagcaccaggtgggttggccggggatctcgttggtgagccaggcgcaaaaggggacagagggctcccggggccccgcggggagaagggagaggcaggcagggccggcgagcctggagatccaggtgaagatgggcaaaaaggggctcccggaccaaagggctttaaaggcgacccaggagtgggcgtgcccgggtcaccgggccctcctgggcctccgggggtaaagggggatttgggtcttcccgggctgccgggggctccaggcgtcgtcggatttcctggccagaccggcccacggggagagatgggccagccgggcccgtcgggtgaacggggactggccgggccccccggccgggaggggatacccggccccctgggcccgccgggtcccccgggctcagttggaccccccggcgcaagcgggcttaaaggggacaaaggtgatcccggggtggggctgccgggccctcggggggagaggggcgaaccaggcattcgcggggaggatggcaggccaggccaggaaggaccgcggggccttacagggcctcctggctccagaggcgagcgtggggagaagggagacgtgggatcagccgggctcaaaggggacaagggggactcggctgtaatactcggccctcccggaccaaggggagcaaagggagatatgggagagaggggaccgcgcggattagatggggataagggccccagaggggataacggggaccccggcgacaagggcagtaagggcgaacccggagacaaagggtccgctggtctgccagggctcagaggactgctggggcctcagggccaacctggggccgccgggatccccggggatcctggatctccagggaaagacggcgtccctgggatacgcggggaaaagggggacgtgggctttatgggacctcgtgggctaaagggcgagagaggagtcaagggagcatgtggacttgatggggagaaaggcgacaaaggggaggctggccccccagggaggcccggcctcgctgggcacaaaggagaaatgggggagcctggagtgccaggacagtcaggtgctccaggaaaggaaggactgataggccctaagggagatagaggcttcgacggacagcccggcccaaaaggagatcagggagagaaaggagaacgcggaacacccggaattggcggattccccggtccgtctggcaacgatggctccgctgggcccccaggccctcctggaagcgtgggacctaggggtcccgaggggctgcagggccaaaagggggagcgcgggccccctggggagagagtagtgggggcccctggggttccaggagcacctggagaaagaggcgaacagggacggcccgggcccgccggtcctcgcggagaaaagggggaggctgcactgacggaggatgacattagaggattcgtgcgccaggagatgtctcaacactgcgcctgtcagggccagttcatcgccagtggtagcaggcctctacccagctacgctgctgataccgccgggtctcagctgcacgcggttccagtgctcagggtgtcccatgccgaggaagaagagagagtgccaccggaggatgatgagtacagcgagtacagtgagtatagcgtcgaggagtatcaggacccagaagccccatgggactcagacgatccttgttctctgccactcgacgaagggtcttgtacagcatataccttgaggtggtatcatcgtgcggtgaccggctctaccgaagcttgtcacccgtttgtgtatggcgggtgtggcggaaatgcaaacaggttcggcactagagaggcctgtgaacgcaggtgtcctccaagagttgtccagtcccagggcaccggcaccgcacaggat

SEQ ID NO: 9571 - DNA, 8832 bp, synthetic construct
  misc_feature 1..8832: note = source = /note="Description of Artificial Sequence: Synthetic coding sequence"
  source 1..8832: mol_type = other DNA
atgacgctgaggcttcttgtggcagcactgtgtgccggtattctggcagaagccccaagagttcgagcacaacatcgggagagagtcacttgtaccaggctgtacgcggcagatattgtattccttctggatggtagctcatcaatagggaggtcgaactttcgtgaagtgcggagctttctggaaggacttgtcctgccgttctccggggcagcgagcgcgcagggtgtccgctttgcaacggtccaatactcagacgatccgagaactgaatttggtctggacgccctgggttccggtggagacgtgatcagagcaattagagaactttcatacaagggtgggaatactcgtaccggtgcggcaattctccatgtggcggaccatgtgttcctgcctcaacttgcacgaccgggtgtgcccaaggtgtgtattcttatcaccgatggcaagtctcaagaccttgtggataccgccgcccaacgcctcaagggccaaggagtgaaactgtttgcagtggggatcaagaacgcagaccccgaggagttgaagcgcgtggcatcgcaaccaaccagtgactttttcttttttgtcaacgatttctcgatccttcgcactcttctccctctcgtcagcagaagagtctgcaccactgcaggaggggtgcccgtgacccgtccccccgatgattctacctcggcaccgagagacttggtgctctcagaaccgtcgtctcagtctctcagagtgcagtggaccgcagcatccggacccgtgacgggctacaaggtgcaatacacccctcttaccggactgggccagcctctgcctagcgaacgacaagaagtcaacgttcctgcaggggaaacttccgtcagactccggggactgcgtcccttgactgaataccaagtgaccgtgattgccctgtacgcaaactctatcggggaagctgtgagcggaacggcacgaaccactgcactggagggtcctgagcttaccattcaaaataccaccgcccattccctgcttgtcgcttggagatccgtcccaggagccaccggatacagagtgacctggagagtgctgagtggagggccaacccaacagcaagaactgggaccgggacaaggatccgtgcttcttcgcgaccttgagcctggcacggactacgaagtgaccgtctcaaccctgttcggacgcagcgtcggccctgcaacgtcactcatggcccggactgatgcgtctgtggaacagactcttcggccagttatcctcggtccaacttccattcttttgtcttggaacctcgtccctgaagctcgaggctacaggcttgaatggcggcgagaaaccggactggagcctccacaaaaggtggtgctgccttccgatgtcacgcgctaccagctggacggcctccaaccaggaactgagtaccggttgaccctctacactcttctcgaggggcatgaggtcgcaactcccgcaactgtggtcccaacgggtcctgaactcccagtgtcccctgtgaccgatcttcaggcaactgaattgcctggacagcgcgttcgcgtgtcctggtcgccagtgcctggtgccacccagtaccgaataatcgtccgcagcactcagggtgtggagagaaccctggtgctccccggatcccagacggcatttgatttggatgatgtgcaagctggactttcctacaccgtgcgggtgagcgccagagtggggcctagagaaggatcagcatcggtgcttaccgtccgcagagaaccagagactcctttggccgtccctggactgcgagtcgtggtgtcagatgcaactagagtgagagtcgcctggggaccagtgcccggcgcatcgggttttcgaataagctggtcgacgggttccgggccagaatcctcccaaacccttccgccagatagcactgcaaccgatattactggactgcaacctggaaccacctaccaggtcgccgtgagcgtgctcagaggtagggaagaaggccccgcagcagtgatcgtcgcacgtactgatcccctcggtcctgtgagaactgtgcatgtgactcaggcatcgtcgtcctcggtgaccataacgtggacccgagtgcctggggccactggctacagagtctcgtggcactcggcgcacggcccggagaaatcgcaactggtgtccggagaagcgaccgtggcggaactcgatggacttgaaccagacaccgaatacaccgttcatgtgagagctcacgtcgccggagtggatggaccgcctgcatcagttgtcgtccggaccgctcctgagcctgtgggaagggtttcccgcctccaaattcttaatgccagctcagatgtccttcgcattacttgggtgggagtcaccggcgcaactgcatataggttggcctgggggagatcggaaggaggtcctatgcggcatcaaattcttcccgggaacaccgattcggccgaaattagaggactggagggaggagtgtcgtactcggtgagagtcactgccctggtgggagacagggaggggacgcctgtctccatcgtggtcaccaccccacccgaagcaccaccggctctgggaactttgcacgttgtccaacggggtgaacattccttgcgactgcgttgggaacccgtccccagagcacaaggtttcctgctgcattggcaacctgaaggcgggcaggaacagtcgagggtgctgggacctgaactctcatcctaccatcttgatgggttggaacctgcaacccagtacagggtgagactgagcgtcctcggtcctgcaggtgaaggaccttctgccgaggtgactgccagaactgagagcccaagagtcccttccatagaactgagagttgtcgatacctccattgattcggtgacgctggcgtggacgccagtgtcgcgggcatcgtcttacatcctctcgtggcgaccgctgcgaggtccaggccaggaagtcccaggtagcccccaaaccctccctggaatctcgtcaagccagcgcgtcactggacttgaacctggtgtctcatacatattcagtctgaccccagtcttggacggtgtacgcggacccgaagcgagcgtgacccagactccagtttgtccgcgaggtctggcagatgtggtgtttctccctcacgcaactcaagataacgcacatagagcagaagcaactcggcgggtgcttgaacgtcttgtgcttgcactggggcctctcggccctcaagcagtgcaagtgggacttcttagctattcacataggccttcccccctttttcctctgaacggatcccatgatctcggcattattcttcagagaattcgcgacatgccatatatggatccgtccggcaataatcttgggaccgcagtggtcaccgcacaccggtacatgctcgcaccagacgcaccggggcgtcggcaacacgtgcctggggtgatggtgcttctggtcgacgagccgctgcgcggcgacattttctccccgattcgcgaggcgcaggcctcgggactcaacgtggtgatgctcggtatggccggtgcggatcccgaacaactccggcggcttgcacctggaatggattcagtgcagactttctttgcggtggacgatggcccatcgctggaccaggcagtgagcggacttgccaccgcactttgtcaggcctcgtttactacccagccgaggcctgaaccgtgtcctgtgtattgtccaaaaggacaaaaaggagaacccggtgagatgggtcttagggggcaggtcgggccaccaggggaccccgggcttcccggaagaaccggtgcacctggtccacaaggaccccccgggagcgcaacggccaagggagagcgcggttttcccggtgcggatggacgtcctgggtcgcctgggagagcaggtaaccctgggactccaggggccccgggactgaagggatcccccggactcccaggacccagaggggaccccggagaacgaggaccgcgcgggcccaaaggtgaaccaggtgcccctggacaagtgatcggtggggaaggtcccgggctccctgggagaaaaggagatccaggaccgtcggggcccccgggtccgagaggtcctcttggcgaccctggtccaagaggaccgccaggcttgcccgggactgcaatgaagggcgacaagggcgaccgcggtgagagggggcccccaggacccggagaagggggcatcgcacccggtgagccgggcctccctggattgccaggatcccccggacctcagggacccgtaggtccgcccgggaaaaagggcgaaaagggagactcagaagatggtgcaccagggctgccaggtcaacccggatcccctggagagcagggtcctagaggaccccctggagccataggtcctaagggcgaccggggcttcccaggtcctctcggcgaggccggagagaagggagagcgaggacctccaggcccagcaggtagccgcggactgccgggtgtggcggggcgcccgggggccaagggacctgaaggaccgcctggacccaccggcagacagggggaaaagggagaacccggtcggccaggtgatcccgcagtcgtgggtcctgcggtggcaggacctaaaggcgagaagggagacgttggacccgctggccctcgcggggcaactggcgtgcaaggcgagcggggtccacccggactcgtccttcctggtgacccaggccccaaaggtgatccaggcgacaggggaccaatcggtttgaccggtcgggccgggccgcctggggactcgggtccgccaggagagaaaggtgacccgggtagacccggtccccctggaccggtgggaccgcggggcagggatggagaagtcggagaaaagggagatgaaggcccacccggtgatcccggtctgccaggaaaggcaggagagcgtggcctgcgcggagcaccaggagtccgtggtcctgtgggagagaaaggggaccagggggatcctggagaagatggccgcaatggatcaccgggttcatcgggcccgaagggtgatcggggtgaaccgggccctcccggacctcccgggagactggtggatactggcccgggtgcccgggaaaagggcgagcccggtgacaggggacaggaaggtccccgcggtccaaagggagatccggggttgccaggagcgcctggtgaacgaggaattgagggttttcggggaccgcctgggcctcagggagatccaggagtgagagggcccgcgggagaaaagggggatcggggaccgccaggacttgatgggagaagcgggctggacggcaagccaggtgctgcgggaccttctggccctaatggagcggccggaaaggcaggggaccccggcagagacgggctgcccggcctgcgcggagaacaaggactgcccggtccttcggggcctcctggcctgcccggtaagcctggcgaagatggtaagccaggccttaatggaaaaaacggtgagccgggggatcccggtgaggatggaagaaaaggcgaaaaaggcgacagcggtgcatccggtagagaaggccgtgacggcccaaagggggaacgcggtgctccgggaattctcggaccccagggcccgccagggcttcccggacccgttggaccccctggccaaggctttcctggtgtcccaggggggacgggccctaaaggtgatagaggagaaactggatcaaagggagaacaggggcttcccggggagcgggggctgagaggagaaccaggatcggtgccaaacgtggataggcttcttgaaaccgcaggcattaaggccagcgcgcttagagaaattgtcgaaacgtgggatgagtcgtcgggatcctttctccccgtccctgagcgaaggcgcggtcccaagggtgattctggtgaacaaggtcctcccggaaaggaaggtcctatcggatttcctggagaacgcggcctcaaaggagacaggggtgaccccggcccacaagggcctccaggcctcgcacttggggagcgtgggccaccaggcccatccggcctcgcaggtgaaccgggtaagccaggcattcctggccttccaggcagggccggaggagtcggagaagcaggacggccaggcgaacggggggagcgaggggaaaagggcgaacgaggtgagcagggacgggatggcccaccaggccttcccggaactccaggcccgccaggtcctccggggcctaaggtgtcggtggatgagcctggaccaggactgagcggtgagcagggcccccctggacttaaaggcgctaagggcgaacctggttcaaacggtgatcaaggacccaagggtgataggggcgtccctggcatcaagggggatagaggtgagcctggtcccaggggccaggatgggaatccgggattgccaggggagagaggtatggcgggcccggaaggtaagccaggattgcagggacctcgtggtcctccaggcccagtaggcggacatggtgacccaggcccgccaggagcaccaggtcttgccggaccagctgggcctcaagggccatcgggactcaagggagagcctggcgaaactggacctccgggtagaggacttaccggtccaactggtgccgtgggactgccaggtccccccggcccttcgggactggtcggaccacagggaagccctggacttccaggccaagtgggcgaaactggtaagcctggagcacctggacgggatggggcgtcaggaaaggatggagatcgaggtagcccaggtgtgccagggtcacccggactccccgggcctgtggggcccaagggggaacccggtccgaccggagcacctggacaggctgtggtcggacttcctggcgcaaagggcgaaaagggcgcaccaggaggcctggcaggggatttggttggtgaacctggcgctaaaggcgaccggggcctcccaggaccgagaggagaaaaaggagaggcaggacgcgcgggagaacccggggatccaggagaagatggacaaaagggcgcacctggccctaagggtttcaagggtgatcccggagtgggagtccctggtagccctggaccgccgggaccacctggtgtgaagggggacctcggtctgcctgggctgcctggagctcccggagtggtggggttcccaggtcaaaccggcccgaggggcgaaatgggtcaaccaggaccatcaggagagcgcgggttggctgggcctccaggtcgagaaggtatcccaggtcctcttgggcccccaggccctccagggtcagtaggaccgccgggcgcgagcggactgaagggggataagggcgatccaggcgttggcctgcctggacctcgtggggagcgaggggagccaggcattagaggtgaagatggccgacctggacaagaagggccaaggggactgactggtccaccaggaagcagaggcgaaagaggagaaaaaggggacgttggaagtgctggactgaagggagataagggtgactccgccgtcatactgggtccgccagggccacgcggcgccaagggcgacatgggtgaacggggtcctagggggctggatggagataaaggcccacgcggagacaacggagatccgggagataagggttcaaagggtgaacccggcgacaagggatcagcaggacttcctggactgagaggacttctgggacctcaagggcaacctggagccgccgggattcctggtgatccgggtagccccggtaaggatggtgtgcccggtatccgcggagaaaaaggggatgttggatttatggggccaagagggctgaaaggagagagaggtgtgaagggtgcctgcgggcttgatggggaaaagggagacaagggtgaggctgggccacctggcaggcctggccttgcaggacacaagggtgagatgggggagcctggagtgccaggtcaatccggagcgcccggaaaagagggtctgattggtcctaaaggggatcgaggatttgatggccaacctggccccaaaggggaccaaggtgagaaaggagaaagaggcactcccggtatcggtgggtttccgggcccatcgggcaacgacggatccgccggaccacccggacctcccggttcagtgggtccccggggtccagagggtctgcaagggcagaaaggggaacgcggaccacctggagaacgtgtggttggtgcacctggcgtgcctggtgcaccgggggaacgaggcgaacaggggcgtcctggtcctgctggtcctcgcggagaaaaaggtgaagcagcactcactgaggatgacatccgcggattcgtccggcaagaaatgtcccaacactgtgcctgccaagggcagtttatcgcttcgggctcgcggcctcttccttcctacgccgcagacactgcaggtagccagctgcatgcagtgcccgttctgagagtgtcgcacgccgaggaggaggaaagggtgccaccggaggacgatgaatacagcgagtactccgagtacagcgtcgaggaataccaggaccctgaggcgccatgggatagcgatgatccgtgcagcctgccacttgatgaaggctcgtgtaccgcgtacaccctgcgttggtaccatcgggctgtgacgggatccactgaggcgtgtcaccctttcgtgtacgggggctgtggaggtaatgcaaacaggtttggaaccagggaggcctgcgaacgcaggtgcccgccaagagtggtccagagccaaggcactggaactgcgcaggat

SEQ ID NO: 9572 - DNA, 8832 bp, synthetic construct
  misc_feature 1..8832: note = source = /note="Description of Artificial Sequence: Synthetic coding sequence"
  source 1..8832: mol_type = other DNA
atgaccctgagacttctcgtggcagcactctgcgctggtattcttgcggaggcaccgcgagtccgcgcgcaacatagggaacgtgtgacctgtaccagactctacgcagcagatatcgtgtttctgctggatggatcctcctcgattggtagatcgaattttcgcgaagtgcgatcctttctcgaaggcttggtgctgcctttctctggtgccgcctcagcacagggagtccgctttgcaaccgtccagtacagcgacgatcctaggaccgaatttggactggatgcccttggctccggaggagacgtcatccgagcaatccgggaactctcatacaaaggcggaaacaccagaaccggtgccgccatcctgcatgtggcagatcatgtctttctgccacaactggcaaggccgggtgtgcctaaggtgtgcattctcataactgacggaaagtcgcaagacctggtggataccgcagcacaaagactcaaaggtcaaggggtgaagctgttcgcagtgggaatcaagaacgcagatcctgaagagctcaaaagagtggcaagccaaccgacttcagatttcttctttttcgtgaacgatttttccatcctccgtacccttctgcctctggtgtcgcgaagagtgtgtaccactgcaggcggagtcccagtcaccagacccccagatgatagcacgtcggccccacgggatcttgtgctctcggagccttcatctcaatccctcagggtgcaatggactgcggcgagcgggcccgtgactggatataaggttcagtacactcctcttaccggcctcggacaaccccttccaagcgaacgccaggaagtgaatgtgcctgcaggagaaacgtccgtgcggctccggggactgcgacctcttaccgaataccaagtcactgtgatcgcgctgtacgccaactccattggcgaagccgtgtccggaaccgcccgtaccaccgcactcgagggacctgagctgactatacaaaataccaccgcacattccctgcttgtcgcatggcgcagcgtgcctggggctaccggttacagagtcacctggagagtcctttccggaggacctacccaacagcaagaactcggtcctgggcaaggatcagttcttttgagagatcttgaaccaggaaccgattacgaagtgaccgtgtcgactttgtttggacgctccgtcggtcctgcaaccagccttatggcaagaactgacgcatcagtggaacaaacccttcgcccagtcattcttggtcctaccagcattcttctgtcctggaacctcgtgcctgaagcacgcggataccggcttgaatggcgtcgggaaactggcctggagcctcctcaaaaggtggtgcttccatccgatgtgacccgttaccaactcgatggactccagcctggtactgaatataggcttactctctacaccctgcttgagggccacgaagtggcaaccccggccactgtggtgcctactggaccggaactgcctgtgtcacctgtcaccgaccttcaggcaaccgagctgcctggccagagagtccgcgtctcgtggtccccagtgccaggagccacccaatatcgaataatcgtgagatccacccagggagtggaaagaactcttgtgctgccaggatcccaaacggccttcgacctggatgacgtccaagccggcctgtcatacaccgtcagggtttcggccagagttggtcctagggaagggagtgcatcagtgctgaccgtgcggcgcgaaccagaaaccccacttgcggtcccaggactgagagtcgttgtgtcagatgcaacgcgcgtgagagtggcatggggaccagtgcctggagcaagcggatttagaatctcctggtctactggctccggaccagaaagctcacagactctccccccagatagcactgccaccgacatcaccggccttcaacccggcactacttaccaagtcgccgtgtcagtgctgcggggtcgcgaagaagggcctgcagcagtgatcgttgcgcgtactgatccgcttggacctgtcaggacggtccatgtgactcaagcctcctcgtcgagcgtgaccatcacttggaccagagtgcctggcgctactggttaccgcgtctcgtggcattctgcacacggcccagaaaagagccagttggtgtcgggagaagcgactgtggcagagcttgatgggcttgaacctgataccgagtacactgtgcacgtgcgggcacatgtcgcaggagttgacggaccacccgcctcggtggtggtgagaactgctcccgagcctgttggtagagtctccagactgcagatccttaacgccagctcggacgtcctgcgcatcacttgggtcggcgtgactggggccactgcataccgtctggcttggggacgttcagagggaggccctatgagacatcaaattcttccaggcaatacggattcagcagaaatacgaggacttgagggtggtgtcagctactccgtcagagtgactgcactcgtgggtgatcgggaaggtactcctgtgtccattgtcgtcaccactcccccggaagcaccaccagcactgggaactcttcatgtggtgcagaggggggaacactctcttagacttcggtgggagcctgtgcctagagcgcagggattccttcttcactggcaacctgaaggaggacaagaacagagccgcgtcctcgggcctgagctgtcctcgtaccatttggatggtctggagcctgccacccagtaccgggtccgcctcagcgtgctggggcccgccggcgaaggtccatcggcagaagtaacggcacggactgaatcacctcgggtgccgtcgatcgagctcagagtggtggacactagcatcgattcagtgaccctcgcgtggaccccggtgtctcgggcatcgagctacatactgtcgtggcgtccacttaggggtcccggtcaagaggtcccgggtagcccacagaccctccctggtatctcgtcgtcacaaagagtgaccggacttgaaccaggggtcagctacattttctcgcttacgccagtgttggatggagtcaggggaccagaagcaagcgtgacccagactcctgtgtgcccaagaggcctggcagatgtggtgttcctgccccatgcaactcaagataacgcccacagagctgaggcaactcggcgggtgctggaacgtttggtgctcgcccttggccccctgggtccccaggctgtccaggttggacttctgagctactcccacagaccatcccctctgtttccactgaacggatcccatgatctgggaattatcctgcagagaataagagatatgccttacatggacccttcgggaaacaatcttgggactgcagtcgtgacggcgcatagatacatgctggccccggatgcacccggccgtcgccagcatgtccctggagttatggtccttctggttgatgaacccctccgcggcgacattttcagtccaatacgggaagcgcaagcatccggtctgaatgtggtgatgctgggcatggctggcgccgatccggagcagcttcggcggctggcaccaggcatggattccgtgcaaacctttttcgcagtggacgacggaccttcccttgatcaggcagtgagcggactggccaccgctctttgtcaggctagcttcactacccaaccacgaccagaaccttgtcctgtttactgtccaaagggacaaaagggggagccgggagaaatgggactgcgaggccaggtgggccctccaggcgacccgggactgcctggccgaaccggtgccccgggtccacaagggccgcctgggagcgcaaccgcaaagggtgaacgcggctttcccggtgcagacgggcgacccggttcgccgggacgcgcaggaaatcccggtacccccggtgcacctggactcaagggtagcccaggtctgccaggaccaaggggtgacccgggggagagaggtcctcggggtccaaaaggagagccaggggctccaggacaagtgatcggcggcgaagggcctggcttgccgggtaggaaaggggatccggggccttcgggcccacctggaccgcgcggcccgttgggagatcccggacctagaggaccgccagggctgcccggtaccgcaatgaagggcgataagggggatcgtggtgaacggggacccccaggtccaggagagggaggtattgcgcccggagaaccaggcctgcctggactgccagggtcaccaggacctcaaggtcccgtgggtcccccgggcaagaagggagagaagggagatagcgaagatggggcgcctggcctgcccggtcagcccggttcccctggcgagcagggtcccagaggaccaccgggtgctattggaccgaagggagatcgcggatttccggggccacttggcgaagcaggcgaaaagggagagaggggtccccctggcccggcaggttcccggggtttgccaggggtggcaggacgccccggagcgaagggtccagagggcccacctggtcccaccggtcggcaaggtgaaaagggggagcccggacgcccaggggatcccgctgtcgttgggcctgcagtagcaggccctaaaggtgaaaagggagacgtcggtcctgcagggcctcgaggcgctactggtgtgcaaggagaaaggggtcctcctgggctcgtgctccccggagatcctgggccaaagggagatccaggagatcgtggccctattgggcttactggcagagcgggaccacccggggactccgggccgcctggggagaaaggcgatcccggaaggccagggcctcccggcccagtaggtccgcgcggacgtgacggtgaggtgggagagaaaggagatgagggacctccaggtgaccccggtctgcccggaaaggccggtgagcggggacttaggggtgcgccaggcgtccgtgggcccgtgggcgagaagggcgaccaaggggatccaggcgaggatggacgaaacggatcgcctgggtcgtccggtccaaaaggtgataggggagagccagggccacctggaccacccggtaggctcgtcgacactggtccaggagcaagggaaaagggggaacccggtgatcgcggacaggagggtccacgggggccgaagggtgaccctggacttccaggagccccaggggagagaggaattgaaggatttcgaggaccacctggcccccagggagatccgggtgtccgaggtcccgcaggagagaaaggggatcgagggcctccaggactggacggtcgctcgggactcgacgggaaacccggtgcagcaggtccctcgggtcctaacggtgctgcaggaaaggcaggggacccgggacgtgatggtttgcctggtctgaggggggaacaggggcttccaggtccatcaggaccccctggacttcctggtaagccgggtgaggatgggaagccgggcctgaatggaaagaatggagagccaggcgatcctggcgaagatggacggaaaggtgaaaagggagattccggcgcatcaggtcgggaaggaagagatggacctaagggagaacggggtgcaccaggcattttgggcccacagggacctccgggacttccaggccccgtgggacctcctggacagggctttcccggagtccctggcggcactggtcctaagggggaccgaggagagactggatctaaaggcgagcagggtttgccaggtgagcgaggacttcgcggagagccgggatcagtgcctaacgtggatagactgctggagactgccggaattaaggcctcggcactccgggagatcgtggaaacctgggatgaaagcagcggatcatttctgcctgttcctgagcgtcgccggggacctaagggcgattcgggggagcaaggtcccccgggtaaggaaggtcccattggtttcccgggagaacgtggcctcaaaggcgacagaggagatccaggtcctcaaggtccacctggattggcactgggcgaaagagggcctccgggtcctagcggtcttgcgggtgagccggggaaaccgggaattccggggcttcctggtcgcgcaggtggagttggggaagcaggacggccaggcgaaaggggagaacgaggggaaaaaggtgaacgaggagagcagggcagagacggtccccctggactccctggcacccctgggccaccaggccctccgggaccaaaagtgtcagtggatgaaccaggtcctggactgtctggcgagcagggccccccaggacttaagggtgcaaaaggagaacctggatccaacggagatcagggtcctaagggagatagaggagtgcctggaattaagggggacagaggagaaccagggcctaggggtcaagatggtaaccccggccttcctggggagcgcggaatggccggccctgaagggaaaccaggacttcagggtcctagagggccccctggccccgtggggggacacggagatcctggtcctcccggagcaccgggccttgcaggcccggctgggccacaagggccttcgggtctgaagggagaaccaggagaaactggtccacctgggcgcggacttacgggcccgactggcgctgtgggactgcccggacctcccgggccaagcggtcttgtcggtccgcaaggctcgccgggacttcctggccaagtgggagaaaccggtaaacctggggcacccggtagagacggggcatcgggtaaggatggtgacagaggttcgccaggagtacccggctcccccggacttcctgggcccgtggggccgaagggcgaaccgggacctacgggagcaccgggtcaggctgtggtgggtttgcccggagcaaagggagagaagggtgccccgggagggctggcaggtgacctggtaggtgaaccaggcgccaagggtgaccgtgggctccccgggccgcggggagaaaagggcgaagccggtcgtgcaggagaaccgggtgatccaggagaagatggtcagaaaggagctcctgggcctaagggcttcaagggcgatcctggtgtgggagtcccaggatctccgggtccgcctgggcctcctggagtgaaaggggacctgggcctgccgggcttgccgggggcacctggtgtggtcggatttcctggccaaactggacccagaggggaaatgggacagcccggaccaagcggagagcgcggacttgcagggcctccgggaagagagggtatccctgggcccctcggaccccctggtccacccggttccgtgggacctccaggcgcatccggtcttaagggagacaagggggatcccggtgtcggcctgcctgggcccagaggtgagagaggggagcccggtatcagaggcgaggacggtcggcctggacaggaaggtcctaggggtctgacgggacctcctggctctcggggagaaagaggagaaaaaggagacgtggggtccgccggactgaagggcgataagggagattcagcggtcattttggggccaccagggccaagaggagcaaagggcgacatgggcgagagaggacctaggggactcgatggagataaaggacctagaggtgacaacggtgacccaggcgacaaaggatcgaaaggtgaacccggagataaaggttccgcgggccttcccgggctgcggggccttcttgggcctcagggtcaacctggggcggctgggattcccggggacccagggtcaccgggaaaagatggtgtgcctggtattcggggagaaaagggagatgtgggatttatgggacctcggggccttaagggtgaacgaggagtgaagggagcatgtggcctcgatggcgaaaaaggggacaaaggcgaggcaggaccgccgggtcgtcccggcctggcaggacataaaggcgagatgggcgagcccggggtgcctggacaatccggagccccaggcaaggaagggctgattggccctaagggtgatagaggatttgacggccaaccaggacccaagggggaccaaggagagaaaggcgaacgggggacgccagggatcgggggcttcccaggaccgtcgggaaatgatggtagcgcagggcctcctggaccccctggttcagtgggaccgaggggccccgaagggctccaggggcagaagggcgagcggggcccccctggtgaacgggtggtgggagcacctggtgtccctggagccccaggtgagagaggggagcagggacgccccgggcccgcaggtccaagaggtgaaaagggcgaagcagcgcttactgaggacgacattcgtggcttcgtccgacaagagatgtcgcaacactgtgcgtgtcagggccagtttattgcctcgggttcgcgaccgctgccaagttacgcagccgatactgcgggctcccaactccacgcagtgccagtgctccgggtgtcccatgcagaagaagaagaacgagtgccacctgaggatgatgagtattcagagtattccgaatactctgtcgaggaataccaggatcccgaggcaccatgggattccgatgatccttgttcgcttccccttgacgagggttcgtgtaccgcttacaccctccggtggtaccatcgcgctgtgaccggttcaaccgaggcttgtcatccatttgtgtacggcggttgcggcggaaatgcgaatcgctttggtaccagggaggcgtgtgaaagaagatgtccaccaagagtggttcaaagccagggtaccggaactgcacaggat

SEQ ID NO: 9573 - DNA, 8832 bp, synthetic construct
  misc_feature 1..8832: note = source = /note="Description of Artificial Sequence: Synthetic coding sequence"
  source 1..8832: mol_type = other DNA
atgacattgaggctattggtcgccgccctgtgcgcaggtatattggccgaggctccaagagtaagagctcaacacagggagcgggtgacctgtacacgcctgtatgcggcagatatcgtgttcctgctggacggatccagttcaattggccgaagtaattttcgggaggtgagatcctttcttgagggcttggtgctgcctttctccggggctgcctccgcccagggggtgaggttcgcaaccgtacagtactctgatgatccgcgcacagagttcggcctagacgccttgggctctggcggcgacgtgattagggccataagggaactgagctataagggcgggaacactaggactggcgctgcgattttgcacgtggccgaccacgtcttccttcctcaactggccaggcctggggtgcccaaagtctgcatattaatcaccgacggaaagtcccaagatctcgtggacaccgcagctcaaaggctgaaaggacagggggtcaaactcttcgcggttggaataaagaacgccgatcccgaggagctgaagcgggtagcaagtcagcctacgagcgacttttttttttttgtgaatgatttcagcatccttaggactctcctccccttggtgagtagaagggtatgcactaccgcggggggtgttcctgtgacacgtcccccagatgactcaaccagcgccccccgggatctggttttgagtgagccgtctagtcaaagccttcgagtgcagtggactgcagcctctggccccgtcaccggctacaaggtgcagtataccccactcacgggactgggccaaccccttccctccgaaaggcaggaggtcaacgtcccagccggcgagacatcagttaggctgcgcggcctgagacctctcaccgaataccaggttacggtgatagccctctatgccaattccattggggaggccgtctctggtacagctcgtacaaccgctcttgagggccctgagctgaccatccagaatacgacagctcactcactcctagtcgcctggagatctgtgccgggagcgaccggctatagggtgacatggagggtgctgagcggcggacctactcagcaacaagaattagggccaggacagggatctgtgctgttgagagacttggaaccagggacagactatgaagttacagtgtcaacacttttcgggcgctctgtggggccagctacttccctgatggctcgaaccgatgcttctgtggagcagaccctcagacccgttatcctcggccccaccagtatactgttaagctggaaccttgtccctgaggctcgcggataccgcttggagtggcgaagagagactggactggaacctccacagaaagtcgtgctgccaagcgatgtaactcgctatcagctggacggccttcaacccggcaccgagtacagattgacattatacacattgctggagggccatgaagtggctacccccgctactgtagtgccaacgggtcccgaattgccagtctcccccgtgaccgacctacaagccacagaactccctgggcagcgcgtgcgggtgtcctggagtcccgtcccaggcgccacacagtaccggatcattgtacgtagcacacagggagtggaaaggacgctggttctacccggctcacagacagcgttcgatctggacgacgtacaggctgggctgtcatatacagtgagagtcagtgcaagggtaggtccaagggagggttcagcttctgtgctgaccgtaagacgcgagccagaaacccccctggccgtgcccggactgcgtgtagtggtgtccgacgctacccgtgtgagagtggcctgggggccagtgcccggcgcttctggatttagaatttcatggagcacgggctctggtcccgagagttcccagacactgcccccagattcgaccgctactgacatcactggactgcagcccggcaccacataccaggtcgcagtgagcgttctgaggggccgggaagagggcccggcagccgttatcgtcgctaggacagatcccctggggcccgtgagaacagtccatgtaactcaagcaagttcaagcagcgtgaccattacctggaccagggtgcctggagctaccgggtaccgcgtgagttggcatagcgcccacggaccagagaagagtcaattggtcagcggtgaggcaacagtggctgagctcgacggccttgaacctgatactgagtatactgtgcatgtgcgggctcacgtcgccggtgtagacggccccccggctagtgtggtagtgagaactgcccctgaacctgttggaagagtcagtagactccagattctaaacgccagctcagacgtgctcaggatcacttgggtgggggtcacaggggctactgcctatagattggcgtggggccgctctgaggggggacccatgcgtcaccagatactgcccgggaacacagattctgctgaaattaggggcctggaaggaggggtctcctattccgttcgggtcaccgcgttggtcggcgaccgggaagggacgcctgtctcgattgtcgttacaactcctccagaagcccccccggcattgggtactttgcatgtggtgcaaagaggcgagcacagcctaaggctccggtgggagcctgtcccgcgggcacaaggcttcctgttgcattggcagcccgaaggcgggcaggaacagagcagggtcctggggcctgagttgagctcctaccacctggacggactggagccagctacccagtaccgggtaaggctctctgtcctggggccagcgggtgagggccctagcgcagaagtgaccgctaggacagagtcacctcgcgttcctagcattgagctgcgcgtcgtagacactagtatagactctgtgacactagcttggacacctgtctcacgggcttctagctatatcctgtcatggagaccgttaaggggtccgggccaggaagtacctggtagccctcagacactccctggaatttctagtagccagcgcgtcacagggctggaacccggcgtgagttacattttctccttgactccagtgttagacggtgttaggggacccgaagccagtgtgacccagaccccagtgtgtccccgaggactcgccgacgtggtgtttctgccacacgcgactcaggacaacgctcatagagcggaagccactcggagagtgttggaacggctggtgcttgccctcggccccctagggccgcaagccgtacaggtcggcctgctctcttattcacacaggcctagtccactcttccctttgaatggtagtcacgacttgggaatcattctacagcggattagggacatgccttacatggatccctcaggtaataacctgggtacagccgtggtcaccgcccacaggtatatgctggcccctgacgcgcctgggcgcaggcaacatgtgcctggggtgatggtgctcctggtagacgagccactgaggggcgatatattcagtccgatcagagaggcgcaggctagcgggctcaacgttgtgatgctggggatggcaggtgcagatcccgaacagctaaggaggcttgctcccggcatggattcagtgcaaacgtttttcgccgtcgatgacggcccctcgctagaccaggccgttagcgggctggccacagccttgtgccaggcttcatttaccacacagcccaggccggaaccctgcccagtgtattgtcccaagggccagaagggtgagcctggggagatgggccttcgcggccaggtcgggcccccaggtgaccctggtctacctggccgtacgggggcaccaggaccgcaaggacctcccggatccgccacagctaaaggtgagagggggttccccggagcagacggtcggccagggtccccagggagagccgggaacccgggcaccccaggggcaccagggctgaagggttcgcctggactaccaggacccagaggtgaccctggggagcggggcccccgtggcccaaaaggtgaacccggcgccccggggcaggtcatcggtggtgaaggccccgggctgcccggccggaaaggtgatccagggccctccggtccccccgggccgcgaggccctctgggggacccgggaccgaggggtcccccaggacttcctggaacggcgatgaaaggcgataaaggagacagaggtgagagaggaccacctgggcctggcgaaggcgggatagccccgggtgagcccggcctcccaggcttgcctggcagccccggtccgcagggccccgttggccctccaggaaaaaaaggggagaagggcgattctgaggatggcgctccaggccttccaggacaacccggctcccctggtgaacaaggacctcggggaccccctggcgccattggcccaaagggggataggggattccctggaccccttggtgaggccggtgaaaaaggcgagcggggccccccaggccccgctgggtctcgcggtctgcctggagtagctggacgacccggagccaaaggacccgaaggtccaccaggtcccacagggcgccagggggagaagggagaacccggcaggccaggcgatcctgctgtggtggggcctgccgtggcggggcctaaaggggaaaagggggatgtggggcccgctgggcctagaggagccacaggcgttcaaggagaaaggggaccaccggggcttgtgctgccgggtgaccctggcccaaaaggcgaccctggcgaccgcggcccgattggtttgaccgggcgggcggggccccccggggattctggtccaccaggtgagaaaggcgatccaggacggccagggccccctgggcctgtgggcccccgcggccgggacggtgaggtgggagaaaaaggcgatgagggcccgccaggagatccaggactgcctgggaaggcgggtgagcgcgggttgcggggtgctcccggtgtgagaggcccagtgggtgaaaagggtgaccagggagatccaggggaggatggccgcaatgggtctccaggctcctcagggcccaaaggcgaccgcggcgagcccggaccccctggcccacccgggcgtctggtggacacaggccctggagccagggagaaaggagaacctggggatagaggacaagaagggccacgtggcccaaaaggagatcctggccttcctggtgcccccggcgaaagagggatcgaggggttcagaggacctcctggaccccagggggacccaggcgttagggggccagccggcgagaaaggagacagaggccccccaggattagacggcagaagtggtctggatggcaagccaggcgcagcaggtccaagcgggccaaatggcgcagccggcaaagcaggcgatcctggtcgggatggtctgcccggcttacgtggggagcagggtcttcccggtccctccgggccgcccggtcttcccggcaagccaggcgaggacgggaagccgggactcaacgggaagaacggggaacccggagacccaggcgaagacggcagaaaaggagagaagggggactccggagcatcaggtagggaaggcagagacgggcccaagggggaaagaggagcacccgggatattgggaccccagggacctcccggactgccaggtcccgtaggccccccaggccagggattcccaggcgtacccggaggtacaggccccaagggtgatcggggagagacaggtagtaaaggggaacagggactacccggggagcgagggctcaggggagagcccggctctgttccaaacgtagataggctgctcgagacggctggaataaaggcaagtgccctgcgggagatcgtggaaacctgggacgaaagcagcgggagcttcctcccggtgcctgagcggcgcagaggtcccaaaggcgattcgggcgagcaaggacctcccggcaaggaagggcccataggattcccaggggagcgcgggctcaagggtgatagaggcgaccctggcccacaaggcccaccaggattagcacttggggagcgtggaccgcctggtccatcagggctggccggcgaaccgggtaaacccggaattccaggcctcccaggccgtgctggcggagtgggtgaagcaggacgccctggcgagcgtggcgagcggggcgagaagggcgaacgcggcgagcagggacgagatggcccacccgggcttcctggaaccccaggcccgccggggccccccgggccgaaagtatctgttgatgagccgggaccaggccttagcggggaacagggacctccaggtttgaaaggggccaagggtgaacccggttctaacggcgatcagggccctaagggcgacaggggtgtgccaggcatcaaaggagatagaggtgagcccggcccacgaggacaggacggcaacccaggcttgcccggcgagcgggggatggcagggccagaaggcaaacctggactccagggcccgagagggcctccaggcccagtcggcggccatggggatcccgggccacccggcgcacctgggctagccgggcctgctggtcctcagggtccctctggattgaaaggcgagcccggcgaaaccggcccgcctggaaggggattgactgggcctactggcgcagtgggcctaccagggccgcctggcccttctggacttgtgggtcctcagggcagtccaggacttccaggacaggtgggcgagaccggcaagccgggtgcacccggacgcgatggagctagcgggaaagatggagaccgcggtagtcccggggtgccagggagtccagggctgccaggcccggtcggcccaaagggtgaaccggggcctaccggggctccgggccaagctgtggtagggttgcccggggcgaaaggtgaaaagggagcccctggcggcctcgccggtgacctagttggcgagcccggagctaaaggcgatagaggcctgcctggtcctcgtggtgagaagggggaagccggcagagccggcgaaccgggcgacccaggagaggatggacagaagggagctcctgggccgaagggcttcaaaggtgaccccggcgtgggcgtgcccggcagtcccgggccaccgggccccccgggcgtgaagggggacctcggtctgcctgggctgcccggggcccccggggtagttggcttccctggacaaacgggccctaggggtgagatgggtcagcccggcccctccggagaacgcggactcgccggtcctccaggcagagaggggattccaggtcccctcgggcctcctggtccacctgggtcggtgggaccaccaggagcctccggcctaaagggagacaagggggaccccggagtgggactccccgggccacgaggggagagaggagagccaggcatccggggggaggatgggcgtccaggtcaggagggccctcgcgggctgacgggcccacctggaagcaggggcgagcggggagagaagggagacgtgggaagcgcgggtttgaagggggataagggggactcagccgtgattttaggcccgccgggcccgagaggcgccaaaggtgacatgggcgagaggggcccaaggggactggacggggacaaaggaccccggggcgataacggtgatccaggagacaagggctcaaagggcgagccaggggataaaggttctgctggcctcccgggcctgcgaggactgctgggccctcagggacagcccggcgccgccggtatccctggcgacccaggcagtccaggcaaggacggtgtccccgggatccgtggcgaaaagggagacgtaggctttatgggccctaggggcctgaagggggaacgcggagtgaagggcgcatgcgggctagatggtgagaagggtgacaagggcgaagccggccctcctggcagacctgggctagccgggcacaagggtgagatgggagaacctggagtccccggccagtcgggcgctccaggtaaggaaggcttaatcggccctaagggggatcggggatttgacggacagcctggaccaaagggagatcagggagaaaagggcgagagaggaaccccgggtataggcggctttcctggaccttccggaaatgacggatcagcaggcccaccggggccgcccggctctgtgggaccaaggggacccgaaggcctgcagggccagaagggtgaaaggggtccccccggcgaacgggttgtgggcgccccaggggtccccggagcccccggcgagcgaggcgagcaggggagacccgggccggctggacctaggggtgagaaaggagaggccgcgctaaccgaagatgacatccggggattcgtgcggcaggagatgtcacagcattgtgcctgtcaggggcagttcatcgcaagcggatcacggccacttccttcgtacgcagcagataccgcaggatcccaactccacgccgtcccagtcttgagagtttcccacgcggaggaagaggagagggtgccacctgaagacgacgagtacagtgaatacagcgaatactccgtggaggaataccaggatccggaggccccatgggatagcgacgatccgtgtagccttccactggacgaggggagttgtaccgcctacactttaagatggtaccaccgagctgtcaccggcagtaccgaggcatgccatcccttcgtgtatggtggctgtggcggtaatgctaatagatttgggacacgtgaggcatgtgagcgccgttgtcctccacgcgtggtccagagccaagggaccggtacagcccaagac

SEQ ID NO: 9574 - DNA, 8832 bp, synthetic construct
  misc_feature 1..8832: note = source = /note="Description of Artificial Sequence: Synthetic coding sequence"
  source 1..8832: mol_type = other DNA
atgaccctgcgattgctggtggccgctctgtgtgcaggaatattagcggaagccccccgggttagagcacagcacagagagcgtgtgacatgtaccagattatacgccgcggatatagtgtttctattggatggttcgtcttcaataggtcgttcaaacttccgggaagttaggtccttcctcgaaggcctcgtgctgcctttttcaggggcagctagcgcacaaggggtgcggtttgccacggttcagtatagtgacgatcctcggacggagtttggactggacgccctcggcagcggaggcgacgtgatcagagccatacgcgagttaagttataagggcgggaacactcggacaggcgcagccatcctgcatgtggctgaccacgtgttcctccctcagctggcacgcccaggtgttcctaaagtgtgtattctaattaccgacggcaagtcccaggatcttgtcgacacagccgcacagagactgaaaggtcagggcgtgaagctcttcgccgtgggaatcaaaaacgccgatcccgaagaacttaaacgtgtagcttcccaacctacctccgatttctttttcttcgtcaacgacttctcaattttaaggactcttctgcccctcgtctcccgtcgggtgtgcactacggctggcggcgtgccggtgaccaggcctccggacgatagcacatctgccccccgcgacctcgtactgtccgaaccctcttctcagagcctgcgagtccagtggaccgctgcctcaggacctgtgacaggttacaaagtacagtacactcctctgactggactcgggcaacccttgccctcagagaggcaggaggttaacgtgcccgcaggagaaactagcgtaagactgcgggggttaaggccgctgactgagtatcaggtaactgtgatcgcactctacgcaaatagcatcggggaggcagtcagtggtactgcgcgcacaaccgctttagaggggcctgagctaactatccaaaataccacagcacactctctgctggtggcgtggagaagtgtccccggcgcgacaggctacagagttacttggagagttctttccggaggaccaacccagcagcaggagctgggtccaggacaggggagcgtgttactgcgagatctcgagccaggtacggactacgaagtgacggtgtccacactttttggacgctcagtgggccctgcgacgagtctgatggccagaactgacgcgtctgtggagcagaccctgcgccccgtgatccttggacccacctccatcctgctgagctggaacctggtgccagaggcccgcggataccgcttggagtggcgacgcgagacaggcctggaacccccccaaaaggttgtcctcccgtccgacgtcactagataccagctggacggtctgcagcccggaacagaataccggctgactttgtacactctgctggagggccacgaagtggccactccagccaccgtggtccctactggcccagagttgcccgtttctcccgtcacagatcttcaggctaccgaacttccaggccagcgagtccgtgtgagctggagccctgtaccaggggccactcagtataggataatcgtgcggtccactcagggggtggaacggaccttggtcctgcccggtagccagaccgctttcgatctcgacgacgtacaggctggcttgtcttacacagtgcgcgtgagcgctcgggtcggtcccagagaggggagcgcctccgtcctcacggtaagacgcgagcccgaaacaccgttagccgtcccaggtctgcgcgtggttgtttcagatgctacgcgggttagggttgcctggggacctgttccaggtgcaagtggcttcagaatcagctggtctacagggtcaggccctgagtctagtcagaccttgccgccggacagtaccgcgactgatataaccggactccaacctggcaccacctaccaggtagcagtgtcagtgctgcgcggtagggaggaaggccccgccgcagtgatagttgctcgcactgatcctctgggccctgttaggacagtgcatgtgacacaggccagtagcagttcagtgacaatcacttggacgcgagtcccgggagccaccggctatagagtgtcctggcactctgcccacggtccagaaaaatcccaactggtctcaggagaagcaaccgtggccgagctagacggcctggaaccagataccgaatacacagtacatgtcagggcccatgttgctggcgttgacgggccacctgccagcgtggtcgtgaggactgcccctgagcctgtagggcgcgtgtctcgacttcagattcttaacgcttcatcagacgttctgcgaattacatgggtgggagtcacaggtgcaactgcataccggctcgcctggggcagatctgagggcggcccaatgcgccatcagatcctgcccggtaatactgactctgcagagatccggggtctggagggaggagtatcttatagcgtgagggtgaccgcactggtcggggatagggaaggtacgccagtctctatagtggttacaaccccccctgaggcgcctccagctttgggcaccctgcacgtagtacagcggggcgaacacagcttgaggctgcgatgggagcccgtacctcgtgcgcagggattcctcttgcattggcagcccgagggggggcaagagcagtcgcgtgttttgggaccggaactgtcctcataccatctagacggactggaacccgcaacacagtaccgggttcgcctcagcgttctgggacccgcaggagagggacctagtgcggaggtaaccgcacgcaccgaaagtccccgagttccctccattgagttacgggtggtggatactagcatagactcagtcactctggcgtggacccctgtaagccgagcctcttcatacatcttgagctggagacccctacgggggcctggacaagaggtgcccggttccccccagacactgcctgggatttcttcctctcagcgcgttaccgggctggagcctggcgtcagttacattttcagtctgaccccggtcctggatggtgttcggggtccagaagcatcagtgacccagactccagtttgcccgcgggggcttgctgatgtggtgttcctccctcatgccacccaggataacgcacaccgtgccgaagccacgagaagagtactcgagcgtctggtgctcgcactaggcccactgggtccccaggcggtccaagtgggacttcttagctattctcaccggcctagtcccttattcccattgaacgggtcgcatgacctgggaattattctccagcggatccgagatatgccatacatggaccccagcggaaacaacctggggaccgcagtggttaccgcacatcgttacatgcttgcccccgatgccccaggtagacgtcaacacgtgccaggggtgatggttctccttgtagatgagcctctgaggggggacatcttttcacctatccgcgaggctcaggcctcaggcctcaatgtcgtcatgttaggcatggcgggagcagacccggagcagctccgccgattggcgccaggtatggactcggtacaaacatttttcgccgtcgacgacggcccatcgctagaccaggccgtcagcggactcgctacggccttatgccaggcctccttcacaacccagcccagacctgagccctgccctgtctactgtccgaaggggcagaaaggggaacctggagagatgggactcagagggcaggttggaccaccaggcgatccaggccttccaggacgaacgggcgctcccggccctcagggccctccaggaagcgccaccgccaagggcgaacggggctttccaggcgcagacggtagacccggctccccgggacgggcagggaatcccgggaccccgggggctccaggactgaaaggaagccctgggctgccaggtccgcggggtgacccaggcgagagaggacctagaggacccaaaggcgaacccggggcgcccggtcaggtgattggaggcgagggacctggcctgccgggtaggaaaggcgaccctgggccgtcaggccctccaggaccccgggggcccttaggcgatcccggaccgagggggccacctggactccccggaacagctatgaagggcgataaaggagacagaggggaacgcgggccccctggacccggtgaaggcggcattgctccaggggagcccgggttaccagggttgcccggcagtccagggcctcaagggccggtgggcccccctggaaagaaaggcgagaagggggatagtgaagatggcgcccccggcttacctggtcaaccaggaagccctggagagcaaggaccccgcgggccacctggcgcgatcggaccaaagggggataggggattccccgggcctcttggtgaggctggcgaaaagggcgagagggggccacctggaccagccggatccaggggcctcccgggcgtcgccgggagaccaggggctaagggcccagagggtccaccgggccccactggccggcagggcgagaaaggagagcctggcaggccaggcgatcccgccgtcgtgggaccggccgtcgcggggcccaaaggcgagaagggtgacgtggggccagccgggcctcgtggcgctactggcgtgcagggagaaaggggtcccccgggtctggtgctgccaggagatccagggcctaaaggtgatcctggtgaccgcggacccatcggtctcactgggagagctggtcctcctggcgacagtggtccaccaggcgagaagggcgaccctggacgcccaggaccgccaggacctgtgggccctcgcggacgggacggggaagtgggcgaaaagggcgatgaaggaccacccggggatccaggcctgcccgggaaagctggtgagaggggactgagaggtgcccctggtgtccgcgggcccgtgggggaaaagggagaccagggggacccaggcgaggacggccggaacggctctcctggatcgtccgggcctaagggcgacaggggcgagcctggaccccctggaccgccaggcaggttagttgacactggccctggagcacgcgagaagggcgagccgggtgatcgcgggcaggagggtcctagagggcccaagggcgatcccggtttacctggcgcccccggggagaggggaatcgagggttttagaggacctcccggaccacagggcgaccccggagttcgcgggccagccggggaaaagggagaccgtgggcctcccggtctagacggtaggtccggactcgatggaaaaccaggcgcggccgggccatctggtcccaacggggcggccggcaaagctggtgacccaggacgagacggcctgccagggctgcggggcgagcaaggactgccaggcccatccgggcccccgggcctacccggcaaaccaggggaggatggcaaacctggactaaatggcaagaatggggagcccggggatcccggggaggacggtaggaaaggcgaaaaaggtgactctggagctagcggccgcgaaggtcgcgacggacccaagggtgaacgtggtgcccccggcatcctcggaccacagggcccacctggactcccagggccagtcggtcccccaggccaggggttcccaggggtgcccgggggcactgggcctaagggcgacagaggagagacggggtcgaaaggcgagcaagggctccccggtgagagagggctgcggggtgaacctggatccgtgcccaacgtggacaggttgctggagactgcgggcatcaaggcctcagccctgagagagatagtggaaacttgggacgagagcagcgggagttttcttcccgtccctgaacgaaggaggggccccaagggagactcaggtgagcagggtccacccggcaaagaggggccaatcggattcccaggtgaaaggggtttgaaaggtgaccggggcgatccaggtccacagggcccccctggtctggcactcggggaaagaggtcctcctggcccatccgggctagccggtgagcctgggaagcctggcattccaggactgccagggagggccgggggtgtaggggaagccgggcggccaggcgagcggggtgagaggggtgagaaaggcgagaggggcgagcaagggagggatggcccaccgggtcttcccggaacacctggtcctcccgggcccccaggacctaaggtgagcgtggatgagcccggccccggattgagcggggaacaggggccaccaggccttaagggcgcgaagggtgagccgggcagtaatggcgatcagggaccaaagggtgaccggggagtgccaggcataaagggagaccgcggcgaacccgggccccggggccaggatgggaatcccgggctgccgggagagaggggtatggcgggccccgagggcaagccaggtttacaggggccgcgcggacctcccgggcccgtcggaggacatggggacccaggccctcccggtgcccccggattagccgggcctgccgggccccagggccccagcggtctcaagggtgaacccggtgaaaccggacccccaggaagagggctaactggccccaccggcgccgtagggttgcccggaccacctggcccatctggcctggttggtccgcaggggtctcccggactccccggacaggtaggagagacggggaaaccgggagctccaggccgagacggagcgagcggaaaggacggcgaccgcggctcacccggcgttcctgggtcgcccggtttacctgggcccgtcgggcccaaaggggaacccggccctacaggtgcccctggacaggcggtggtcggactgcctggcgcaaaaggagagaagggcgcccccggtggactcgctggagacctggtcggcgagccaggagctaaaggtgaccgtggtctgccggggcctcggggggagaaaggtgaggcaggacgggccggcgagcccggtgatcctggcgaagatgggcagaagggagctcctggaccaaagggtttcaaaggcgaccccggtgtgggagtccctggttcaccgggcccccccggcccccccggagtcaagggcgacctcggccttccgggtttacccggagcccccggggtagtggggttcccaggacagaccggccctcgtggcgagatgggccagccagggcctagcggcgagagagggctggctggccctcccggtagggaaggtatcccgggcccactagggccaccaggccccccaggatcagtcgggcccccgggagccagcggcctcaaaggggacaagggagatccaggagtgggacttcccggccctcgtggggaacgtggagagcctggcattaggggggaagatggtcggcccggccaggagggcccacggggcttgaccggcccaccaggttcccggggggagaggggggagaagggagacgtgggcagcgccggactcaagggcgacaaaggggatagcgccgttattctggggcctcctggcccacgaggggctaagggtgatatgggggaacgggggcctaggggcttagatggagataaggggccccgcggagataatggggaccctggtgacaagggctctaagggggagcccggtgacaagggctcagcgggacttccaggcctacgcggattattgggcccgcaaggccagcccggcgccgcaggcattcccggtgatcccggctctcctggcaaagatggcgttccgggaatccgaggcgagaaaggcgacgtaggctttatggggcccagagggctgaagggtgagcgcggagtgaagggtgcttgcggtcttgatggtgagaagggggataaaggcgaagctggtcctcccggacgcccaggtcttgccggccacaaaggcgagatgggcgagccgggcgtgcctggacaatctggggccccagggaaggaggggcttattgggcccaaaggtgaccgtgggttcgatgggcagcctggacctaagggcgatcagggggaaaagggagaacgcgggacccctggcataggcggattccctggaccaagtgggaatgacggcagcgccgggccgccggggccaccagggagcgtggggcctagaggtcctgaaggtcttcaggggcagaagggcgaaagaggaccccccggagaacgagtagtgggagcgccaggagtaccgggcgcccctggggaaagaggcgagcaagggcgccctggaccagctggcccacgcggggaaaagggggaagccgctctgacagaggatgacattagaggtttcgtgcggcaggagatgtcccaacactgcgcctgtcagggtcaattcattgcgtctggttctcgcccactgccaagttatgccgctgacacagcaggctcccaactgcatgccgtgcccgtcctcagagtgtctcatgccgaggaagaagagagagtgccacccgaggatgatgaatattctgagtatagtgaatactccgtggaagaatatcaggacccagaagcaccctgggattcggatgacccatgttcactgccccttgacgagggatcttgtaccgcttacaccctcagatggtaccaccgcgctgttaccggctcgacggaagcatgccaccccttcgtgtacgggggttgtggtggaaatgccaacagattcggcactagagaagcttgcgagagacggtgtccacctcgcgtggtccagtcacagggtaccggcaccgcccaagat

SEQ ID NO: 9575 - DNA, 8832 bp, synthetic construct
  misc_feature 1..8832: note = source = /note="Description of Artificial Sequence: Synthetic coding sequence"
  source 1..8832: mol_type = other DNA
atgacccttaggttgttggtcgccgcactgtgcgcaggaatactcgctgaggcccctcgggtgcgcgcgcaacatcgtgagcgggtgacttgtacccgcttatatgcagctgacattgtgttcctgctcgatggctctagctccatcgggaggagcaacttccgggaggtacgctcctttctcgaagggttggtccttcccttcagtggagccgcaagcgcgcagggcgttcggttcgccaccgtgcagtacagcgatgaccctagaaccgagttcggcctggacgcactggggtctggcggagatgtcattagggcaatacgcgagctgtcatacaaaggcggcaacacccgcaccggcgccgccattcttcacgtggctgatcatgtgttcttgccccagctcgcccgaccgggagttccaaaagtgtgtatcctgattaccgatggaaaatcacaggacctggtcgacaccgcagctcagcggttgaagggtcaaggtgttaagttgttcgccgtcggcattaagaacgccgacccagaggagctgaagagggtagcctcacagcctacgtctgattttttcttttttgtgaacgacttctctatcctcaggacactgctacccttagtgtccaggagggtgtgtaccacagcggggggagtgcccgtaactaggccgcccgatgactctacctcagcccctcgggatctcgttctctccgagcccagcagtcaatccctaagagtccagtggaccgcggctagcggaccggttacggggtacaaagtccagtatacacctcttaccgggctggggcagccattaccaagcgagaggcaggaagtcaatgttccagccggagaaacttccgtgcgcctccgcggactgcgtccattaacggagtatcaggtgaccgtgatcgccctgtatgcaaattccatcggcgaagccgtcagcggcacagcaagaacaactgccctggaggggcctgaactaacaatccagaacaccaccgctcatagtctgctagttgcatggcgttccgtgcctggtgctaccgggtatcgggtgacatggagagtcctcagtggtggccctactcagcaacaagagttgggcccgggccagggctcagtacttctgcgggacctggaacctgggacagattatgaggtcacagtgtccaccctctttggtcggtcagtcggccccgctacctcattgatggccagaacggacgctagtgtggagcagaccctcagacccgtgatcctggggcccacaagcattctgttaagttggaatttggtgcctgaggcccgcggttatcgcctggaatggcgtcgggagaccggcctcgagccaccccaaaaagtagtactgccatcggacgtaacccggtaccagcttgacggcctgcagcctggaacggagtatcgcctgacattgtacactctacttgagggacacgaggtcgcaacccccgccaccgtcgttcccaccggacccgagcttcccgtcagtccagtgacggatctgcaggctacagagctgcccgggcagcgtgtgcgggtgtcatggtctcctgtgcccggagcaactcagtacaggattatcgtaaggtccacgcagggggtggagcgcactctggtccttcctggcagtcagacagcgtttgacttagatgacgttcaggcaggcctctcttatactgttagggtcagcgctagggtgggccccagggaaggctccgcaagcgtactgactgtaagaagggagcctgagacgcccctggccgttccaggcttgcgagtcgtggttagcgatgccacaagagtgcgagtggcctggggaccagttccgggcgccagtggctttagaatctcctggtctacaggatctggccccgagtcttctcagacgttaccccctgactccacggccactgacattactggattgcagcccggaacgacctaccaggtcgctgtgtccgtcttgagaggaagagaggagggtcctgctgctgtgatagttgcgcggacagaccctcttggccctgtgcgcacagtgcatgtgactcaggccagttcctcctccgttactatcacctggacccgcgtccctggggccacaggctatagagtgagctggcactccgcacacggacctgagaaaagtcaattagtaagcggggaggccaccgtcgccgagctcgacggacttgagcccgacaccgagtatacagtgcacgtgcgggcccatgtggcaggggtggacgggccccctgcaagcgtcgtcgtaaggaccgcccctgaacctgttggaagggtgtctaggctccagatcttgaacgcatctagcgatgtgcttagaatcacttgggtcggggtcactggagcaaccgcctatcgcttagcctgggggcggtcagagggtggccctatgcggcatcagatactacccggaaatacagactcagcagagattcgaggattagagggaggggttagctatagcgtccgcgtaaccgcactggttggcgacagagaagggactcctgtcagcattgtagtaacgacacctcctgaggcaccgcccgcacttggcacactccacgtagtgcaacgcggagagcattccctgaggctgcggtgggagcctgtgcccagagcccaagggtttttgctgcactggcaaccagagggcggacaagaacagtcccgggttctgggtccggagctctcttcgtatcacttggatggtctcgagcccgccacacagtatagggtaagactcagtgtgctcggccccgcaggcgagggccccagcgccgaggttactgcccgcacagaatctccacgcgtgccgtcaattgagctgagggtcgtcgacacttccattgacagtgtgacattggcatggactccggtgtcgagggcgagctcatacatactcagttggcgacctctgaggggccccgggcaagaggtgccagggtcacctcagacattgccaggtatcagctcttcccagagagttactggcctggagcctggagtatcgtacatttttagcttaacgccagtcctggatggagttagaggccctgaggcatcagttacccagacccccgtgtgtccaagggggttggcagatgtggtgttcttgccgcatgcgacacaggataatgctcatcgggcagaagctactagaagagtgcttgagaggttagtgctggcactcggcccactcggcccccaggctgttcaggtaggactgctgtcctactcccatcgaccaagccctctgtttccactgaacggctcccatgatcttggcatcatccttcagcgcattcgagacatgccatatatggatcctagcgggaataacctggggacggccgtcgtcaccgcccatagatatatgcttgcccccgacgcgcctgggcgaaggcagcacgtccccggggtaatggtattgctcgttgatgagcctctcaggggcgatatcttttcccccatcagagaagcccaggcctccggcctcaacgtggtaatgctgggaatggccggcgccgatcccgaacagctgcgccgcttagccccaggcatggactctgtacaaactttctttgccgttgacgacggtccctcactagatcaggcagtgagcggattggccacagcgctgtgtcaagcgtctttcactacgcagccacgtccagagccctgtcccgtgtactgcccgaaaggtcaaaaaggagagccaggagagatgggcctccgaggccaggtggggccccccggcgatcccggcttgccagggagaactggcgcaccgggaccacaaggcccaccggggtctgccacagcgaaaggtgaacggggctttcctggtgcagacggaaggcccgggagccccggacgcgccggtaacccaggcacccctggggcccctggcctgaagggttcaccaggccttcccggccctcgaggcgaccctggtgagcggggccctcggggcccgaaaggcgagcccggtgcacccggacaggtaattggcggagagggccctggattacctggtaggaagggagatccaggacctagcgggcctcccggtccacgcgggcccctcggtgatcccggaccccgcgggcccccagggctgcccggcaccgccatgaagggcgataaaggcgaccgaggcgaacgcgggccgccaggtcccggtgaggggggcatagccccaggtgagccaggactcccgggtcttcccggaagccccggtccgcaaggccctgtggggccacctggaaagaaaggggagaaaggcgactctgaagacggagcccccggcttgccaggtcagcccggttcacccggcgaacagggcccacgaggtccccccggggccatcggacctaagggagatcgggggtttcccggacctctaggcgaggccggcgagaaaggcgaacggggccccccggggcccgcaggtagccgcggattgccaggggtcgcaggtaggcctggggccaagggcccagaaggtcctcctggacctaccggaagacagggcgagaaaggcgaacctgggcggcctggagaccctgcagttgtgggccctgccgtggccggccctaaaggggagaaaggggatgtaggcccagcgggaccccggggggcaaccggagtccagggtgagcgaggtcctcccgggttagtgctgccaggcgatccagggcccaaaggggaccccggtgaccgcggacccataggcttgacaggccgggctgggccaccaggggactcgggaccgcccggggagaaaggagaccctgggcgacccggaccacccgggcctgtgggtccaagagggagagacggggaggtgggagaaaagggagatgaaggccctccaggggatcctggactcccgggcaaggctggcgagcgcggtctcaggggagcacctggtgtgcgcggaccggttggggagaagggggatcagggcgatcccggagaggacggcagaaacggttctcctggtagttcagggcctaaaggggaccggggggaaccaggccctccagggcctccggggagactcgtagatacaggtcccggtgcgagggagaaaggggagccaggcgataggggacaggagggccccagaggccctaaaggcgatcccggtctgccgggtgcgcctggcgagagaggaatcgaaggctttcgtggaccgccaggacctcagggagacccgggggtgcggggccccgcaggggagaaaggcgaccgtgggccgcccggactggacggaaggtcgggattagacggcaaacctggagcagcaggcccaagcggccccaacggcgccgccggaaaggcaggcgacccaggccgagatgggcttccggggttaaggggggaacagggcctgcccggacccagcggtcctccaggcctccctgggaaacccggggaggacggtaagccaggcctgaacggtaagaatggcgaaccaggtgatcctggcgaagacggccggaaaggggaaaaaggagattcaggcgcctccggacgggagggccgcgacggacccaagggagaacggggggcccccgggatcctcggaccccagggcccacctggcctccccgggcccgtaggcccccctggtcaggggttccctggcgtgccaggaggcactggacccaagggggaccgaggagaaactggatcaaaaggcgaacaggggttacctggggagcggggcttaaggggcgagcccggcagcgtgcctaacgtggaccgcctgcttgaaaccgccggaatcaaagccagtgcccttcgggagattgtcgaaacttgggatgagtcaagcggctcattcctgcctgttcctgaaaggcgtcgaggccccaaaggcgatagcggtgaacagggacctcccggaaaggaggggcccatcgggttccctggggaaagagggctgaaaggcgatcgcggagaccccggtcctcaaggcccaccaggtctggctctgggtgagagagggcccccaggcccttccggcctggccggagaacctggcaaacctgggattccggggctgccaggcagggcaggcggtgttggagaagctggaagaccaggagagcgcggagagagaggggagaagggtgagaggggcgagcagggacgagacggccccccaggcttgcctggcacgcccggtccgcctggacctcccggtccgaaagtgtccgtggacgagcctggaccaggactgtccggagaacaggggccacctgggcttaagggggcaaagggtgagccaggtagcaacggcgaccaggggcctaagggcgacagaggagtgcccggcattaaaggagaccgcggcgagccaggcccccgggggcaggatggaaacccagggctacccggggagcggggaatggctggtcccgaaggcaagcctggattacaggggcctagggggcccccgggccctgttggagggcatggagaccctgggccacctggcgcacccggactggccggtcctgctggaccccaggggccctccggcctgaaaggcgaaccaggcgagacgggccccccaggcagaggacttacgggccccactggagctgtgggccttcccggcccacccggtccttcaggtcttgtcgggccccagggttcccctgggctccctggccaggtgggggagaccggaaaacccggcgcccctggcagagatggagcaagcgggaaggacggggatagagggtctccaggcgtaccaggatcacccgggttacccggtcccgtcggcccaaaaggcgaacctggacccaccggcgccccgggtcaggcggtagtaggcttgcctggagcaaaaggagaaaagggcgcccccggaggcctagcaggcgacctggtaggcgaaccaggggccaagggagatcgaggtctgcctggaccaaggggagagaaaggagaagccgggcgcgctggcgagccaggcgaccctggtgaagatggccagaaaggagcccctgggcccaaggggtttaaaggtgaccccggagtgggtgtccctgggtccccaggtcctcctggaccaccaggagtgaaaggagacctcgggctgcctggcttgccgggtgcgccaggtgtcgtgggattccctggacagacgggacccagaggggagatggggcagcctgggccatcgggcgagcggggactggccggaccacctggaagggagggtattccgggccccctcggaccaccgggtccccctggctccgttggcccccctggtgctagcgggctcaagggagataagggagaccccggtgtgggactgccagggcccagaggggaacgcggcgagccgggcatcaggggtgaggacggtaggccgggacaggaaggacctagaggcctaacgggaccaccggggagcagaggcgaaagaggcgaaaagggcgatgtaggcagtgctggactgaagggtgacaagggagacagcgccgtgatactaggcccaccaggaccgagaggggcgaaaggagatatgggagagcggggccctcgggggctggatggggacaaggggccacgtggagataacggcgatccaggtgataaaggatcaaagggggaacctggcgacaaaggaagtgccggcctacccggcctgcggggcctgctcgggccacaggggcagcccggcgcagctggcatcccgggagatcccgggtctccagggaaggatggagttcctggaatcaggggagagaagggagatgtcgggtttatgggcccccgggggctgaaaggtgagcggggcgttaagggggcatgcggcttggacggtgagaaaggtgataagggagaggccggccctcccggtcggcccggactcgctggacataagggagaaatgggcgagcctggagttcccgggcaatccggggctcctgggaaggaggggcttatcggccctaagggagaccgtggtttcgacgggcaaccgggacctaaaggggatcagggcgagaaaggtgaaagggggacccccggcatcggcggcttccctgggccatccggcaacgatggctctgctggccctccaggcccaccggggagtgttgggccccgtgggcctgagggactccaaggccagaaaggtgaacgcggtcccccaggagaacgcgttgttggggctccaggcgtgcctggggcaccgggagaacggggcgagcaggggcggccaggtcccgccggtccaagaggggagaagggcgaggcagctttgaccgaggacgatatcagaggcttcgtaagacaggagatgtctcagcactgcgcttgtcagggacagttcatcgcctccggcagcagacccctaccatcatatgccgcagataccgctggatcccaattgcacgcagtgccggtgctgcgcgtgagtcacgcagaggaggaagagcgcgtgcctcccgaggacgacgaatattccgagtatagtgaatactctgttgaggagtatcaagatccagaggccccttgggacagcgacgacccatgttctctgccattggatgaaggctcttgtacggcatataccctgcggtggtatcatcgagcagtgacggggagcaccgaggcgtgccacccttttgtgtacggtggctgtggtgggaatgctaatcgattcggaacacgagaagcctgcgaaagacggtgtccccctcgtgtcgtgcagagccagggtaccgggactgctcaggat

SEQ ID NO: 9576 - DNA, 8832 bp, synthetic construct
  misc_feature 1..8832: note = source = /note="Description of Artificial Sequence: Synthetic coding sequence"
  source 1..8832: mol_type = other DNA
atgactttgcgcctgcttgtcgccgccctgtgcgcaggaattctcgcagaggctccacgcgtgcgcgcccaacacagagagagagtcacctgcacacgactctatgctgccgacatagtctttcttctcgacgggtcctcatccatcggtcggtccaacttccgggaagtccggtctttcttagagggtctcgtgctcccattcagtggcgctgctagtgctcaaggtgtgcgctttgccacagttcagtacagcgatgacccacgcactgagttcgggctcgatgccctgggctctggtggcgacgtgatcagagccatacgggaactcagctacaagggaggaaacacccgaactggtgctgccatccttcatgttgcagaccacgtgttcctgccacagctggctcggcctggagttcccaaagtgtgtattctgataaccgacggaaagtctcaggacttggtggacaccgcggcccagagactgaaaggacagggcgtaaaactcttcgccgttgggatcaagaatgctgacccggaagagctgaagagagtggcgtcgcagcccacatcagactttttcttcttcgtaaacgatttctccatactaagaacattacttcccctggtcagtagaagagtgtgtacgactgcagggggagttccagtgactcgaccccccgacgacagtacgtccgcccctcgggatctcgtgctgtccgagcctagctctcagagcctcagagttcaatggacggccgcctctggtcccgtgactggctacaaggtccagtatactccattgacaggactagggcagccgctccctagtgagcgccaggaggtgaacgtccctgctggggaaacaagcgtcaggctgcgtggactgcgccctctgacagagtatcaggtgactgtcattgccctatatgctaactctatcggagaggccgtgagcgggacagccaggacaaccgccctggagggaccggaactcaccatccagaacaccacagcgcattcactgttggtcgcatggcggtccgttcctggcgctacagggtacagggtgacctggcgcgtgctgtcaggcgggcccactcagcaacaggagcttggcccgggccaaggtagcgtgttactccgggacctggaacccggcacggattatgaggttaccgtctctactctgttcggaaggtccgtcgggccagcgaccagcctaatggccaggaccgatgctagtgttgaacagacactgcggccagtgatcctcgggccaacatcgatccttctgagttggaacctggttcctgaagcccgcggatatcgccttgagtggcgacgcgaaacaggcctcgagcccccgcagaaggttgttctcccttccgatgtgactaggtaccagctggatggcctgcagcctggtacagaatatcggctgaccttgtataccctattggagggtcacgaggtagcaacccctgctactgtggtcccaaccggccccgagctacccgtttctcccgtgaccgaccttcaggcgacggagttacccggtcagcgcgttagagtgagctggagtcctgtgcctggagcaacccagtacaggataatcgttcgatcaacacagggcgtggagcgaactcttgtgcttcccggttctcaaaccgctttcgacctggacgacgtgcaggccggtctgagttacacagtgagggtctccgctcgggtaggtccacgagagggatcagcatccgtgctgaccgtgaggagagaacccgagacacctctcgcagtacctgggctgagagtggtagtttcagatgccacccgggtgagagtggcttggggccccgtccccggcgcctcaggtttccggattagttggagtacaggttcaggacccgaaagctcgcagacacttccgcctgatagcaccgccacggacattaccgggctgcagcccggcaccacctaccaggtggcagtgtctgtgctccggggaagggaggagggccccgccgcggtgatagttgctagaactgatccccttggccctgtccgcactgtgcacgtaacccaggccagctcatcctccgtcactataacatggaccagggtgcccggggccacaggatatcgggtctcatggcacagcgcccacggcccggaaaaaagccaactagtatctggcgaggcgacagtggccgaactggacggcctcgagcccgacaccgagtacacggtgcatgtgcgagcccacgtcgccggcgttgacggcccccctgcatctgtagtggtccgcaccgcccctgaacccgtggggcgggtgtcccggttgcagattctcaatgcaagcagtgacgtcctgcggatcacctgggttggcgttacaggcgcaacagcttaccggcttgcctgggggaggagtgaagggggaccaatgagacaccagatcttgccgggaaacactgattccgccgagatccggggcctggagggcggcgtgtcatatagcgtgagagtgacagcccttgtgggtgaccgtgaaggcactccggtttccatagttgttacaacaccacccgaagcacctcctgctctaggaactctgcatgttgtccaaaggggcgagcatagtcttagactcagatgggagcctgtaccccgcgcacagggcttcctacttcactggcagccggaaggaggtcaagagcagtctagagtcctgggcccagaactgtcctcgtatcacctcgacgggttggagccagccacccagtatcgcgtgagactgtctgtgttgggtccagccggggagggtccttcggcggaggtcaccgcgaggacagagagccccagagtgccctccatcgagctcagggtggtcgatactagtattgactctgtcaccctcgcttggaccccagtaagtcgtgcaagtagctacatcctctcatggaggccgttgcgggggcctggacaggaggtaccagggtcaccgcagacgcttcctggcattagcagttcacagcgcgtgactggcttggaaccaggagtgagttatatattttcactgacacccgtgctggacggtgtcagggggcccgaggcttcggtcacacaaacaccagtctgccctcgtggacttgcagacgttgtttttctcccccatgcaacacaggataatgctcaccgcgccgaggcaactaggcgtgtcctcgagagactggtattagccttgggccccctggggccacaggccgtgcaagtcggtctcctaagctattcgcatagaccctcaccactgtttccattaaacgggtcccatgatttaggtatcatactccagaggatcagggatatgccttacatggaccctagtggtaataatttgggtacggccgtcgtgactgcacacaggtacatgttggcccccgacgctcctggacggagacagcatgtgccgggtgtgatggtcctattggtcgacgaaccactcagaggcgacatcttctcaccaatacgcgaagctcaggcgtctgggctgaacgtggtgatgctcggcatggcgggggcggatccagagcagctcaggcggctggcgcccggaatggattcggtgcagacttttttcgccgtcgacgacgggccaagcctggatcaggcagtatccggcctcgccacggcgctgtgtcaagcgtcttttactacccagcccaggcctgagccatgtcctgtatactgcccgaaggggcagaagggcgaaccgggcgagatgggattgcgggggcaggtgggacctcctggggaccccgggttaccaggacgaactggcgcccccgggccacaaggacctcctgggagcgcaactgcaaagggagagagagggttcccaggagcagacgggcggcccggctcaccggggagagctggtaatccaggtaccccgggggctccagggttgaaagggtctcctgggctgcctggacccagaggagacccaggcgagcgaggcccaagggggccaaaaggtgaacctggggcaccaggacaggtcatcggaggcgaaggcccaggcttgcctgggaggaagggagacccaggtccaagtggcccccctggcccgagaggaccactgggcgaccccggcccccgggggcctcccgggttgcctgggacagcaatgaagggtgacaagggagataggggggagcggggccccccgggacccggggaagggggaatcgcacctggagagcctgggctgcccggtcttcctggtagcccaggtccacagggcccagtgggtccaccgggcaagaaaggcgaaaagggtgactccgaagacggagccccaggattgccaggccagccggggtctcctggagagcagggaccgagaggtccccctggggctattgggccaaagggagatcgaggatttcctggtcccctgggtgaagcgggcgaaaaaggtgagaggggaccccccggacctgccgggtccaggggcctgcccggcgtggcaggtcgacccggagctaagggtcctgaaggacccccaggacccacaggtcgtcaaggcgagaaaggcgagccaggcagacctggcgacccagccgtggtaggcccagccgtggccggaccaaagggcgaaaaaggcgacgtgggcccagctggtccacggggagccaccggggtgcagggagaacgcggaccccccgggctggtgcttcctggtgaccccggcccaaagggggatccgggagatagaggcccgatcggcctgaccggccgggcagggccacccggggattccggacctcctggagaaaaaggggaccccggacgccccggaccccccggacccgtgggaccccgtggaagggacggggaggtgggggagaagggggacgaaggacctcctggagatcctggacttccaggaaaggcgggggagcgaggccttcgcggcgcgcctggggtccgggggccagtaggagagaaaggcgatcagggtgatccaggggaagacggaaggaatggtagcccgggctccagcggcccaaagggtgaccgtggagagcctggtccacctggccctcctggccggttggttgatactggccctggagcaagagagaaaggtgagcccggagatcgcggccaagagggacccagaggaccgaaaggggaccccggactccccggagcaccaggcgaacgcggaattgagggttttaggggcccacctggccctcagggcgacccaggtgtccggggaccagctggggaaaaaggcgatcgtggtcctcccggactggatggacgatctggactggacggcaaaccaggtgccgccgggccgtccggacctaacggggctgctggcaaggctggtgaccccggaagggacgggctgcctggcttgcgtggggaacaaggcctgccaggtcctagtggtccacccggtctaccaggtaaacccggcgaagacggaaagccagggctcaacggcaagaacggtgagccaggtgatcccggggaggacggccggaagggagagaaaggggactccggtgccagtggacgtgagggccgggatggacctaagggggaaagaggggcgcccgggatcctcggtccccagggcccgcccgggttacccgggcctgtgggaccgccggggcagggattccctggcgtgccgggaggcactggacctaagggtgacaggggggaaacagggtcgaagggggagcagggcctcccgggagaacgggggttacgtggcgagcctggctcagtacccaacgttgaccgccttttggaaaccgcaggtatcaaagccagtgcgctgcgtgagattgtggagacatgggatgagtcttcagggtccttcctccccgtaccagaacgaaggcgcggacctaagggagattccggcgagcaggggcctccgggaaaggaaggacctatagggtttccgggagagcgtggactgaagggtgatcgtggtgacccagggcctcaaggaccccctgggctggctttgggcgagcgcggacctcccgggccttcggggctggctggcgagccaggaaaaccagggatcccgggcctgcctggtcgcgccggaggagtcggagaggccggacgcccgggggagcggggagaacggggcgaaaagggcgagagaggcgagcaagggagggacggccctcctggcctgcccgggacaccaggcccccccggccctccaggcccaaaggtaagtgtggacgagccaggtcccggcttgtctggggaacaggggcctcctggcttgaaaggtgccaaaggggagccaggctcaaacggcgaccagggcccaaaaggcgataggggagtccctggaatcaaaggcgacagaggcgaaccaggcccccgcggacaggatggaaatccagggctgcctggagaacggggaatggctgggcccgagggaaagcctgggctgcagggtcctaggggaccaccaggcccagtggggggacatggggacccaggccctcccggagcccccggactcgcagggcccgccgggccccaggggcctagcggactgaagggcgaacccggagaaacagggccacccggccgcggcctgacagggccgaccggcgcagtgggtctccccggaccacccgggcctagcgggctggtggggccccaggggtccccggggctcccgggccaggtgggggaaacgggaaagccaggggcacccggaagggacggtgcgagtggaaaggacggagataggggatcgccaggtgttcccggatcgccaggcctccctgggcctgtcgggccgaagggggagccgggccctacaggagcccctggccaggccgtggtgggtctgcctggcgccaaaggagagaagggtgccccagggggcctagctggcgacctggttggcgaacctggcgctaagggggataggggtctgcctggaccccggggagagaagggagaagcaggccgtgctggagagccgggagacccaggcgaggacggccagaagggtgcgcctgggccgaaaggcttcaagggcgacccaggcgtcggcgtgccgggtagccccggacccccgggtcctccaggcgtgaaaggcgatctcggccttcccggcctgccaggggctcccggggtggtaggtttcccgggtcagaccgggccgcgaggggagatgggacagccaggcccgtccggcgagcgagggctggcaggaccaccaggccgagaggggattcctggaccgctaggtccccctggacctccaggatctgtgggcccacccggcgcttccggcttgaagggcgacaagggggacccaggggtggggttacctggaccaaggggagagcgtggcgagccaggcataagaggggaggatggaaggcctggacaggagggacctcgcggattgacaggccctcccgggtcccgaggtgagagaggggaaaaaggcgacgtcggttccgcgggtctaaagggggacaagggagacagcgctgtgatcttgggtccaccaggccctcgaggtgcaaagggagatatgggggagcgtggcccccgtggcctcgacggggacaaaggaccacggggcgataacggcgatccaggcgataagggctcaaagggagagccgggcgacaaagggagtgcgggacttccgggcttgagagggctgcttggcccacaggggcagccaggagctgctggaattccaggggacccaggcagcccaggtaaagacggcgtcccaggaatccgaggagagaagggggacgttggattcatgggtccacgcggcttaaagggagagcggggcgtgaagggggcctgcggactggatggcgaaaaaggcgacaagggggaggccgggccgccgggacgccccgggctggcaggccacaagggtgagatgggtgagcccggagtgccagggcagtctggagcccccggcaaggaaggtcttattgggccaaagggggaccggggattcgatggtcagcctggtcccaaaggggaccagggggagaaaggtgagcgcgggactcctggcattggaggcttccctggtcctagcggtaatgacggatctgccggaccaccagggcccccggggtccgtcggcccaagaggcccggaaggtttacaaggccaaaaaggcgagagagggcctcctggcgagcgtgtagtgggagccccaggagtccccggcgctccgggggagagaggcgaacagggccgccccggccctgcgggcccccgcggcgaaaagggcgaagccgccttaaccgaggacgatatccgggggttcgtgcggcaggagatgtctcagcactgtgcgtgccaaggtcaattcatcgcatccgggtctaggcccctgccttcctatgcagcagacacagcgggcagtcagctgcatgccgttcccgtgctgcgcgtgtcacacgcagaggaagaagaaagggtaccccccgaggatgacgagtactcagagtattctgagtattcagtagaagagtaccaggatcccgaggcaccctgggactccgacgatccttgcagcctgccactggatgagggcagttgcaccgcttataccctccggtggtatcatagagctgtgaccggtagcactgaggcctgccatccttttgtgtacggagggtgtggggggaacgctaatcgcttcggaactcgggaagcctgcgagcgcagatgcccaccacgggtcgtgcagtcccagggcacaggcactgcccaggat

SEQ ID NO: 9577 - DNA, 8832 bp, synthetic construct
  misc_feature 1..8832: note = source = /note="Description of Artificial Sequence: Synthetic coding sequence"
  source 1..8832: mol_type = other DNA
atgaccctgcgtctgctggtagctgccctgtgcgccgggatcttggctgaagctccccgtgtcagggcccagcatcgggaacgagtcacatgtacacgactgtacgccgcagatattgtctttctattagacggttcatcttccatcggccggtcaaattttcgggaggtacggtccttcttggagggcctggtcttgcctttctcgggcgccgctagcgctcagggtgtgcgcttcgctaccgtccagtattcagacgaccccagaactgagttcgggcttgatgccctcggctccggcggggatgtcattagggcgattagagagctgtcttataaaggcggcaatacgagaaccggtgcagcaatcctgcatgtggctgaccatgtgttccttccacagctggctcgcccaggggtgccgaaggtctgtatcttgataaccgacggtaagtcccaggacctggtcgacacagccgcacagcgcctgaagggtcaaggagtcaagcttttcgctgtggggataaagaatgctgacccagaggagttgaagagagtggcttcccagccgacatctgacttttttttttttgtcaatgacttttcaatactgaggactctattacccctggtctctcgcagagtctgcacgacagccggcggagtgcctgtgactcgccccccagatgacagcactagtgctcctcgggatctagtgctgtcggagccatcttcccaatctttgagggtccagtggacagctgccagcggcccagtaaccggctacaaggtgcagtatacccccctgaccggactggggcagcctttgccatccgagcgtcaggaggtcaacgttccagccggggagacctccgtgcgcctaagaggccttcggcctttaacagagtatcaggtgaccgtaatcgcgctgtatgccaatagcattggggaggccgttagtggaaccgccagaacaaccgccttggaagggccagagttgacgatccagaacactacagcccatagcctcctagtggcgtggcgttctgtacccggggcgactggttaccgagtcacctggagggtgctgagtggagggccaacccagcagcaggaactcgggcccgggcagggctcagttcttctgcgagacctggagccggggactgactatgaagtgactgtgtccacactgtttggtcgtagtgttggccctgccacaagcttgatggcccggacagatgcttctgtcgaacagacgctgaggcccgtgatcctcgggcctacgtccattctgctgtcatggaacttagtgccagaggccagaggctaccggctggaatggcggcgcgagaccggacttgagcctcctcaaaaagtggtgcttccttctgacgtgacacgctaccagcttgatggcctgcaacctggtacagagtacagacttaccctgtataccctattagaaggccacgaggtggctacacccgccaccgtggttcctacgggtccggagctgccagtgtctccggtgacggaccttcaagcgacggagttaccggggcagagggtcagggtctcgtggtctccagtgcccggcgccactcagtaccggataatcgttagaagcactcaaggcgtcgaacggacactggttcttcctgggtcccagacggcttttgatctggatgacgtgcaggcaggacttagctacactgtgagagttagcgctcgggtcggcccacgcgaggggtcagccagcgtgctgaccgtgaggcgcgagcctgagacaccactggccgtgcctggcctgcgcgtcgttgtcagtgacgcaactcgagtgcgtgtggcatggggaccagtaccaggagccagcggcttccgcatcagctggagtacgggcagcgggccagaatcctcacagaccctacccccagattcgaccgctactgatatcaccgggctgcaaccaggaacaacataccaagtggcagtctcagtgctgcgcggacgtgaggaagggcctgcagcagtgattgtcgcacgtaccgacccgctcggccccgtgagaaccgttcatgtcacccaggcttcctccagctcggtgacaataacatggactagagtgcctggcgctacaggataccgcgtttcttggcacagtgcacacggacctgagaagagtcagctcgtcagcggagaggccactgtagcagagctagacggactggagcccgacacggaatacaccgttcacgtgcgggcacacgtcgctggagttgatggaccccctgcctctgttgtggtgagaactgctcctgagcccgtcgggcgagtctccagacttcaaatcctgaacgcgtcgtccgatgtcctgaggatcacttgggtcggagtcactggggcgaccgcctatcgcctggcttgggggaggtcagaaggaggacccatgcgccaccagatactacccggcaacacagactcggccgagatccgaggcctggagggcggagtatcatattctgttagggtaacagcgcttgtgggggaccgtgagggaacaccggtgagcattgtggttacgaccccgccggaggcacccccagcactggggacactccacgtcgtacaacgaggggagcattccctgcgcttgcgctgggagcctgtgcctcgggcgcaggggtttctgctccattggcagcccgaggggggacaggaacagagcagggtgcttggcccagaattaagcagttatcatctggacgggctggagcccgccactcagtatcgggtcagactgagtgttctgggacctgccggggaggggccttccgcagaagtgacagctcggacggaatctcctagggtgccatcaatcgaattacgggtggtcgatacatctatagactccgtgactctggcctggaccccagtgagcagggccagctcctatatattgtcttggcgacccctcaggggaccgggtcaggaggtaccaggttctccccaaaccctgccaggcatctcctccagccagcgagtcactggacttgagcctggagtctcgtatatcttctctctgacgccagtacttgatggcgtcaggggccccgaggctagtgtgacccagactccagtgtgcccccgcggcctcgcagacgtggtgtttcttcctcatgccacacaggataacgcccacagagccgaggctacaagaagggtgctggaacgtctcgttctggctctcggaccactaggcccgcaggctgtgcaggttggactgttgtcctattctcaccggccatctcctctattccctctcaacggaagccacgacctcggaattattttgcaacgtattcgcgatatgccctatatggatccgagcggcaacaatctcgggacggccgttgtcacagctcatagatatatgctagcccccgatgcaccaggccggcgccagcatgttccaggcgtgatggtattgctggtggatgaaccactgcgaggcgacatcttttccccaatcagggaggcacaggcctctggtctaaacgtcgtgatgttgggtatggctggcgctgaccctgagcagctcagaagactggccccaggcatggacagtgttcagacattttttgctgtcgacgacggacctagtctagatcaggcagtaagcggcctagccacagctctgtgtcaggccagtttcaccacccaaccgaggcccgagccatgccctgtgtattgtcctaagggccagaaaggtgagcctggagagatgggtcttcgcggacaggtgggaccacctggtgatcccgggcttccgggtcgaacaggagcacccggtccacaaggtccacccgggtctgcgactgcaaaaggcgaaaggggttttcccggcgcggatggaagacccggcagtccagggagagccggcaacccgggaaccccaggcgcaccaggacttaagggctcccctggtttaccaggtccccggggagaccccggcgaacgaggaccgcgaggtccaaaaggcgagccgggcgctcccggacaggtgattggcggtgaaggtcccgggctgccaggtcgcaaaggagacccagggccatctggaccccccgggccccgtggaccgcttggcgaccccggtccccgtgggcctcccgggttacctgggactgccatgaagggggataagggagacaggggcgaacgtggccctccgggacctggtgagggagggattgcgcctggagagcctggcctccccggcctgcccggatcaccagggccccaagggcccgtagggccgccaggtaaaaaaggagaaaagggtgacagcgaagacggtgccccaggacttccagggcagccaggctcccccggcgagcagggtccaaggggacccccaggagccatagggccaaaaggcgatcgcggtttccccggcccgctgggggaagcgggcgagaagggagagcgcggcccaccggggcctgcaggttctcggggtctgccaggagtcgcaggccggcccggagctaagggccctgaaggccctccaggacccactggaaggcagggggaaaagggagagcctggccgacctggggacccagccgtggtaggtcccgcagtcgctggaccaaagggggaaaagggggacgtgggaccagctggaccacgcggggcaacaggtgtgcagggtgaacgaggtcccccgggactggtgctcccgggcgatcctggaccaaagggggaccccggggatagaggtcctattggcctaaccggaagggccggtccccccggtgactccgggccgcctggggagaagggggatcctggccgccccggcccgccgggacccgttggaccccgggggcgggacggagaggttggagagaagggcgacgagggacctcccggtgatcccggtctccccggtaaagccggcgagcggggactccgcggcgcccccggggtccgagggcctgtgggagaaaagggggaccaaggtgatcccggcgaagacggacgaaatggaagcccgggatcaagtggccctaagggggacaggggagaacctggcccccccggccctccaggccgcctcgttgacacaggtcccggggctagagaaaaaggagaaccaggggaccgggggcaagagggaccgagagggcccaaaggggaccctggacttccgggtgcacctggtgaacgaggcatcgaagggtttagaggccctcctgggccccagggagatccaggcgttaggggcccagccggtgagaagggtgatcggggccctcctggccttgacggtcggtctggacttgacggcaagcctggagctgcaggcccctcagggcccaacggcgccgctggcaaggctggtgacccaggtcgcgacggattacccggacttcgcggagagcaggggctgccagggccatcaggtccacccggattgccaggaaagcctggagaggatggtaagcccgggctaaatgggaagaacggggagccaggggaccccggagaggatggcagaaaaggagaaaagggagacagcggggcttctggaagggaaggccgagatgggcctaagggcgaaagaggggcgccggggattttaggccctcagggacctcctggccttccggggcccgtgggaccacctggccagggtttccctggagtgcctggaggtaccgggcctaagggggataggggggagactggcagtaagggggaacaggggttgcctggtgagcgcggcctgcggggagaaccaggctcagttccaaacgtggacagactgctcgaaactgctggtattaaagcttctgctctgcgggaaatcgtagaaacctgggacgaaagtagcggctccttcctccctgtgcccgagcggcgccgaggcccaaaaggtgattccggagagcagggccccccaggaaaggaaggaccaattggatttccgggagagcgtggcctcaagggcgatcggggtgatcctgggccacaaggaccaccagggctggccctgggggagcgcggcccccccgggccctcaggactcgccggagaacctggtaagcctggtattcccggtctcccagggcgtgccggcggtgtcggagaggcgggccgccccggagagcgcggagagaggggagagaaaggggagcgtggagagcaaggccgcgatggaccccctggcctccctggtactccgggcccccctggacctccaggacccaaggtctcagtcgacgaacctggccccggcttgagtggcgagcaaggccccccaggtctgaaaggcgctaaaggcgagcccggatcaaacggcgaccaaggacccaaaggcgaccgaggcgtgcccgggatcaaaggcgaccgcggggagcccgggccccgcggccaggacggaaacccaggccttcctggcgagagaggaatggccggtccagaggggaaaccaggacttcaaggtccccgaggtccaccaggacccgtgggaggacacggggatcccggtcctcctggcgccccagggctggcaggccccgccggcccacagggcccatcggggctcaagggtgagccaggtgagacaggacctcccggcagaggtctgacgggtcccacgggagccgtgggtctacccgggccacccggccccagcggcctggttggaccgcagggctctcctgggctgccaggacaggtgggcgagaccggaaagcctggcgctccagggcgtgacggcgcttctgggaaggatggtgaccgcggcagccccggcgtgccggggtcccccgggctgccaggccctgtcggaccaaagggagagccagggcccactggcgcccctgggcaagcagtggtgggtctacccggagctaagggggagaaaggcgctcctggagggcttgcgggtgaccttgtgggagagcccggagccaagggtgaccgcggtttacctgggcccagaggagagaagggcgaggctggacgagcgggagaaccgggtgatccaggcgaggacggccagaaaggagcgccgggccctaaaggattcaagggagaccctggagtgggagttccaggttctccaggaccccccggcccccccggtgtcaaaggcgatcttgggctccctggcttgccaggcgccccaggagttgtgggctttcccggccagactggaccacgcggagagatgggtcaacccgggccctctggagagcgagggttggccggaccgcctggaagggagggcatccccggaccactgggaccacctggacctccgggaagtgtaggtccgcccggtgcatccggcctgaagggggacaaaggggaccccggggtggggctgcctggcccacgaggtgagcgaggcgagcccggaatccggggagaggacgggcgaccaggccaagaagggcctcgagggctgactggcccgcctgggtctcggggcgagagaggcgagaagggcgacgtgggttccgctggcctcaagggggacaaaggcgactcagcagtcatccttggccccccaggaccacggggagcaaaaggtgatatgggggagagaggccctcgagggctggatggcgataagggccctaggggggataatggtgaccccggcgataagggctctaaaggagaacctggggacaagggctcagctggtctgccggggctgcggggcctgctcggcccccagggacagcctggggccgccgggattccaggggatcctgggagcccaggaaaggatggcgtgccaggcatccgcggtgaaaagggagatgtgggctttatggggcccagagggttaaagggtgagaggggcgtcaagggtgcttgcggcctggatggagaaaaaggagacaaaggagaggcaggtccaccaggacgtcccggactcgctggccacaagggtgagatgggcgaaccaggtgttcccggtcagtctggcgccccgggaaaggaaggcttgatcggaccaaaaggcgatagaggctttgacggccaacccggaccaaaaggggaccaaggggagaaaggggagagggggactccagggattggggggtttccagggcccagtgggaacgacggttccgcaggccctcccggaccacccggtagtgtgggccctcgaggccccgagggattgcagggccagaagggtgagagaggtccgcctggcgaacgggttgtgggagctcccggggtgccgggcgcccctggagaacgtggcgagcagggacgcccggggccagccgggcctaggggggagaaaggggaggccgccctcacagaagatgacattcgggggttcgtgcgtcaagaaatgagtcaacactgtgcttgccagggtcagtttatagcctcaggctcccggccactgcctagctatgccgctgataccgccggctctcagttgcacgcagtgccagtcctccgcgtcagccacgccgaagaggaggaaagggttccccctgaagacgatgagtattctgagtacagtgagtatagcgtggaagaatatcaggaccccgaagcaccttgggatagtgatgacccctgttctctgcccctggacgaaggatcatgtacagcttacactcttcgctggtaccatcgggcggtcactggctcaactgaagcttgtcaccccttcgtttacggtgggtgcggcggtaacgctaacagatttggaaccagagaagcatgtgaacgcaggtgtcctccccgcgtcgtgcaatcccagggaaccggcaccgctcaggac

SEQ ID NO: 9578 - DNA, 8832 bp, synthetic construct
  misc_feature 1..8832: note = source = /note="Description of Artificial Sequence: Synthetic coding sequence"
  source 1..8832: mol_type = other DNA
atgacgctgaggctgctggtggcggccctgtgcgcgggcatcctggccgaagcaccacgcgtacgcgctcaacatagggaacgcgtgacctgcaccagactctacgcggcagacattgtctttctgctggatggctcgagttcgattggaagaagcaacttcagagaggtccgctctttcctggaggggctcgtcctgccattctcaggagctgcctcggcgcagggtgtccggttcgccacggtgcagtactcagacgatccgcgaaccgaattcggcctggacgctctgggatcggggggagacgtgattagagccatcagggaactctcctacaaggggggaaacactagaaccggagccgccatcctgcatgtcgccgatcacgtgttcctgccgcagctggctagacctggtgtgcccaaggtgtgcattctgatcactgacgggaagtcccaggatctggtggatactgccgcccaacgcctcaagggacagggagtgaagctcttcgcggtgggaatcaaaaatgcggatccggaagagctgaaaagggtggcttcgcaaccgacttcggatttctttttctttgtgaatgacttctccatcctgagaaccctgctgcctttggtgtcaagacgggtgtgcaccactgcgggaggagtcccggtcactcgaccgccggacgacagcacgtccgctcctcgcgatctggtgctgtccgagccttcatcccagtcgctccgtgtgcagtggactgccgcctcgggtccggtgaccggatataaggtacaatacactcccctgaccggactcggacagcccctcccgtccgaacggcaggaggtgaacgtcccagccggagaaacgtccgtgcgcctgaggggactcaggccgctgacggaataccaagtgaccgtgatagcactctacgccaactcaatcggagaagcggtgtccggaaccgcgagaactaccgccttggagggcccggagttgacgattcagaacactaccgcacactccctcttggtggcatggcgctcggtgcccggcgctactgggtaccgcgtcacctggcgtgtgctgtcaggaggccctacccaacaacaggaactggggccggggcagggcagcgtgctcctccgcgatctcgagcctgggaccgactacgaagtgaccgtctcgacgctgttcgggaggtcggtcggccccgccacctctctgatggcgcgcaccgacgcatccgtggaacagactcttagacctgtgatccttggaccgaccagcatcctcttgtcgtggaacctcgtgccggaagcgcgcgggtaccggctggaatggagaagggagactggtcttgaaccgccacaaaaggtcgtgcttccgagcgatgtgacgcggtaccaactggatgggctccaaccaggcacggagtacagactgaccctgtacactcttcttgagggacacgaagtggcaaccccggccactgtcgtccctacgggacctgagctcccagtctccccggttactgacctgcaggccactgaactgccgggacaacgagtgagggtgtcgtggtcaccggtgccgggtgccactcaataccggatcatcgtccgctcgacccagggcgtggaacgcactctcgtgctcccgggctcccagactgccttcgacctggacgacgtgcaggcaggtctgtcctacaccgtgcgcgtttcagccagagtcggcccgagagaagggtccgcatcagtgctgaccgtgaggcgggagccagaaaccccactcgcggtccctgggctccgcgtggtggtgtccgatgccactcgggtgagggtggcatgggggccagtaccaggagcgtccgggttcaggatctcatggtcgactggatccggaccggagtcatcccagactcttcctccggattcgaccgcaacggacattactgggctccaacctgggaccacctaccaggtcgctgtgtcggtgctcagagggcgggaggaaggaccagccgctgttattgtcgcccggacggatcccttgggaccagtgcgcaccgtgcacgtgactcaggcctcatcctcaagcgtgactatcacctggactcgcgtcccgggagcaaccggataccgggtcagctggcactccgcgcatggaccggagaaatcgcagctcgtctcgggagaggcaactgtggccgaactggacggattggagcctgacaccgaatacaccgtccatgtgcgagcccatgtggcgggcgtggatgggccgccggcgagcgtcgttgtgcgcaccgctccggaacctgtcggaagagtgagcagactgcagatcctgaacgcttcgagcgatgtgctcaggatcacttgggtgggagtcaccggggccaccgcctaccggcttgcctggggacgcagcgagggcggcccgatgcgacaccagattctgccgggaaacactgactcagccgaaatacggggcttggaggggggcgtgagttactcagtgagagtcaccgccctggtgggagatcgcgaaggtacccccgtttctatcgtggtgaccaccccgcccgaggcgcctccggcactcggaactttgcacgtggtgcaacgcggtgagcactcgcttaggctccgctgggaaccggtgccgagggcgcaaggcttcctcctgcactggcagccagaaggaggccaggagcagtcacgcgtgctcggtccggagctgtcctcctaccaccttgatggccttgaacccgccacccagtaccgggtcaggctctcagtgcttggacctgcgggcgaaggaccctcagcagaggtgaccgcacggaccgagagcccacgcgttccatcaatcgaattgcgggtcgtcgacacttcgatcgactcggtgacgctcgcatggaccccagtgagccgcgcgtccagctatatcctgtcctggcggcctttgcgcggcccaggccaggaagtcccgggaagcccccagaccctccctggcatctcttcctcgcagagggtcaccggcctggaaccgggagtgtcttacatcttctctttgacccctgtgctggatggtgtcagaggtcctgaggctagcgtgactcaaactccagtgtgcccaaggggcctggccgatgtggtgttccttccccatgccactcaagacaatgcacaccgggcggaagcgacccggcgggtgctggagcgcctggtgctggcactcgggcctctgggaccacaggcggtgcaggtgggtctgttgtcgtactcccacagaccaagcccgttgttccctctgaacggttcgcacgaccttggtatcatcctgcagagaatccgcgacatgccatacatggacccgtcggggaataatctgggaaccgccgtggtgactgcgcatcgctacatgcttgccccagatgcaccagggcgcagacaacacgtacccggcgtgatggtgctcctcgtggatgaaccgctgagaggggacatcttttcacccattcgggaggcgcaagcctccggcctcaatgttgttatgctgggtatggccggtgctgaccccgaacagctccggcggctggccccgggcatggacagcgtccagacgttcttcgcggtcgacgatggaccgagccttgatcaagcggtgtctggactggctactgcactttgccaggcttccttcaccactcaacctaggcctgaaccttgcccagtgtactgcccaaagggacagaagggagaaccgggtgagatgggcctgagaggtcaggtgggtccgccaggcgatccgggactgccaggccggaccggcgccccaggaccccagggccctccggggtctgctactgcaaagggagagcggggatttcccggcgcagacggtcggccggggagtcctggccgggcgggaaacccaggaacccccggagcgcccgggctcaagggttcgccgggactcccgggaccacggggtgaccccggggaacggggtccacggggaccgaaaggcgagcccggggccccagggcaggtcatcggcggtgagggaccagggctccctggcagaaagggggaccccggaccatcgggcccaccaggaccgcggggaccgctgggagatccgggaccaagagggccacccggattgccaggaactgcgatgaaaggagataagggggatcgcggagagcggggacctccggggccaggagaaggcggtatcgccccaggagaacccggactcccgggcttgccggggtccccagggccgcaagggccagtgggacccccaggtaagaaaggcgaaaagggtgacagtgaagatggagccccggggctcccgggacagcctgggtcgccgggagaacaaggaccccgcggaccgccgggcgccatcggccctaagggagatcgcggcttcccgggaccgctgggcgaagccggagaaaagggagaaagagggccgcccggacctgcgggttcccgcggactgccaggggtggccggcaggccaggagccaaagggccggagggaccaccagggccgaccggccggcagggagagaagggagagccgggacgcccaggtgaccccgcggtcgtgggccctgctgtcgcaggacctaagggagaaaagggcgatgtgggcccggctggaccacgcggagccactggagttcagggggaacgcggtccgcctggactggtcctgcccggagatccgggaccgaagggagatccaggcgatagaggcccgattggactcactggccgcgcgggcccgccgggagattcaggaccaccgggagaaaagggagatcctggtcggccggggccgccaggtccggtgggtccgcggggcagggacggagaagttggggaaaagggtgacgaaggtccgccgggagatcccggactccccggaaaggctggagagagaggactgagaggtgccccgggcgttaggggtcctgtgggagagaaaggagatcagggcgaccctggagaagatggccggaacggctcgccgggctccagcggcccgaagggtgaccgaggtgagcctggaccgccgggtccgccggggcgcctcgtggacactggaccgggggcccgcgaaaaaggcgaaccgggcgaccgcggccaggaggggccgcgcggacctaaaggagatcctggactgccgggtgcgccgggagaacgtggaatcgagggatttcggggacctcctggaccccagggagatcctggagtgcgaggaccggcaggcgaaaaaggggatcgggggccgccaggactggacggacggtccgggctggacggcaaacctggggccgctggaccatccggcccaaacggcgctgcaggaaaagctggagatccgggacgggatggactcccggggctgagaggagagcaaggccttccgggaccgtccggacctcccggactgccgggaaaaccgggagaggacggcaaacctggactgaacggaaagaacggagagccaggggatcctggcgaggacggacgcaagggcgaaaagggagactccggcgcctccggacgcgagggccgagatggcccgaagggcgagcggggcgctccaggaattctggggccccaaggcccgcctggactgcccggtccagttgggccgccaggacaagggtttccgggagtccctggaggcactggtccaaagggtgatcgcggagagactggatcgaagggagagcagggactgccgggagaacgagggctgagaggtgaaccgggatcggtgccaaacgttgaccggctgctggagactgccggaatcaaggcatcagcgctccgagaaatcgtcgaaacctgggacgaatcgtcgggctcgtttctccctgtaccggagcggaggcgggggccgaagggggactcgggcgagcagggaccgccaggaaaagaaggaccaatcggattcccgggtgaaagaggacttaaaggcgatcggggagatcccggcccccagggccccccggggctggccctcggcgaacgcggaccccccggtccgtccggactggccggagagcctggcaagccgggcatccccgggctcccgggtagagccggaggtgtgggagaagcgggacgtcctggggaacggggagagcgcggggagaagggcgaaaggggtgagcagggacgggacggaccaccgggactgccgggaacccccggcccgccggggccaccaggccctaaggtgtccgtggatgaaccgggaccgggactctcaggagagcagggaccaccaggactgaagggggcaaagggagaaccaggatccaatggcgatcaaggtccaaagggagatcggggagtccctggcatcaagggggaccggggtgaaccgggaccgagaggccaagatggaaatcctggactgccgggagagcggggcatggctggccccgaaggtaaacctggacttcaggggccaagagggccaccaggcccggtgggaggacacggagatcctggcccaccaggcgcgccaggcctcgccggcccagcaggaccacagggaccttctggcctgaaaggggagccgggagaaacgggaccgcctgggcggggattgaccggcccgacgggtgcggtgggactgccaggacctccaggaccgtcaggactggtgggcccacagggaagcccgggacttccagggcaggtcggagaaaccggaaaaccgggtgcgccgggtcgcgacggtgcctcgggcaaagacggggaccgtggatcgccaggagtccccggatcgccagggctgccgggtcccgtgggaccgaagggtgaacccggacccactggcgctccgggccaggctgtggtcggattgccgggagcaaagggagagaagggcgctccgggtggattggcaggggatcttgtgggagagcctggcgccaagggtgacaggggtttgcccggccctcggggagaaaagggcgaggccggtagagcgggcgaaccgggagatccgggagaagatggccaaaagggcgctccgggtccgaagggctttaagggggacccaggtgtcggggtaccaggttcaccaggaccgccgggcccgccaggggtcaagggggatttgggcctgccgggcctgccaggagcccccggtgtggtcggatttccaggtcaaactggaccccgcggagaaatgggacaaccaggtccaagcggggagagaggtttggcggggcccccagggcgcgagggcatcccggggcctctgggaccgccaggcccccctggcagcgtggggccaccaggagcctccggactgaagggtgataaaggcgatcctggagtcggactgccgggccctcggggcgagcggggcgaacccggtatccggggggaagatggtagacctggacaagaaggaccgcgggggcttaccggacccccaggatccagaggggaacgcggggagaagggagacgtggggtcggcagggctgaagggcgacaagggagacagcgccgttatcctgggcccgccaggtccacgcggagccaagggagatatgggcgaacgcggcccacggggactcgacggagacaagggccctcgcggagataacggggaccccggtgacaagggatctaagggtgaaccgggagacaagggctccgctggcttgccggggttgcgcgggctgctggggccacaagggcagcccggcgccgcagggatccccggagatccgggctcgccgggaaaagatggcgtgccagggatcagaggagagaaaggagacgtcggatttatgggcccccgcggactgaagggagaacggggtgtgaaaggagcttgcggcctggacggagagaagggcgataaaggagaggcaggcccccctggccgcccgggcctggcaggacacaagggagagatgggagagccgggggtcccgggacagtccggcgcaccagggaaagaaggactcatcgggccaaagggtgaccgaggcttcgatggtcagcccggaccaaaaggggatcagggcgagaagggagaacgcgggacccccggaattggaggattcccagggccaagcgggaatgacggctccgcgggaccgccgggaccccccggatcagtcggaccgcggggaccggagggcctccaaggacagaaaggcgaaagagggcccccgggagaacgcgtcgtgggagccccgggagtgcctggagctcctggagaaagaggagaacagggccggccaggcccggctgggcctcggggagagaaaggcgaggcagcccttaccgaagatgacatccggggatttgtgcggcaggaaatgtcccagcactgcgcttgccaaggccagtttatcgcgtctggatcgcggccgctcccatcgtatgccgctgatacggcgggttcccagcttcacgcagtcccagtgttgcgtgtgtcccatgccgaagaggaagagcgcgtgccccctgaagatgatgagtactcggaatacagcgaatacagcgtcgaggagtaccaagatccagaggcgccctgggactcggacgacccttgcagcttgccgctggatgagggatcatgtactgcttacactctccggtggtatcaccgggccgtgactggctcaactgaggcctgtcatccgttcgtgtacggcggctgtggtggaaacgctaatcggttcgggacgagggaggcctgtgaaagaagatgtccaccaagggtcgtgcaatcgcaaggcaccggaaccgcccaagat

SEQ ID NO: 9579 - DNA, 8832 bp, synthetic construct
  misc_feature 1..8832: note = source = /note="Description of Artificial Sequence: Synthetic coding sequence"
  source 1..8832: mol_type = other DNA
atgactctcaggcttttagtcgctgcattatgtgctggcatactggccgaggcccccagagtgcgggcgcaacaccgagaacgggtaacttgcactagactgtacgctgctgacatcgtgttcctgctggatggttcgtcctctatcggaagaagcaatttccgagaggtaaggagtttcctcgagggtctggtgctgcctttttccggcgccgccagtgcacaaggcgtgcggttcgccacggtccagtattccgacgatccccgcacagaatttggattagacgctcttggttccggaggtgacgttatcagggccattcgcgaacttagttacaaaggtggtaatacaaggacaggagccgccattctccacgtggcggaccatgtatttctgccccagttggcccgtcccggggttccaaaggtgtgcatcctgataaccgatggaaagtctcaggacctggtggatacagctgctcagagattgaaaggccagggagtgaagctgttcgctgttgggatcaagaatgctgaccctgaggagttgaagcgagtggcttcccagcctaccagtgatttctttttcttcgtgaatgacttttccatccttaggaccctgttgccacttgtgtcacgcagggtgtgcactaccgccggtggggtgcccgtcacccggccccccgatgatagcacctctgccccccgcgacctcgtcttgagcgagccctcatcccagagcctccgggtacagtggaccgccgcttctggtcccgtgacaggatataaggtgcagtatacgccattgaccggtttagggcagccattgccaagcgagagacaggaggtcaacgtgccggctggggaaacctcagtccgcctgcgcggcttacggccgctcactgagtatcaggtgacagtgatcgcgttgtacgctaacagcataggcgaggccgtgagcggcaccgctcgaaccaccgccttggagggcccagagctaactatacagaatactactgctcactcactcctggtggcctggaggtccgttcctggggcaactggctatcgcgtcacctggcgggtactgtcggggggcccaacccaacagcaggagctggggcccgggcagggaagcgttctgctgcgcgatctggaacccggtacggactacgaggtaacagtgtcaaccctgtttgggcgcagtgtgggacctgcaacctctttgatggcgcgcacggacgcgtccgtagagcaaacactgcgccccgtcattttaggaccgacctcaattctcttaagctggaacctggtgccagaggctagagggtaccggctggaatggagaagggaaacaggcctcgaacccccccagaaagtggttctgccatccgacgtgactcgataccagttagacgggctgcagcccgggaccgagtatagacttacactctatacactgcttgagggacacgaagtggcaactccggcaaccgtggtgcccacggggcctgaattacctgtgagcccagtcaccgatctacaggcaaccgagctgccagggcagagagtgcgggtcagctggtcccctgtccccggcgccacccagtaccgcatcattgtccgctccacgcagggggtagagcggacgctcgtgctcccgggctcccagacagcctttgacctagacgacgtccaagcgggcttgagctacacggtgagggtgtccgcgcgcgttggaccaagggaagggtctgccagcgtcttgaccgtgagacgcgagcccgaaaccccactggccgtacctggtttgcgtgtggtggtttctgacgcaactcgcgtccgtgtcgcttggggcccagtcccaggcgctagcggattccggatttcgtggtccactggatctggccccgaaagttctcagaccctaccacccgattctacagcgactgacatcactggccttcagcccgggacaacttaccaagtggccgtgtctgtgcttcgcggtagggaagagggtccggcggctgtcatcgtggcaagaaccgacccactgggtcctgtgcggaccgtccacgtaactcaagcgtcctcctcatctgtgacaataacttggactagagtgccgggagcaaccggctacagagtgtcttggcacagcgcacacggtcctgaaaaaagccagctcgtctctggagaggccaccgtggccgaactggacggcctggaacctgacactgagtacaccgttcacgtccgcgcccatgtcgccggcgtagacgggcccccagcgtctgttgtggtacgtaccgctcctgagcccgttggccgcgtgagcaggctacagatcctaaatgcgtcatctgatgtcctgcgcataacctgggtcggcgtaactggggcaacagcttacagactggcttggggccgatcagagggcggtccaatgagacaccagatcttgccagggaatacggactccgccgaaattaggggactggaaggaggagtgagctactcggttagggtcaccgctctggtaggcgacagagaaggaactcctgtttcaatcgtggttaccacccctccagaagctccaccggcgctggggacactccacgtggtccaacggggagagcactctctcagattgaggtgggaaccggtcccacgtgcccagggatttctcctccattggcagccagagggtggtcaggagcagagtcgcgttctcgggcctgagctgagttcataccatctcgacggactggagccagcaactcagtacagagtgcgactctcagtattgggcccggccggtgaaggcccatccgctgaagtcaccgccagaaccgagagtccacgtgtaccctccatcgaactacgcgtggttgacacctcgatcgattccgtaactcttgcatggaccccagtatccagagccagttcctatattctttcctggagaccgttgagggggcccgggcaggaagtgccagggtcaccgcagacccttcccggaataagctcttcacaacgggtcactggtctcgaaccaggagtgagttatatcttcagtcttacccctgttctggatggagtgcggggaccagaggcttcagtgacccagacccccgtgtgtcctagaggtctggccgatgtggtctttctaccccacgcaactcaggataatgcccatcgggcagaagcgacccggcgggtgctggaaagattagttctcgcactgggacccctggggccccaggcggttcaggtgggcttactgtcctactctcaccgacccagcccgttgttccccctcaatggctctcatgatcttgggataattctgcagcgcattcgggacatgccatacatggatccaagtggaaataaccttgggacagcagtggtgacggcccatcgttacatgctagcccccgatgccccggggcgaaggcagcacgttccgggtgtaatggtccttttggtggacgagcccctccggggcgacattttctctcctatccgagaagcacaagcgagtggtttgaacgtggtgatgcttggaatggctggggcagatcccgagcagctgcgcaggctggcccccggcatggattctgtgcaaaccttctttgccgttgatgatggtcctagcctggaccaagcagtaagtgggctggcgacagcgctatgccaggcgtctttcacgacacagccaagacccgagccgtgcccagtctactgccccaaagggcagaagggcgagcccggcgagatgggccttagaggccaagtcggcccgccgggtgatcccggcctgcccggcaggacaggcgcacccgggccgcagggaccgcccgggtcggccacagccaagggcgagcgaggatttccaggagcggacggaagaccaggcagccccggacgagccggtaaccctggcactccgggcgcacccggactaaaggggagccctggtctgcccggtcctcggggcgatccgggcgagcggggccctcggggccctaagggcgaacccggggcccccggacaggttattgggggcgaggggcccggacttcctggccgcaagggggaccctgggccaagcggccccccaggcccacgaggtcctttgggcgacccgggccccagaggccccccaggcctgcccggaacagccatgaaaggtgacaagggcgacaggggcgaacgagggcccccaggccccggcgagggcggcatagcccctggggaacctggcctgcctggcctaccgggtagtccaggtcctcagggtccggtgggcccacccggaaagaagggcgaaaagggtgatagcgaagacggcgctcccgggcttcctggtcagcccggaagcccaggagagcagggccccaggggccccccgggggccattggtccaaagggagaccgcggatttcctggccccctgggggaggccggcgagaaaggagagcgagggccgccaggaccagccggtagcagagggttaccaggagttgcaggccggcctggcgctaagggacccgaggggcctcccgggccaaccggaagacagggagaaaagggtgaaccaggccggccaggcgaccccgccgtcgtgggccccgccgtggccggtcccaaaggtgaaaagggagacgtcggacccgccggccccaggggcgccacgggtgtccagggtgaacggggccctcctggcctcgtgctgccgggcgaccccggccccaagggagaccctggggacaggggccctattggcttaacaggtcgggctggcccccctggggactctggaccgcctggcgagaaaggcgaccccggccggcccgggccccctggcccggtgggtccgcgtgggcgtgacggcgaggttggggaaaagggcgatgagggaccccccggcgatcctggtctgccaggaaaagccggggagcgaggactgagaggagcccctggcgtccgcgggcccgtcggcgaaaagggcgatcagggtgacccgggggaagacggtcgtaacgggtcgccgggtagctccgggccaaagggggataggggcgagccgggtcctccagggcctcccgggaggcttgtggacactgggccgggtgccagagagaagggagaaccaggcgatagggggcaagagggtccccggggtccgaaaggggatccgggcctgccgggcgctcccggtgagcgtggaattgagggcttccgcggtcctccagggcctcagggagaccccggcgtgcgcggccctgctggggagaagggcgaccgaggccctccggggcttgatggcagatctgggttggatgggaaaccaggagccgctggtcctagcggcccaaatggagccgccggcaaggccggagacccaggaagagatggactcccgggacttaggggagagcagggcttgcccggtccatccggccctccaggcttacccggcaaacctggggaggacggaaagcctggtttaaatggaaagaacggcgaaccgggcgatcctggcgaagacggtcggaagggcgaaaaaggggattctggcgcgagtggtcgcgaaggacgcgatgggccaaagggagagcggggggctcccggaattcttggaccccaaggtccacctggcctgcctggcccagtggggccccctgggcagggttttccaggagtacccggcggaactggcccaaaaggggaccggggcgaaactggaagtaaaggggagcagggattgccgggggagcggggtctcagaggtgagcccgggtctgtgcctaatgttgatagattgctcgaaactgcgggtatcaaggccagcgctctgcgagaaatcgtcgaaacttgggacgagtcgtcagggtccttcttacctgttccggagcgacgtcgcggccccaagggggacagtggtgagcaaggcccccctggaaaagagggacctatcggctttcctggtgaaagaggattgaaaggcgaccgcggtgaccctggcccccagggccctccaggcctggcgctgggggagcggggacctcctgggccttcggggcttgccggagagcctggtaagcctggcatcccaggccttcccggccgagccggaggtgtcggggaggctggccggccaggcgaaagaggcgagcgaggagaaaagggtgagaggggagaacaaggtagagacggaccaccgggcctgcctggcactcctgggccacccgggccacccggacctaaagtcagtgtggacgagcccggaccaggactgagtggtgagcagggcccgcccggtctgaagggggccaagggcgagccaggaagcaacggtgaccaaggcccgaagggggatcggggggtccctgggatcaaaggcgatcgcggggagcccggaccgcggggacaggacggtaaccccgggctgccgggggagcggggcatggctggacctgagggcaaaccagggctccagggaccccgcggtccccccggcccagtggggggtcatggcgacccgggccctcccggagcaccaggcttggccggtcccgccggaccccagggtccctctggcctcaagggtgaaccaggggagacgggcccaccaggcagaggtttgaccggtcccaccggtgcagttggattgcctgggcccccaggccccagcggcctggtaggaccccaaggcagcccgggattaccaggacaggttggcgagacgggcaagccgggtgcccctggtagggatggcgcttcaggaaaagatggtgacaggggcagcccaggcgttccaggatcgcccgggctcccaggccctgtgggccccaagggtgagcccggccccactggagcgccaggccaggctgtggtgggtttaccgggggccaaaggtgagaagggcgcccccgggggtctggcgggcgaccttgtgggtgagccaggtgccaagggcgacaggggacttccaggcccccgcggcgagaaaggtgaggctggcagggccggggagcctggggatcccggcgaagatggtcagaagggcgcaccgggtccaaagggcttcaagggcgacccaggtgtcggggtgcctggatcccccggtccccctggacccccgggtgttaagggcgatttgggtctcccaggcctgcctggggccccaggggtggtcggtttcccgggccagacaggcccacggggcgaaatgggccagcccggcccgtctggggagagaggactcgcaggaccgccaggtcgggagggaattccaggacctctggggccccccggtcctcccggtagtgtcggaccgcccggagccagcggactgaagggcgacaagggtgaccccggggtgggtctccccgggccgcgcggagagcggggcgaacccggcattaggggggaggacgggagaccagggcaggaaggtcctcgaggactgaccgggcctccaggcagccggggggagcgaggcgaaaaaggcgacgtgggttcagcggggctgaagggcgacaagggggattcagcagtgatactggggccacccggacccaggggcgccaagggcgacatgggcgagaggggtcctcgagggctagacggcgacaaagggcccaggggagacaacggcgatccaggcgacaaaggcagtaaaggggaacctggggacaagggatctgctggcctcccaggcttaagaggcctcctgggcccccaaggacaacccggtgcggcggggatccctggggaccctggctcccccggaaaggatggagtgccaggcattcgaggtgagaagggcgacgtggggttcatgggaccccgcggtctaaaaggtgagagaggagtaaagggggcctgcggactcgatggcgagaagggcgacaaaggcgaagccggaccgcccggacggccgggtcttgctggccacaaaggggaaatgggggaacctggcgtgcccggacagtccggagcccctggaaaggagggtctgattgggccaaaaggcgacagaggattcgatggacagcccggcccgaagggggatcaaggcgagaagggtgaacgcggaacgcccggtatcggcggatttcccgggcctagtggtaacgatggttctgccgggccccccggccctccaggttctgttggtccccgtggaccagaaggtttgcaaggccagaagggagaacgcggtccccccggagagcgagtggtaggcgctccaggagtccccggtgcacccggggagaggggtgaacaggggaggcccggtccagcaggacctaggggagagaaaggggaagctgccttgacagaggacgacatacgcggcttcgtcagacaagagatgagtcagcactgcgcctgtcaaggacaattcatcgcctcaggttctaggccactgccttcatacgccgccgatactgccggaagccaactgcacgcagtgcccgtcctgcgagtgagccatgcagaggaggaagagcgggtccctccggaggatgacgagtacagcgaatactccgaatactccgtggaagaataccaggatcccgaggccccttgggactctgatgacccctgctctctgccactggatgaggggagctgcacagcttacaccttacgttggtaccacagagccgtcactggctccactgaggcctgccaccccttcgtgtatgggggatgcggtggaaacgccaaccggttcggaacacgcgaggcatgcgagagacgctgccccccgagggtggtgcaaagccagggaacaggcacggcccaagat

SEQ ID NO: 9580 - DNA, 8832 bp, synthetic construct
  misc_feature 1..8832: note = source = /note="Description of Artificial Sequence: Synthetic coding sequence"
  source 1..8832: mol_type = other DNA
atgaccctcaggctgctggtcgctgcactctgcgcgggtatccttgctgaggcgcctcgcgtgcgggcacagcatagggaaagagtcacctgcacccgcctctacgctgctgacatcgtatttcttctggatggaagttccagtatcggccggagtaactttcgggaagtcaggtccttcttagaggggctggtgttaccatttagtggagccgcttccgctcagggtgtccgctttgccactgtccagtacagtgatgaccctcgcacagagttcggacttgacgccctagggagcggaggagatgtgataagagctattcgagagttatcatataaggggggaaacaccaggactggggccgctatacttcacgtcgcagatcacgtgttccttcctcaactcgcacgccccggagttcccaaggtatgtatcttgatcacagacggaaagagccaggaccttgtggatacggctgcacagagactcaaaggtcaaggagtcaaactgtttgcggtgggaattaaaaacgctgatccagaagagctcaaacgggtcgcttctcagccaacgagcgatttttttttctttgtgaacgacttctctattctgaggaccctgctccctctggtgagccgtagggtgtgtactactgctggtggagtgcctgtcacacgtccacctgatgatagcaccagtgcacctagggaccttgtgctgagcgaacctagctcccaatccctgcgggtccagtggacagcagcttccggaccagtgaccgggtacaaggtgcagtacacacctctgacgggattaggacaaccactgccctctgagcggcaggaggtgaatgttcccgccggcgaaaccagcgtgcgccttcggggcctgaggccactcaccgaatatcaggtaaccgtcatcgcgctttacgcaaacagcatcggagaggccgtgtctggaacggctagaaccaccgcactcgaagggcctgaactgactatccagaatactaccgcccatagcctcctcgtggcatggcggagtgtccccggtgccaccggctaccgagttacctggagagtgctgtccggaggcccaacgcagcagcaggaactcggacctggacagggcagcgtgctgctgagagacctggagcccggaactgattacgaagtgacagtaagcaccctctttggaagatctgtcggccctgcaacgtctctgatggccagaaccgatgcttctgtggagcagacactgagacccgttattctcggccccacgtcgatcttgctgagctggaacctggtgccggaagcacgcggctaccgcctcgagtggcgccgtgagacagggctggagccacctcagaaggtggtgttgccgtctgatgtgactagataccaactggacggccttcaacctggtaccgagtacagactgacactgtacacactgcttgagggtcatgaagtggccacccctgctaccgtggtgcccactggacctgaattgcctgtcagcccggtcaccgatctacaagcaactgagctccccgggcagagggttagagtgtcatggagcccagtgccgggcgctacccagtatcgcatcattgttagaagcactcagggagtggaaagaacgctagtgctgccaggatcccagactgcttttgatttagatgacgttcaagcgggactgagctacactgtgcgtgtctcagctagggtgggacctagggagggcagcgcatctgtgttgaccgtgagacgggaacccgagacacccttagctgttccagggttgcgtgtggtcgtgagcgatgccacaagagtgcgtgtggcatggggacctgtcccaggagcttctgggtttcgcatttcatggagtacaggtagtggtccagaaagcagccaaactctgccccccgattccacagctacagatatcacaggcctgcagcccggaaccacctaccaggtggcagtcagcgtgttaaggggaagagaagaaggcccagcagccgtgatcgtcgcaaggaccgatccactggggccagtgcgaaccgttcacgtcacacaagctagtagctcctccgtcaccatcacctggacccgtgtgccgggagctacaggctacagagtgagctggcacagcgctcacggccccgaaaagtctcagctcgtgagtggtgaagcaaccgttgctgagctggacggcttggaacctgatactgaatataccgtccacgtgagagcccacgttgccggcgtcgacgggccgcctgcatcggtcgtggtgagaactgctcctgagcccgtcgggcgggtatctcgactgcagatcctcaatgcaagctcagacgtgctcaggattacttgggtgggggtcacaggggccaccgcttatcgactcgcttggggcagaagcgagggtggccccatgcgccaccaaatcctgccaggcaacacagacagcgctgagattcggggtctagaaggcggggtgagctatagtgtgcgcgtgaccgctctcgtgggcgatcgcgagggaacaccggtctccattgtcgttactactcctcctgaagctcccccagctcttggcaccttgcacgtggtccagcggggagagcacagcctgcgtctgcgctgggaacccgtccctagggcccagggattcctcctgcattggcaacccgaaggcggccaggagcagtctcgcgtgttgggtccggaactgagcagctatcatctggatggactcgagcccgctactcagtatagagtgcggctttcagtcctggggccggctggcgagggtccatccgctgaggtgacagctcgcaccgagagccctcgcgtcccatcaatagaactcagagtcgtggataccagcatcgattctgttacactggcctggacacctgtgtcacgtgcgagcagctatatcctcagctggaggccactgagaggacccggacaggaagtcccaggctccccacagacactgccaggcatctcatcttcacagcgcgtcactggtcttgagccaggcgttagttacattttttccctgacccccgtcttggacggtgtcagaggtccagaggcgagcgtgacccagacaccggtgtgcccaaggggtctcgcagatgttgtgttcttgccccatgccacccaggataatgcccatagggcagaggcaacacgaagggtgcttgagagacttgtgcttgctttaggcccattgggaccacaagctgtccaggtgggattgctgtcttacagccatcgcccttcccccctttttcctctgaacggatcccatgaccttggaatcatcctgcagcgtatcagagatatgccatatatggacccaagtggaaataacctcggaaccgccgtggtcacagcccaccgctatatgttggccccagatgcaccaggccggcgccaacatgtgccaggggtgatggttctgctggttgatgagccgctgcgcggagatattttttctcctatccgggaagcacaggctagcggcctgaacgtcgtcatgctgggaatggctggagcagatccggaacagctgcgaaggttggcaccggggatggacagcgtgcagacatttttcgctgtggacgatgggccaagcctggatcaggccgtatcaggccttgccacagcactttgtcaggccagtttcacgacacagcctaggccagagccttgccccgtgtattgccctaaaggtcagaagggcgagccgggcgagatgggactgagaggtcaggtgggccctcccggcgacccaggcctgccaggtagaacaggagctccaggtccgcaaggtccacccggatctgcaacagccaaaggtgaaaggggattccctggcgctgatggcagaccaggatcccctggaagagccggcaacccaggcacccccggcgcccctggactgaaggggtcccctggacttcctggacctcgcggagatcccggcgagaggggccctaggggcccaaaaggcgaaccaggggcccccgggcaagtgatcggcggagaaggacctggattgcctggacgcaagggtgaccccggccccagcgggcctccagggccccgcggtcccctcggtgacccagggccgagaggccccccaggactgcctggcacagcaatgaaaggtgacaaaggggaccgcggggagagagggccccccggacctggagagggaggcatagctcctggcgagcccggcctgcccggactgcctggctccccaggacctcagggcccagtgggcccccctggaaagaaaggggaaaaaggggactctgaagatggcgcacctggactgcccggacagcctggatcccccggggagcaaggcccaagggggccgcctggcgcgataggacccaagggagataggggattccccggcccactcggcgaagctggcgaaaaaggcgagagggggcctcccgggccagccggcagcagaggcctgcccggagtagcaggcaggccgggcgctaagggccctgagggccctcccggtccaactggcagacagggagagaagggagagcctggtcgcccgggagatccagccgtagtaggtcctgcagtggcaggcccaaaaggtgaaaagggagatgtcggacccgccgggcctcgcggggcaactggtgtgcaaggcgagaggggccctcccgggctggttctgcctggagacccaggacctaaaggagaccctggcgacagaggaccaatcggactgaccgggagggccggtcctccaggagactcagggccacctggagaaaagggagatcctggaagaccaggcccaccaggcccagtggggccgagaggaagagatggcgaagttggtgagaaaggcgacgaaggtccgccaggtgatcctggattgcccggaaaagccggcgagcggggactcagaggcgcaccaggggtgcgaggccccgtcggtgagaaaggtgaccaaggagatcccggagaggatggccgcaacggatctcccggaagttccgggccaaagggagatagaggggaacctggcccaccaggcccacccgggagattggtggacacggggcccggagcccgcgaaaaaggcgagcctggagatagagggcaggagggcccgcgcggaccaaaaggtgaccccggcttgccaggagccccaggagaacgcggaatcgaaggatttagaggcccaccaggccctcaaggagaccccggcgttaggggacctgctggcgagaagggcgacagggggcctccaggactggacgggaggtccggccttgacggcaagcctggtgcagccggaccgagcggacccaacggagccgcaggcaaggctggcgacccaggacgagacggtctccccggattgagaggggaacagggattgcccggaccttccggaccccctggattacccggcaagccaggagaggatggaaaaccaggcctcaacggaaaaaatggcgagccgggggaccctggggaggatggcagaaaaggagagaaaggagatagcggagcgtccggccgggagggcagggacggcccaaagggggagagaggcgctccagggattcttggcccccagggccctcctggcctccccgggccagtgggtcccccaggacaagggtttccaggagtccctggaggtaccggacctaaaggagaccgaggggaaaccgggagcaagggggagcagggtctgcccggggaacggggactgcgaggtgaaccaggcagcgtgccaaacgtcgatcggctgctggaaactgcgggcatcaaagccagcgcgcttagggagatcgtcgagacctgggacgagtcatccggttcattcctacccgtgcccgagaggaggagaggtcccaagggagatagcggtgagcagggaccgcctggtaaagaaggaccgataggttttcctggtgaacgcggccttaaaggagataggggcgacccgggcccccagggccctcctggcttggcactcggggaacggggcccacctggcccgtccggcctggcaggcgagcctgggaagccaggaatacccgggctccctggtagagccgggggggtgggagaggcaggaaggcctggagagaggggagagcggggagagaaaggtgagcgtggagaacaggggcgggatggaccccctggtctgcctggtacccccggcccccctggtcctccaggcccaaaggtgagcgttgatgagccaggacctggtctttcaggagagcagggcccaccaggactaaaaggagcaaagggcgagcctggcagtaacggagatcaaggccccaaaggcgaccggggggttccaggcatcaaaggcgatcggggcgaaccaggcccacgcggtcaggatggaaacccagggttgcccggcgaaaggggcatggcaggcccagaaggaaaaccgggattgcagggaccaagaggccccccgggacctgtgggcggtcatggcgaccctgggcctcccggcgctcccggactggccggaccagccggaccacagggccctagcggtttaaagggcgaacccggcgaaaccggacctcctggcaggggcctcaccgggccaaccggggctgtaggtcttccaggcccccccggaccaagcgggcttgttggaccacaggggtccccgggcctgccggggcaggtgggcgagacaggtaagcctggagccccaggacgcgacggtgcctcgggaaaggatggggacagaggatctccaggcgtgcctggaagccctggtctgcccggcccggtcgggccaaaaggcgagcctgggcccacaggcgctcccggacaggccgttgtggggctgccaggagccaaaggagaaaaaggcgctccggggggtcttgccggcgatctggtcggagagcctggtgccaagggcgacagaggtctgcctggaccccgtggggaaaaaggggaggctgggagagctggcgaaccaggcgaccccggggaagacgggcagaaaggcgctcctggcccaaagggattcaagggggacccaggcgtcggagtccctggcagccctggccccccagggcctcccggcgtcaaaggggatctgggattacctggactgccaggagctcctggagttgttggcttccctggacagaccggcccaagaggcgaaatgggacaacctgggccttctggagaacgcggacttgccggaccgcccggtagggagggtatccccggccccctgggcccacccggacctcccggatccgtgggccccccgggagcttccggcctgaagggtgataaaggagacccgggcgtcggactgcctggccctcgcggcgagcgcggagagcctggcattcgtggggaggacggaaggcccgggcaggagggtcctcgcggcctgactggaccccctggatcaagaggtgagcgtggagagaaaggagatgtgggctctgccggcctgaagggggataaaggggatagcgcggttatactgggccccccaggaccaagaggcgctaaaggggacatgggtgaaaggggccctcggggcctggatggagacaagggccccaggggcgataacggagatcccggcgacaaaggcagtaagggggaacctggggacaaagggagtgctggtctcccaggacttcgtggactgcttggccctcagggtcagccaggagcagcgggcattcccggcgatcccggctcacctgggaaggatggggtccctggtattaggggtgagaaaggcgacgtcggtttcatgggcccacggggattaaaaggcgagcgcggggtcaagggcgcgtgcggtctggatggcgagaaaggcgacaaaggagaagccggtccacctggccggcccggtctggcggggcacaagggagaaatgggagagcctggtgtgccgggccaaagtggtgctcctggtaaggaagggttgattggtccaaaaggagataggggcttcgatggacagcccggacctaaaggagatcagggagaaaagggcgagcgaggaacacccggcatcggaggcttccccggccctagcggaaacgatgggtccgcaggcccacctggaccacccgggagcgtgggcccccgcggccctgagggccttcagggccagaagggggagaggggccctcccggagagcgtgtcgtcggagcgccgggcgtccccggcgcacctggggaaagaggtgaacaagggcgacccggccccgcaggcccacggggcgagaagggggaggctgcgttaactgaggatgatatccgcggctttgtgcgccaggagatgtcccaacactgtgcctgccagggccagttcatcgcctctggctcccggcccctgccgagctacgccgcagataccgcaggaagtcagctgcacgcagtccctgttctcagggtgagccacgctgaagaggaggaaagagtgccacccgaggacgacgaatacagcgaatatagcgaatactcggtcgaggagtaccaggacccggaggccccatgggactcagatgacccttgctctctgccactggacgagggctcttgcacagcttacaccctgaggtggtaccacagagccgttactgggtctactgaagcctgccatcctttcgtttacggcgggtgcggcggaaatgccaacagattcggaacacgggaagcatgcgaacggagatgcccaccaagggttgtgcagtcacaagggaccggaactgcacaggat

SEQ ID NO: 9581 - DNA, 8832 bp, synthetic construct
  misc_feature 1..8832: note = source = /note="Description of Artificial Sequence: Synthetic coding sequence"
  source 1..8832: mol_type = other DNA
atgaccttgcggcttctggtcgccgctctttgcgctgggatactcgcagaggcgccccgtgtcagagcccagcatagagaacgggtcacttgcacacggctctatgctgccgacattgtgttcctgctggacgggtcatcaagcatcggcagaagtaacttccgagaagttcgcagctttctcgaggggctggttttgccatttagtggggcagcttccgctcaaggtgtcaggttcgcaactgtccagtattccgatgatccccgaaccgagtttggcctggatgccctggggtcaggtggtgacgtcatccgagccatccgagagctgagctacaaaggtgggaacacacgtaccggagccgccattctgcatgtagccgaccatgtttttcttccccagctggcaagacccggcgtacctaaagtgtgtattctgatcactgatggcaagtcccaggatctggtggacactgccgcgcaacggctaaagggccaaggagtgaagctgtttgcggtggggatcaagaacgccgatccagaagaactcaagagggtggcgtcccagccaaccagtgatttcttcttctttgtgaatgactttagcattctgcgaacgttgctacccctggtgtcaagaagggtgtgtactactgccggtggtgtacctgtgacacggccacctgatgactctaccagtgctcctcgcgacttagtgctaagtgagccctcttcccagtccctcagggtccagtggacagctgcgtccggaccagtgacgggatacaaggtacagtacaccccgctgaccgggctaggccaacctctgccttcagagaggcaggaggtgaatgtccctgctggcgagacctcggtgaggctgcgtggacttcgccccctcacagagtatcaggttactgttatcgccttgtacgcaaattcaataggcgaagctgtgagcggcacagctcgcactacggcactggaggggccagagctgactatacagaatacaacagctcacagcctgctggtcgcgtggcggagcgtgccaggcgctacaggataccgcgttacatggagggtgctatctggtggtcccactcagcagcaggagctggggcccgggcagggctccgtgctcctccgtgacctggaacccggcaccgactacgaggtgacggtcagtacgctgtttggccggtccgtgggccctgccacatctctcatggctagaaccgatgcaagcgtggagcaaaccctgcgccctgtgatcctgggtcctacttccatactgttatcatggaacctagtcccagaggccagaggttataggctggagtggcgtagagagaccggcttggagcccccccagaaggtggtactcccctccgacgtgacacgctatcagctggatggcctgcagcccgggaccgaatacaggctgaccctctacacactgttggaaggacatgaggttgctacccctgccaccgttgtgcccacgggccccgagctgcccgtctcgcctgtgacagatctgcaagccactgaactgcccggccagcgggtccgtgtttcttggagcccagtacccggcgcaacacaatacagaatcatcgtgcgatctacgcagggcgtggaaagaacactcgtcctgcctggatctcagacagctttcgacctggacgatgtccaggcaggactcagctatacagtgagagtcagcgctagggtggggccccgcgagggaagcgcttctgtattgaccgtccgtagagagcccgagaccccactggcagtacctggcctccgggtggtggtctcagacgcaacgcgtgtgcgggtggcctgggggcctgtcccgggggctagcggctttaggatttcttggtcaacgggatccgggcctgaaagctctcaaaccctccctcctgactcgaccgcaacagacatcactgggctgcaaccaggtacaacttatcaggttgccgtgagtgtgctccgggggcgcgaggagggtcctgctgcggtcattgtggctagaaccgaccctctgggacctgtgcggacagtgcacgtgacgcaggctagtagctccagcgtgaccatcacctggacacgagtgccgggcgctactggctatcgcgtgtcctggcacagcgcccatggtccagagaagagtcagcttgtttctggcgaggcgacggttgcagaactggacgggttggagcctgataccgagtatacagttcatgtaagggcgcacgttgcaggcgttgatggcccaccggctagtgtcgtggtgcgcacagcacccgagcctgtcggcagagtgtccaggctacagatcctgaacgcctccagcgacgtcctacggatcacgtgggtgggagtgaccggagccacggcctaccgcttggcgtggggtcggtccgagggaggcccgatgcgccatcagatcctgcctgggaatacggactctgctgaaattaggggattggagggcggagtgtcctactctgtgcgggtgacagcgctcgtgggcgacagagaaggcaccccagtgagcatcgtcgttaccactccccccgaagcgccaccagctctgggcacactccacgttgtccaacgaggcgagcacagcctccgactgcgatgggaaccagttccacgggctcagggttttctgctgcactggcaacccgagggcggacaagagcagtccagggtattaggcccagagctgagctcttatcacctagacgggctagagcccgccacccagtatagggtccgattaagtgttctcgggcccgctggagagggcccaagtgccgaagtaacagctaggactgaaagcccgcgcgtgccctctatcgagctcagagtggtggacactagtatagactccgtcaccctggcctggacacccgtgagccgtgcaagctcatatatcttgagttggcgaccactgcgtggcccgggccaggaggtgcccggcagccctcagacactgcctggcatatccagttctcagcgggtgacgggcctggagcctggggtgagttatatctttagcttgactcccgtactcgatggggtcagagggcctgaagcctccgttacccagaccccagtgtgcccacgagggctcgcagatgttgttttcctgccccacgctacacaggacaatgcgcaccgtgctgaggcgacgcggcgggtcctggagagactcgtcctcgccctaggcccgctgggcccccaggccgtacaagtggggctgctgtcttactcccatcgcccatccccgttattcccactcaatggctcacacgatctgggcatcatcttgcagagaatccgagacatgccatatatggatccctcaggcaacaacctggggacagccgtggtgactgcccatcgctacatgctggcgcccgacgcgccaggcaggcgccagcacgtcccaggcgtgatggtcttattagtggacgagcccctgcggggtgatatcttctcacctattcgggaggcacaggcaagcggactcaatgtggtaatgctgggtatggccggggccgatccagaacaactgagaagactagcacccgggatggactccgtccaaacattcttcgcggtggacgacgggccttccttggatcaagccgtcagtggacttgcaaccgcactgtgtcaagcaagtttcacaacccagcctcgcccggaaccttgccccgtctattgccccaaaggtcagaaaggcgaacctggcgagatgggcttgcgggggcaagtgggccctccaggcgaccccgggcttccaggccggacaggagcacctgggccccagggtccccccgggtctgctaccgcgaagggggagaggggctttccgggagctgacggcaggcccggcagtccgggccgggcaggcaaccctggcacccccggcgcgccaggattgaaaggatcgcctggcttgcctggaccgcgcggggaccctggcgagcgggggcccagggggcctaagggcgaaccaggagctccaggccaggtgatcggcggagagggcccgggccttcccggtcgcaagggagacccggggccaagcggccccccgggtcctcgggggccactgggcgaccctggccctcgcggtccaccggggctccctggtacagccatgaaaggagataagggcgataggggcgaacgcggaccaccgggtcctggcgagggcgggatagccccgggtgaaccaggactgcccggccttccaggctcaccaggcccccagggccccgtggggcctccgggcaagaagggagaaaagggagactctgaagacggagcgcctgggcttcctggccagcccgggtctcctggagagcagggaccaagaggcccccctggagctatcggaccaaaaggggaccgcggctttccaggtcccttgggtgaggctggcgaaaaaggcgaacgggggccgccaggaccagctgggtctcggggcctgcccggtgtagccggtcggcccggggccaaaggccctgagggaccgcccggccctaccggtaggcagggcgagaagggtgaacccggccgccctggggatccggctgtggtaggtccagccgtcgcgggacccaaaggggaaaaaggagatgtgggaccagccggacccagaggcgcaacgggagtacagggcgagagaggccccccgggtctggtgctgcccggagaccctgggccgaaaggagatcccggtgatcgcgggcccattggcctaactggaagggccgggcccccgggcgattccggacctcccggcgaaaagggggacccgggcagacccggaccaccaggacctgtgggacccaggggcagggatggcgaggttggggaaaagggtgacgagggcccacctggcgatccaggccttccaggaaaggccggtgagcggggcctcagaggagcccccggtgtgaggggccccgtgggcgaaaaaggcgaccagggcgaccccggcgaagacggccgtaatggaagcccaggatcatctggccccaagggggacagaggagagcctggtccacccggccctcctggacggctcgtcgacaccggccccggcgcccgcgagaaaggcgagccaggggatcgcgggcaggaggggcccagagggccaaagggggaccctgggttgccaggcgcacccggtgagagaggaatagaagggtttcgtggaccgccaggacctcagggggatcctggagtacggggcccagccggagagaagggcgaccgggggccaccaggactagatggcagatctgggttagatggaaaacccggggctgccggcccctccggtcccaatggcgcggccggaaaagctggagatccgggcagagatggtctgcctggattgagaggggaacagggcttgcctggtccgtccggtcctcccgggttacccggcaaacccggtgaagatggcaaaccagggctcaacggtaagaatggggaacctggagaccctggcgaagatgggagaaagggggagaagggagacagcggtgcatcaggcagggaaggacgggacggccccaagggtgagcgaggcgcacctggcatcttaggcccccaagggccacccgggctccccgggcccgtgggcccgcccggtcagggcttccccggtgtgcccggggggaccggccctaagggtgaccgtggtgaaacgggctccaagggtgaacaaggattaccgggagagagaggattgaggggggaaccaggatccgtccctaatgtggacagactgttagaaacagcaggcataaaggcatcagctctgcgggaaattgtggagacctgggatgagagttcaggatcatttttgcctgtgcctgagagacgtcgcggaccgaaaggagattcaggggagcaggggccccctggaaaggagggcccgataggtttccctggcgaaaggggcctcaaaggggacagaggcgatcctgggcctcaaggacctccaggattagcgcttggtgagagggggccccctggaccctctggcttggccggagagccgggtaaaccaggcatcccagggcttcccggacgggccggtggggtgggcgaggcgggcagaccgggggagaggggtgaaagaggggagaaaggcgaaaggggtgaacagggccgggatggcccgccagggctccctggcactccaggaccccctgggccgcccggcccgaaggtctccgtagatgaaccaggccctggcctaagtggagaacaaggaccaccgggactaaagggagccaaaggggagcccggttccaatggggatcagggcccgaagggtgatcgcggtgtgccaggcattaaaggggaccgaggcgagcccgggccccgtgggcaagatggaaaccctggcttgccaggcgaaagaggaatggccgggcctgaggggaaacctggcttgcagggtcccagaggcccgccgggccccgtgggtggccatggcgacccaggccctccaggggcacctggcttggctggccccgctggtccgcaggggccatcaggtttgaaaggggagcccggcgaaaccggtcccccgggtcgggggctcacaggcccaaccggggctgtgggcctgccaggccccccaggccccagcgggttagtggggccgcagggcagccccggtcttcctggacaagtgggggagacaggcaagccgggagcacctgggagagatggcgccagtggaaaagacggggacagaggcagccctggcgtgccaggttctcccggactgcctggccccgtcggtcctaagggtgagcccggccccaccggtgctccagggcaagccgtcgtaggcttgccaggtgccaaaggcgagaagggagcaccaggtggactcgcaggagatctggtgggagagccgggggccaagggggatagggggctacccggaccgaggggggaaaaaggcgaggctgggagggccggagaaccaggggaccctggagaagatggccagaaaggtgcccctggaccgaaagggtttaagggagatcctggcgtaggagtgccggggtcaccggggccccccggcccccccggggtaaagggcgacctcggtcttccgggtctccccggcgcgccaggtgtagtcggttttcctggccaaaccgggccgcgcggcgaaatgggccagcctggtcccagcggcgagagaggactcgccggcccccctggccgggagggtatacctggacctctgggtcctccaggtccccccggctcagttgggccaccgggcgcctctggactcaaaggcgataagggtgatcccggcgtggggctacctggtcctaggggggagagaggcgagccaggcatccgtggcgaggatggccggcctggtcaggaaggaccaagaggactgacagggccccctgggtccaggggagagcgaggcgaaaaaggagacgtaggtagcgctggtctcaaaggagataaaggggattctgcagtgatcctcggtcctcccggccctaggggggccaaaggtgatatgggggagcgcggtcctaggggtttggacggcgataagggtcctagaggcgacaacggcgatccgggcgataaaggaagcaaaggtgagcccggagacaaggggtcagccggactccccgggctgagggggctcctggggccccagggccagcctggcgccgcaggtatacccggagatccaggaagcccaggaaaggatggggtaccgggtatccgaggagaaaaaggtgacgtgggttttatggggcccagaggactgaaaggcgagcggggggttaagggcgcctgtggcctagacggcgagaaaggagacaagggggaggcaggccctcctgggaggcccggtctggccggtcataaaggcgagatgggggagccaggtgttccaggccaaagcggcgctcctggtaaggaaggactgatcggacccaagggggataggggatttgacgggcagcccgggccgaaaggggatcaaggtgaaaaaggcgaacgcggcacccctggcattggtgggtttcctggtccatccggcaatgacggctcggccggtcccccaggccccccaggttccgtgggccctagaggcccagaagggttgcagggacaaaagggagagagaggccctcccggagaacgagttgttggagcgcctggtgtgcccggcgcaccgggcgagcgcggcgagcagggaaggccaggacctgccggcccccgcggagaaaaaggtgaagccgccctgaccgaagatgacatacggggatttgtacggcaggagatgagtcagcattgtgcatgtcagggtcaatttatagcctctggatctcggccgttaccgtcgtacgccgccgatacagccgggtcccaattacacgcagtgccggtgttgcgagtttctcatgccgaggaagaggagcgggtaccaccagaagatgatgagtactccgagtatagcgaatattccgtcgaagagtatcaggatccggaggcaccttgggacagcgacgacccctgctcattgccactggacgaaggaagctgcaccgcgtacacactgcggtggtaccaccgggccgtgactggctccactgaggcctgccacccctttgtctatggtgggtgcggcggcaacgccaaccgctttggtactcgtgaagcatgtgaaaggagatgcccaccccgcgtggttcaaagccagggcaccggaacagcgcaagac

SEQ ID NO: 9582 - DNA, 8832 bp, synthetic construct
  misc_feature 1..8832: note = source = /note="Description of Artificial Sequence: Synthetic coding sequence"
  source 1..8832: mol_type = other DNA
atgactctccgtttgctcgtggctgccctctgcgctggcattttggccgaagctcccagggtaagggctcagcacagagagcgtgtgacctgcaccagattgtatgccgcagacatagtgttcctcctggacggctcttcaagcatcggccgttccaattttagagaagtcagatcattcctcgagggtctggttttgcctttcagcggcgctgcctccgcccagggcgttcgctttgctactgtccaatacagcgacgatcctcgcaccgaatttggcctggatgctctcggaagtggcggcgacgtgatccgtgctattcgcgaattgtcttataagggaggtaacacacgtacaggagctgcaatactgcacgttgccgaccacgtcttcctgcctcagctcgcaaggcctggagtgcctaaggtgtgcatcttgatcactgatggtaaatctcaagacctggtcgacacagcagctcagcgtctcaaaggccagggcgtaaaactgttcgctgtgggaattaaaaatgcagacccagaagagctgaagagggtggctagtcagcctacttccgactttttttttttcgtgaatgatttcagtatcctccgtactctgctcccacttgttagcaggagggtgtgtaccacagcaggcggtgtacctgtcactcgccccccagacgacagtacatctgcccctagggatctcgtactgtcagaaccttccagtcagtctctccgcgtgcagtggaccgcagccagtggacccgttaccggatataaggtacagtacactcctctgaccggtttgggtcaacccctcccctcagagaggcaggaggtcaatgtgccagcaggcgagacctctgtgcgcttgcgcggtctgagacctttgaccgaataccaggtgaccgtcatcgcattgtacgccaattccataggcgaagccgtgtcaggcactgcccgtaccactgctctggaaggcccagaactgactatccagaacacaacagcccactcactcctcgttgcatggcgctctgtgccaggtgctactggttatagggttacttggcgtgtgctctccggcggcccaacacagcaacaagagctgggccccggtcaaggttccgtcctgttgagggacttggaaccaggcaccgattacgaggtcaccgtgtcaacccttttcggaagaagcgtcggacctgccacctctttgatggctaggaccgatgcctctgtggagcagacactgaggccagtgatacttggccccactagcattctgctgagttggaaccttgtaccagaggcccgtggatatcgcctggagtggcgcagggaaacaggtctggagcccccccagaaagtggttttgcctagtgacgtgactcgctatcagttggatggcctgcaaccaggcaccgaatacaggctgaccctgtacactttgcttgaaggccatgaagtcgctacccccgctaccgttgtgcccaccggcccagagctgcctgtgagtccagttaccgacctgcaggcaactgagctccccggccagagagtgagagtgagctggtctcctgtgcctggcgcaacccagtatagaattatcgtaaggtctacacagggagtagaaagaacactcgtgctccccggaagccaaaccgctttcgatctcgacgacgtgcaagcaggtctctcctataccgtgagggtgtcagctcgcgtgggacctagagagggcagcgcttctgtcctcactgtgcgtagagagcccgagactccccttgctgtgcctggcctgcgtgtggtcgtgtccgacgctaccagagtaagggtcgcatggggccccgtgccaggtgctagtggttttagaatcagttggagcacaggctccggaccagaaagttcccagaccctgccaccagactctaccgcaacagatattactggactccaacccggaacaacctatcaagtggccgtgtcagtgttgcgcggccgcgaggaaggtccagcagcagttatagtcgctcgcaccgaccctctgggacctgtaaggacagtacatgtgacccaagctagtagtagcagcgttaccatcacctggactagagtgccaggagccacaggataccgcgtgtcctggcattccgctcatggccctgagaagtcacagctggtcagcggcgaggctactgtagctgagctcgatggcctggaacccgacacagaatacacagtgcacgtgagagctcacgtagctggagtggacggacctcctgcctctgtggtggtgcgcacagctcccgagccagtaggaagggtctcacgcctccagatccttaacgcctcctccgatgtcctcaggatcacttgggtcggcgttaccggagccaccgcctatcgcctcgcctggggtagatcagaaggaggtcccatgaggcatcagattttgccaggaaacactgattcagctgagatcagaggcctggaaggaggtgtttcctattctgttagagtcactgctctggtgggagaccgcgaaggcactcctgtgtctattgttgtaactacacctccagaagccccaccagcacttggtaccctgcacgtagttcagcgtggtgagcattcactcaggctgcgctgggagcccgtcccccgcgcacagggattcctgttgcactggcagcccgagggcggtcaggagcagtccagggtgttgggtccagagctgtcatcctaccatctggatggtcttgaacccgctacccaatacagagtgcgtctcagcgtgcttggacctgccggtgaaggaccctcagcagaagtgaccgcccgtacagaatctcctcgtgtgccctccatcgagcttcgcgtagttgacacctccatcgactccgtcacattggcttggacccccgtttctcgtgcaagcagttacatcctgtcttggcgtcccttgaggggtccaggtcaggaggttccaggaagccctcaaactctccctggtatctccagcagccagagagttactggcctggagcctggtgtgtcatacatattcagcctgactcctgtactcgacggagtgcgcggccctgaggcttccgtcactcaaactcctgtgtgtccccgcggacttgctgacgtcgtgtttcttcctcacgctacacaagataatgcccaccgtgctgaagctacacgtcgcgtgctcgagcgtctcgtcctcgcacttggccccttgggtcctcaggctgttcaggttggcctgctttcctactctcacaggcccagccccctgttccctctgaatggctctcacgacttgggtatcatcctgcaacgtatcagggacatgccttacatggacccttcaggaaataatttgggtactgccgtggtgacagcacaccgttacatgcttgcccctgacgcccccggacgccgtcagcacgtgccaggcgtgatggtgctgctggtagatgagcctttgaggggagacattttcagtccaatccgcgaagcccaggcttccggcttgaacgtcgtgatgcttggaatggctggtgccgaccctgaacagttgcgtcgtctggcacctggtatggatagtgttcaaactttcttcgccgttgatgatggccccagtctggaccaggctgtctcaggcctggccaccgctctgtgtcaggcatctttcaccacacaacctcgcccagaaccatgccccgtctactgccccaagggccagaaaggagagcctggtgagatgggtctgaggggacaggtgggaccacccggtgatccaggcctccccggcagaactggagctccaggcccacagggccccccaggctccgccaccgctaagggcgaaagaggctttccaggcgctgatggacgtcctggttctcccggaagggctggaaaccccggtactcctggtgctccaggattgaagggatcccccggcttgcctggacctagaggcgaccccggcgagaggggaccccgcggtccaaaaggtgagccaggagcacctggacaggtgatcggcggagagggccctggcctgccaggtaggaaaggtgatcccggcccctccggacctccaggacctcgcggaccccttggcgatcccggtccacgcggtccacctggcctgcccggaaccgctatgaagggcgacaagggcgaccgtggagagaggggtcctccaggaccaggtgagggcggaattgctccaggcgagcccggtctgccaggtctgcccggaagcccaggccctcagggacctgtcggacctccaggcaagaagggtgagaagggagattctgaagacggtgctccaggtctcccaggccagcccggatctccaggcgagcagggtcctaggggcccccccggtgcaatcggcccaaagggagataggggcttccccggtcctctgggcgaggccggtgaaaaaggcgagaggggaccacccggtcccgctggcagtaggggtctgcccggtgttgccggacgccctggcgctaaaggacctgaaggtcccccaggccccacaggcaggcaaggcgagaagggagaacccggccgtccaggcgaccccgctgtagttggccctgcagtcgcaggaccaaagggtgagaaaggagacgtaggaccagctggaccccgcggagccaccggtgttcagggcgaaaggggacctcctggattggtgctgcctggcgatcctggccctaaaggagatcctggtgataggggtcccatcggcctgactggacgcgcaggtcctcctggcgactccggtcccccaggcgagaaaggagaccccggtcgtcctggacctcccggacccgtcggccccaggggcagggatggagaggtcggcgaaaagggcgacgaaggtccccctggtgaccctggcctgcccggcaaagcaggtgagcgtggtcttagaggcgccccaggcgtgaggggaccagtgggcgaaaagggtgaccagggcgatcccggagaggacggaaggaatggatctcctggcagcagcggcccaaagggagacaggggcgaaccaggtcccccaggcccccctggtcgtctggttgacaccggccctggtgcacgcgagaagggcgaaccaggcgatagaggccaagaaggacctcgtggtcccaagggcgatcctggccttcctggcgctcccggcgaacgtggaatcgagggcttcaggggcccaccaggacctcaaggtgaccctggtgttcgtggacccgccggtgagaaaggtgatcgcggaccacccggtctcgatggaagatctggacttgatggcaagcctggcgctgcaggaccttcaggaccaaatggtgctgcaggcaaagctggtgatcccggcagggacggactgccaggcttgaggggcgagcagggcctgcccggcccctctggtccccctggtctcccaggcaagcccggtgaagacggcaagccaggactgaatggaaagaacggtgagccaggcgacccaggcgaggacggccgtaagggcgagaaaggcgattccggtgcttctggccgcgaaggtcgtgacggtcccaagggtgagagaggagcccccggaatcctcggaccacagggtcccccaggtctccccggccctgtcggcccacctggccagggcttccccggtgtgcccggaggcactggcccaaaaggcgatcgtggagaaactggctctaagggagagcaaggattgcccggagagaggggcctcaggggagagccaggtagcgtccctaacgtggaccgcttgctggaaaccgccggaattaaggcaagcgctctgagggagatcgtggagacttgggacgaaagcagtggcagttttcttcccgtccctgaacgcagacgtggtcccaagggtgactccggagaacaaggaccacccggcaaggagggccccattggctttcctggtgagaggggcctgaagggtgaccgtggagaccccggaccacagggtccccccggtctggccctgggagagcgcggtcccccaggcccatctggtctggcaggcgagcccggaaagccaggcatccccggtctgcctggccgcgcaggaggagtcggcgaggcaggcaggcccggcgagcgcggagagagaggcgagaaaggagagcgtggtgaacagggccgtgatggtcctcctggcttgccaggtacaccaggacctccaggcccccccggtcccaaggtatccgtggatgaacctggccctggcttgtcaggagagcaaggccctcctggtcttaaaggagctaaaggagaaccaggctccaacggcgatcagggtccaaagggtgatagaggcgtgccaggaatcaagggagacaggggtgagcccggtcccagaggtcaggacggcaatccaggtctgcccggtgagagaggaatggccggacccgaaggaaagcctggtctccagggtccacgtggtccacctggccccgtgggaggccacggagatcccggcccacctggtgccccaggccttgccggccccgctggaccccaaggaccctccggtctgaagggagagccaggtgagaccggcccacctggccgcggcttgaccggccctactggtgccgtgggcctgccaggacccccaggtccatccggcttggtgggacctcagggcagtcctggtctgcctggccaggttggtgagactggaaaacccggtgctccaggcagggatggcgcctcaggaaaagacggcgacagaggttctcccggagtgccaggttctccaggactgcccggaccagtaggtcccaaaggcgagccaggaccaactggcgctccaggacaggccgtggtgggtctcccaggcgccaagggcgaaaagggagcccccggtggcctcgctggagacttggttggcgaacccggagccaagggagatcgtggcttgcctggccctcgtggcgagaagggtgaggcaggtagggccggtgaacctggcgaccctggcgaagatggccagaagggagctccaggccctaagggtttcaagggcgacccaggagtcggcgtccctggcagccctggaccaccaggacctcccggagtcaagggcgacctcggcctgcctggacttcccggagctcccggagtcgtcggctttcccggccaaaccggcccccgtggcgagatgggtcagccaggaccaagtggcgagcgcggactcgctggacccccaggtcgcgaaggtattcctggtcccttgggtccccctggacctccaggttctgtgggaccccccggcgcatccggtttgaaaggtgataagggcgaccccggtgtgggcctgccaggtccaaggggagagcgtggagaacctggaatccgcggtgaggacggtcgccccggacaagaaggccctaggggcctgacaggtccaccaggatcccgtggtgaacgtggtgagaagggcgacgttggcagcgctggcctcaaaggcgataagggcgactcagcagtgatcctcggccctccaggccctaggggtgccaaaggtgacatgggcgagagaggtcctcgtggcctggatggcgataagggcccacgtggagacaatggtgaccccggagacaaaggatcaaagggagaaccaggagataagggctcagccggtctgcccggactgcgcggtttgcttggcccacaaggccagccaggcgctgcaggcatccctggtgaccccggatctcccggcaaggatggagtccccggcattaggggagagaaaggcgacgtaggtttcatgggccccagaggtttgaagggcgaaaggggcgtcaagggcgcttgtggtctggacggcgaaaaaggcgataagggcgaggcaggtcctcctggtcgccctggattggctggacataaaggcgaaatgggtgaacccggtgtgccaggccagagcggagctccaggaaaggaaggattgattggacctaaaggcgacagaggtttcgacggacaacccggtcccaagggagaccaaggtgagaagggtgagaggggcacccccggtataggcggttttccaggaccatccggtaacgacggatcagcaggccccccaggtccacccggttccgtgggacctcgtggtccagaaggcttgcaaggtcagaaaggcgaacgcggaccaccaggtgaacgtgtcgttggtgctcctggagtgcctggagctcccggagagcgtggcgagcagggacgtccaggtccagccggtcccaggggagagaagggagaggcagccttgacagaagacgatatcaggggtttcgtgcgccaagaaatgtcacagcattgcgcatgccagggtcaattcatcgctagtggttcccgccctctccccagttacgcagctgacacagctggatcccagctgcacgccgtgcctgtcctgagagttagccatgcagaagaagaagagagggttccacccgaggatgatgagtactctgaatactcagaatactctgttgaagagtaccaggaccctgaagctccctgggacagcgacgacccatgctcactgccacttgatgaaggtagttgtactgcatacaccctgcgctggtatcacagggctgtgacaggctccactgaagcctgtcatccattcgtgtacggcggatgtggaggaaacgctaacaggttcggcacacgcgaggcttgtgaaagaagatgtcctccaagagttgttcagtcccagggaaccggcaccgcacaggat

SEQ ID NO: 9583 - DNA, 8832 bp, synthetic construct
  misc_feature 1..8832: note = source = /note="Description of Artificial Sequence: Synthetic coding sequence"
  source 1..8832: mol_type = other DNA
atgacccttagattgttggtggcggcattatgtgccggcatcctcgccgaagcaccccgtgtgcgtgcccagcatagagagagagtcacatgcacacgtctatacgccgcggacattgtgtttctcttggatgggtcctccagcattgggcgcagcaatttccgggaagttaggagctttctggaggggcttgtcttgccattctccggggctgcctctgcgcagggcgttcgatttgccactgtgcaatatagcgacgacccccgcaccgagttcggtctagatgccctgggctctggtggcgatgtgatcagagcgataagagaattgagctataagggcggcaacacacgtaccggcgctgccattcttcacgtggccgaccatgtttttctgccacagctggcgaggcctggcgtgccgaaagtttgtatattgatcacagatgggaaaagccaggatctggtcgatacggccgcccagagactcaaaggacaaggcgtgaaactgttcgctgtgggaattaagaacgcggacccagaggagcttaagagggtcgcgtcccagccgacctctgacttcttcttcttcgtcaacgattttagtatcctcagaacactcctgcctctggtctcccgtcgtgtgtgtacaacagcaggaggcgtacctgtgactcggcctcccgatgatagtacttccgcgcccagagacctggtgctgtccgaaccaagctcacaatcattacgtgtgcagtggaccgcagcctcaggccctgtgaccggctataaagtccagtacactccccttaccggtctcggtcagccgctgccatccgagcggcaggaagttaatgtgccagccggcgagacatccgttcggctacgtggacttcgccccctcactgaataccaggttacagtgatcgcactgtacgctaactccatcggggaagccgtttccggaactgcgcgaacaactgccctggagggcccagagttgaccattcagaacaccacagcccattcgttattagtcgcatggagatccgtccccggggctaccggctatcgagtgacttggagagtactctccggaggcccaacgcagcagcaggaactcggacctggtcagggcagtgtgctactcagggaccttgagcccggtacagattatgaagtgacagttagcactctgtttggacggagtgtcgggccagccacaagcctgatggcccgtactgacgccagcgtcgagcaaaccttgcggccggttatcctgggtcccacttccatcctgctgtcctggaatcttgtgcccgaagcgcggggatatagactagagtggagacgggaaaccggtttagaaccgccgcaaaaagtggtattgccatccgacgtcacacggtaccaattggacggtctgcagcctggaactgaataccggcttaccctatacaccctacttgaaggccacgaagtcgccacacccgctacggtcgtgccgacaggacctgaactgcctgtctcacccgttacagacctgcaggccaccgagctgccggggcagcgggtgcgagtgagctggtcccctgtgccaggagccacccagtaccggatcatcgtgagatccacccaaggcgtggagcgcactctcgtcctccctggtagtcaaacagcctttgacctagatgacgtgcaggcaggcctttcttacacggttcgcgtctccgcccgagtgggaccccgagagggctctgcctctgtgctcaccgttcgcagagagcctgaaaccccgctggcggtaccaggtctccgggtcgttgtgagcgatgcaacaagggttagggtggcctggggtcccgtccccggagcttccggcttccgcatatcctggtctacgggatcaggcccagaatcaagccagaccctaccgccggattccactgccaccgacatcacaggcctgcagcccgggaccacctaccaagtggccgtgagtgtattgagggggagggaagagggccctgctgcagttatcgtggcccgcacagatcccctcgggcccgtgcgcaccgttcatgtgacccaggcttccagctcgtccgtaactattacatggacccgagtgcctggagcgactgggtacagagttagctggcactccgcacacggccccgaaaagtctcaattggtctctggtgaggccacagtcgcagaactcgacggactcgagcccgacactgagtataccgtccacgtgagagcacacgtggccggggtcgacggacctcctgcaagtgtggtggtgaggacggctcccgaacccgtgggacgggtgagccgactgcagattctcaatgcaagctccgatgttctaagaatcacatgggttggggtcaccggtgctactgcctaccgtttggcctggggccgttcggaagggggacctatgcgacaccaaatcttaccgggaaacacagactcagccgagattcgggggctagaagggggggtcagttactctgtgagggttactgcattagtcggcgatagggagggcaccccggtgtctattgtggtgacgaccccacccgaggccccgcccgctctgggaacgttgcacgtggttcagcggggggaacattccttaaggttgcggtgggagcccgtgccacgtgcgcaaggatttctcctccattggcagcctgagggaggccaggaacaatcacgcgtgctgggccctgagctgagttcttaccatcttgacggactcgagcccgcaacccagtaccgcgtcaggttgtctgtactgggcccagccggagagggccccagcgccgaagtcaccgcccgaacggaatctcccagggtgccttcgattgaactgagagtggtggacaccagtatagactccgtgaccttagcctggacacccgtgtctagagcgagctcatatattctatcttggcggcccttacgtggccctggccaggaggttcctggaagcccccagacgctgccgggcattagtagctcccagcgggtgactgggttggaacccggagtttcttacatcttttctcttacacccgtgctggacggcgtgagagggccggaggccagtgtgacccagacacccgtgtgcccaaggggacttgctgatgtggtatttctgccccatgctactcaagacaatgcgcatagggcagaagcgacccgaagggtgttggaacgactggtcctggccttagggccgctgggcccacaagctgtgcaggtggggctgctgagctactctcatagaccttcaccattgttccccttaaacggatcccatgaccttgggataatcttgcagcgtatccgggatatgccttatatggacccttctggcaacaacctgggcactgctgttgttactgctcaccgctatatgctggcacctgatgcacccggacgcaggcagcacgtgcctggcgtcatggtcttacttgtggatgaaccactgcggggggatattttctctcctatccgtgaagcacaggcatctggcctgaatgtagttatgttaggcatggccggagctgatccagaacaattacggcggctggccccgggcatggactcggtacagaccttttttgccgttgacgacggacccagcttggaccaggccgttagtgggctcgccacagcgctgtgccaagccagcttcacgacccagccccgccccgaaccctgccccgtttattgtccaaaagggcagaagggggaacctggcgaaatgggtttgcgcggacaggtgggacctcctggcgatccaggactgcccggtcgtacaggggcccctggaccacaggggccacctggatctgcgaccgccaaaggggagcggggctttcccggtgccgatgggaggccaggctcgccaggtcgggctggaaacccaggcactcccggggcccctggactgaaaggaagccccggtctgcccggtccgcgcggggatcccggtgaaagaggaccaaggggccctaaaggtgagccgggggctccaggtcaggtgatcggaggtgagggccccggtctgcccgggagaaaaggagacccgggcccaagtggccctcccgggccacggggcccacttggtgacccaggaccacggggcccaccgggcttgcccgggaccgccatgaagggtgataaaggagataggggggagcgggggcctccaggccctggtgagggcggaatcgctccaggggagcctggtttgcccgggcttcctggatctcccggcccccaggggccggtgggcccacctggtaaaaagggagagaaaggagatagcgaagacggggcgcctggactgcccgggcagcccggctcacccggcgaacagggcccaaggggaccacccggggcaatagggcctaagggtgaccgtggattccccgggcccttaggagaagccggcgagaaaggagagcgaggtccacctggtccagccgggtccaggggcctgccaggtgttgctgggcggcccggagcgaagggaccagaggggccaccaggaccgaccggacggcagggtgagaagggcgagcccggtcggccaggcgaccccgccgttgtcgggccagccgtagccggacccaagggagaaaaaggggacgtggggcccgccgggcctagaggcgcaaccggagttcaaggagaacgaggccctcctgggttagtcctgcccggagaccctggccctaagggcgaccccggagatcgcggacctatcgggttgacaggccgggccggaccacctggtgattcgggtccgccgggcgagaagggagaccccggtaggcccgggccccctgggccagtggggccgagaggccgtgatggtgaagtcggcgagaaaggggacgaggggccaccgggcgatcccggactaccggggaaggctggggagcgcgggctcaggggtgcacctggtgttaggggacctgttggcgaaaagggagaccaaggcgatccaggcgaggatgggcgaaacggctcgccaggttcaagtggacctaaaggggataggggcgagcccggaccccctgggccgcctggacggctggtggataccgggcctggggcccgtgagaagggagagcctggcgacaggggacaggaaggtccgaggggaccaaaaggagatccgggcttacccggggcccctggggagaggggcattgagggtttcaggggccctcctggaccccagggggatcccggcgtgagaggaccagcaggcgagaaaggcgataggggaccccctgggctagatggcagaagcggcctggatggtaagcccggtgccgccggcccttctggaccgaacggcgccgccggcaaggctggagatccaggtcgtgacggactgcccggcctgcggggtgagcaaggcctgccagggccatccggccccccgggcctgcctgggaaacccggcgaagacgggaaacccggcctcaatgggaagaatggcgaacccggcgatccaggagaggatggtcgaaagggggaaaaaggagatagcggcgcatcggggcgagagggccgggacggccccaagggggaacggggtgctccggggatactgggaccacaagggcctccaggcctgcctggccctgttggtcccccgggacaggggttcccaggagtgcccggtggcacaggccctaagggagatcgaggcgagacagggagtaaaggagaacaagggttgccaggcgagaggggcttgcgaggcgaaccaggatccgttcctaatgtggaccggctacttgagaccgctggcattaaggcaagcgctctacgggagattgtggagacctgggacgaatcaagtggcagcttccttcctgtgcctgagcgcaggagaggcccaaagggcgattctggagagcagggtccccctggtaaggaggggcctattggcttccctggcgagcgcggtctcaagggagatagaggcgatcccggacctcaggggcccccagggctggcgctgggagaaaggggcccacctggccccagcgggctggccggggagcctggaaagccaggaatccctggcttgcctggaagggctggaggcgtgggggaagccggcagacctggggagcgcggggagcgcggtgaaaaaggcgagcggggtgaacaagggcgagacggacctcctggcctgcccggtacacctgggcctcccgggcccccaggtcccaaagtgagtgtggacgagccgggtcccgggctgtctggagagcagggccctcccggcctgaagggggctaagggagagcctggatccaacggtgaccagggtccgaagggggatcggggtgtccctggaataaagggggatcgcggagagcctgggcctagaggccaggatggaaatccagggctcccaggagaacgggggatggccggccctgagggcaagcccgggctgcaaggacccaggggccctcctggccccgtgggtgggcatggagacccaggcccaccaggggcccctgggctggccggccctgccggtcctcagggcccgagcgggttgaagggcgagccaggtgaaacagggccccctggtcggggcctgacgggccccacaggggccgtgggactccctggccctcccgggccgagcggacttgttgggcctcaaggatcccctgggctccccgggcaggttggggagacaggcaaaccaggagcgcccggacgcgacggcgcatctggcaaagatggtgatcgcggtagccccggggtgccaggttcccccgggctcccaggcccagtggggccgaagggggagcctggacccacaggggctccgggacaggcagtggtcgggctgccaggagcaaaaggcgaaaagggagccccggggggtctggctggcgaccttgtcggcgaaccaggtgcgaaaggcgatagggggctcccagggccacgcggagaaaagggcgaagcaggacgggccggagagcccggcgatcctggggaggatggtcagaagggggcaccaggaccaaagggctttaagggggatccaggagtaggtgtaccggggagccccggaccccccggaccacctggggtaaaaggtgacctggggctaccgggccttcctggagcccccggagtggtgggcttccctggtcagacgggcccccgcggagagatggggcagccaggaccatcgggggagagaggtctggccggcccgcccggaagggaggggatacccggacccctaggaccccccgggcctcccgggagcgtgggaccgccgggtgcctctggtttgaagggtgacaagggagaccccggtgtagggctgcctggtccccgaggcgagcggggcgaacctgggattcggggagaggacgggcgtcccggccaggagggacccagagggctgacagggccccctggtagtcggggcgagaggggcgagaagggggatgtggggtcagcgggcctgaaaggagacaagggggactccgccgtgatcctgggtccacccggacctaggggggccaagggcgacatgggggagagaggaccgcgaggactggacggggataaaggacctcggggggacaacggtgatcctggcgacaaaggctcaaagggagaaccaggcgacaaaggttctgccggtttacctggcctgcgcggactgctggggcctcaggggcagcccggcgccgctggaataccaggcgatccaggctcacctggaaaggatggtgtccccggaatacggggtgagaaaggagacgtggggttcatggggcctagaggcctgaaaggggagaggggggtgaaaggtgcctgcgggctggatggagaaaaaggggataaaggcgaggcaggacctccagggcgcccagggttagcgggccacaagggcgagatgggcgaacctggagtgcctggccaaagtggcgcaccaggaaaggagggcctgattggccccaagggagatcgaggatttgacggtcagcctggaccaaaaggagatcagggcgagaaaggggagaggggaacccccgggattggagggtttcctgggcccagtggcaacgatggaagcgctggcccacccgggccaccaggctcggtgggccccagagggccagaaggactccaaggacagaagggggagcggggacccccaggtgagcgggtggtgggcgcaccaggggttccaggagctcccggagagcggggcgagcaggggcggcccggccccgcgggacccagaggggagaagggggaggccgctcttactgaggacgatatccgcggtttcgtcaggcaagagatgtctcagcattgtgcctgtcagggacagtttattgcgtcagggtctcgtcctctccccagctacgccgcagacactgcgggttcacaactacacgccgtccctgttcttcgggtatcccacgctgaggaggaagagcgagtgcctccagaggatgacgaatatagcgaatactccgagtattcggtagaagagtatcaggaccctgaggcaccctgggattcagatgatccctgctccctaccgttggatgaaggttcttgcacggcgtacaccctccggtggtaccaccgtgccgtgaccggctctactgaagcatgtcacccatttgtgtacggcggctgcggcggcaacgcgaatcgttttggcacaagagaagcgtgtgagcggaggtgtcctcctcgggtggtgcagagtcagggcaccggtaccgctcaggac

SEQ ID NO: 9584 - DNA, 8832 bp, synthetic construct
  misc_feature 1..8832: note = source = /note="Description of Artificial Sequence: Synthetic coding sequence"
  source 1..8832: mol_type = other DNA
atgacgttacgactattagtagcggcgttatgtgcgggtatattagcggaagcgccgcgtgtacgagcgcaacatcgagaacgtgttacgtgtacgcgtctatatgcggcggatatagtatttttattagatggttcgtcgtcgataggtcgatcgaattttcgtgaagttcgttcgtttttagaaggtttagtactaccgttttcgggtgcggcgtcggcgcaaggtgtacgatttgcgacggtacaatattcggatgatccgcgtacggaatttggtttagatgcgctaggttcgggtggtgatgtaatacgtgcgatacgagaactatcgtataaaggtggtaatacgcgtacgggtgcggcgatattacatgtagcggatcatgtttttttaccgcaattagcgcgaccgggtgtaccgaaagtatgtatactaataacggatggtaaatcgcaagatttagttgatacggcggcgcaacgtttaaaaggtcaaggtgtaaaactatttgcggtaggtataaaaaatgcggatccggaagaattaaaacgtgtagcgtcgcaaccgacgtcggatttttttttttttgtaaatgatttttcgatattacgtacgctactaccgttagtttcgcgtcgagtatgtacgacggcgggtggtgtaccggttacgcgaccgccggatgattcgacgtcggcgccgcgagatctagttttatcggaaccgtcgtcgcaatcgctacgtgttcaatggacggcggcgtcgggtccggtaacgggttataaagttcaatatacgccgttaacgggtttaggtcaaccgctaccgtcggaacgtcaagaagtaaatgtaccggcgggtgaaacgtcggttcgtctacgtggtttacgtccgctaacggaatatcaagtaacggtaatagcgctatatgcgaattcgataggtgaagcggtatcgggtacggcgcgtacgacggcgctagaaggtccggaattaacgatacaaaatacgacggcgcattcgttactagttgcgtggcgttcggtaccgggtgcgacgggttatcgtgtaacgtggcgtgttctatcgggtggtccgacgcaacaacaagaactaggtccgggtcaaggttcggttttactacgagatctagaaccgggtacggattatgaagtaacggtttcgacgctatttggtcgttcggtaggtccggcgacgtcgctaatggcgcgaacggatgcgtcggtagaacaaacgctacgtccggttatactaggtccgacgtcgatattattatcgtggaatctagtaccggaagcgcgtggttatcgattagaatggcgtcgtgaaacgggtttagaaccgccgcaaaaagtagtattaccgtcggatgtaacgcgttatcaactagatggtctacaaccgggtacggaatatcgactaacgttatatacgctattagaaggtcatgaagtagcgacgccggcgacggttgttccgacgggtccggaattaccggtttcgccggttacggatttacaagcgacggaactaccgggtcaacgtgtacgtgtatcgtggtcgccggtaccgggtgcgacgcaatatcgtataatagttcgttcgacgcaaggtgtagaacgaacgttagtactaccgggttcgcaaacggcgtttgatttagatgatgttcaagcgggtctatcgtatacggtacgtgtatcggcgcgtgttggtccgcgtgaaggttcggcgtcggtattaacggtacgtcgagaaccggaaacgccgttagcggtaccgggtctacgtgtagtagtatcggatgcgacgcgtgtacgtgttgcgtggggtccggtaccgggtgcgtcgggttttcgtatatcgtggtcgacgggttcgggtccggaatcgtcgcaaacgctaccgccggattcgacggcgacggatataacgggtttacaaccgggtacgacgtatcaagttgcggtatcggttttacgaggtcgagaagaaggtccggcggcggtaatagttgcgcgtacggatccgctaggtccggtacgtacggtacatgtaacgcaagcgtcgtcgtcgtcggtaacgataacgtggacgcgagtaccgggtgcgacgggttatcgagtatcgtggcattcggcgcatggtccggaaaaatcgcaattagtttcgggtgaagcgacggtagcggaattagatggtttagaaccggatacggaatatacggttcatgttcgagcgcatgtagcgggtgtagatggtccgccggcgtcggtagttgttcgaacggcgccggaaccggtaggtcgtgtatcgcgtttacaaatattaaatgcgtcgtcggatgtactacgtataacgtgggttggtgtaacgggtgcgacggcgtatcgactagcgtggggtcgttcggaaggtggtccgatgcgacatcaaatattaccgggtaatacggattcggcggaaatacgtggtttagaaggtggtgtatcgtattcggtacgtgtaacggcgctagtaggtgatcgtgaaggtacgccggtatcgatagtagtaacgacgccgccggaagcgccgccggcgctaggtacgctacatgtagtacaacgtggtgaacattcgttacgactacgttgggaaccggtaccgcgtgcgcaaggttttctattacattggcaaccggaaggtggtcaagaacaatcgcgtgttctaggtccggaattatcgtcgtatcatttagatggtctagaaccggcgacgcaatatcgagttcgactatcggtattaggtccggcgggtgaaggtccgtcggcggaagtaacggcgcgaacggaatcgccgcgtgtaccgtcgatagaactacgagtagtagatacgtcgatagattcggttacgctagcgtggacgccggtatcgcgagcgtcgtcgtatatattatcgtggcgaccgctacgtggtccgggtcaagaagtaccgggttcgccgcaaacgctaccgggtatatcgtcgtcgcaacgtgtaacgggtctagaaccgggtgtatcgtatatattttcgctaacgccggtactagatggtgttcgaggtccggaagcgtcggttacgcaaacgccggtatgtccgcgtggtctagcggatgtagtttttttaccgcatgcgacgcaagataatgcgcatcgtgcggaagcgacgcgacgagttctagaacgtttagttctagcgctaggtccgttaggtccgcaagcggttcaagttggtttactatcgtattcgcatcgaccgtcgccgctatttccgttaaatggttcgcatgatttaggtataatattacaacgaatacgtgatatgccgtatatggatccgtcgggtaataatctaggtacggcggtagtaacggcgcatcgatatatgttagcgccggatgcgccgggtcgtcgtcaacatgtaccgggtgtaatggtactattagtagatgaaccgctacgtggtgatatattttcgccgatacgtgaagcgcaagcgtcgggtctaaatgtagtaatgctaggtatggcgggtgcggatccggaacaactacgtcgattagcgccgggtatggattcggttcaaacgttttttgcggtagatgatggtccgtcgctagatcaagcggtatcgggtctagcgacggcgttatgtcaagcgtcgtttacgacgcaaccgcgaccggaaccgtgtccggtttattgtccgaaaggtcaaaaaggtgaaccgggtgaaatgggtctacgaggtcaagttggtccgccgggtgatccgggtttaccgggtcgtacgggtgcgccgggtccgcaaggtccgccgggttcggcgacggcgaaaggtgaacgaggttttccgggtgcggatggtcgaccgggttcgccgggtcgtgcgggtaatccgggtacgccgggtgcgccgggtctaaaaggttcgccgggtctaccgggtccgcgtggtgatccgggtgaacgtggtccgcgtggtccgaaaggtgaaccgggtgcgccgggtcaagtaataggtggtgaaggtccgggtttaccgggtcgaaaaggtgatccgggtccgtcgggtccgccgggtccgcgtggtccgctaggtgatccgggtccgcgtggtccgccgggtttaccgggtacggcgatgaaaggtgataaaggtgatcgtggtgaacgaggtccgccgggtccgggtgaaggtggtatagcgccgggtgaaccgggtttaccgggtctaccgggttcgccgggtccgcaaggtccggtaggtccgccgggtaaaaaaggtgaaaaaggtgattcggaagatggtgcgccgggtctaccgggtcaaccgggttcgccgggtgaacaaggtccgcgtggtccgccgggtgcgataggtccgaaaggtgatcgtggttttccgggtccgttaggtgaagcgggtgaaaaaggtgaacgtggtccgccgggtccggcgggttcgcgaggtctaccgggtgtagcgggtcgtccgggtgcgaaaggtccggaaggtccgccgggtccgacgggtcgacaaggtgaaaaaggtgaaccgggtcgaccgggtgatccggcggtagtaggtccggcggttgcgggtccgaaaggtgaaaaaggtgatgtaggtccggcgggtccgcgtggtgcgacgggtgttcaaggtgaacgaggtccgccgggtctagtactaccgggtgatccgggtccgaaaggtgatccgggtgatcgaggtccgataggtctaacgggtcgagcgggtccgccgggtgattcgggtccgccgggtgaaaaaggtgatccgggtcgtccgggtccgccgggtccggtaggtccgcgtggtcgagatggtgaagtaggtgaaaaaggtgatgaaggtccgccgggtgatccgggtctaccgggtaaagcgggtgaacgtggtctacgtggtgcgccgggtgtacgtggtccggttggtgaaaaaggtgatcaaggtgatccgggtgaagatggtcgtaatggttcgccgggttcgtcgggtccgaaaggtgatcgaggtgaaccgggtccgccgggtccgccgggtcgattagttgatacgggtccgggtgcgcgtgaaaaaggtgaaccgggtgatcgtggtcaagaaggtccgcgaggtccgaaaggtgatccgggtttaccgggtgcgccgggtgaacgtggtatagaaggttttcgaggtccgccgggtccgcaaggtgatccgggtgtacgtggtccggcgggtgaaaaaggtgatcgtggtccgccgggtttagatggtcgatcgggtttagatggtaaaccgggtgcggcgggtccgtcgggtccgaatggtgcggcgggtaaagcgggtgatccgggtcgtgatggtttaccgggtttacgaggtgaacaaggtttaccgggtccgtcgggtccgccgggtttaccgggtaaaccgggtgaagatggtaaaccgggtctaaatggtaaaaatggtgaaccgggtgatccgggtgaagatggtcgtaaaggtgaaaaaggtgattcgggtgcgtcgggtcgagaaggtcgtgatggtccgaaaggtgaacgaggtgcgccgggtatattaggtccgcaaggtccgccgggtttaccgggtccggtaggtccgccgggtcaaggttttccgggtgtaccgggtggtacgggtccgaaaggtgatcgtggtgaaacgggttcgaaaggtgaacaaggtctaccgggtgaacgtggtctacgtggtgaaccgggttcggtaccgaatgtagatcgtttattagaaacggcgggtataaaagcgtcggcgctacgtgaaatagtagaaacgtgggatgaatcgtcgggttcgtttctaccggtaccggaacgtcgacgtggtccgaaaggtgattcgggtgaacaaggtccgccgggtaaagaaggtccgataggttttccgggtgaacgtggtttaaaaggtgatcgtggtgatccgggtccgcaaggtccgccgggtttagcgctaggtgaacgaggtccgccgggtccgtcgggtctagcgggtgaaccgggtaaaccgggtataccgggtctaccgggtcgtgcgggtggtgtaggtgaagcgggtcgaccgggtgaacgtggtgaacgaggtgaaaaaggtgaacgaggtgaacaaggtcgagatggtccgccgggtctaccgggtacgccgggtccgccgggtccgccgggtccgaaagtatcggtagatgaaccgggtccgggtttatcgggtgaacaaggtccgccgggtctaaaaggtgcgaaaggtgaaccgggttcgaatggtgatcaaggtccgaaaggtgatcgtggtgtaccgggtataaaaggtgatcgtggtgaaccgggtccgcgtggtcaagatggtaatccgggtttaccgggtgaacgtggtatggcgggtccggaaggtaaaccgggtttacaaggtccgcgtggtccgccgggtccggtaggtggtcatggtgatccgggtccgccgggtgcgccgggtctagcgggtccggcgggtccgcaaggtccgtcgggtctaaaaggtgaaccgggtgaaacgggtccgccgggtcgtggtctaacgggtccgacgggtgcggtaggtctaccgggtccgccgggtccgtcgggtttagtaggtccgcaaggttcgccgggtctaccgggtcaagttggtgaaacgggtaaaccgggtgcgccgggtcgtgatggtgcgtcgggtaaagatggtgatcgtggttcgccgggtgtaccgggttcgccgggtctaccgggtccggttggtccgaaaggtgaaccgggtccgacgggtgcgccgggtcaagcggttgttggtttaccgggtgcgaaaggtgaaaaaggtgcgccgggtggtttagcgggtgatctagtaggtgaaccgggtgcgaaaggtgatcgaggtttaccgggtccgcgtggtgaaaaaggtgaagcgggtcgagcgggtgaaccgggtgatccgggtgaagatggtcaaaaaggtgcgccgggtccgaaaggttttaaaggtgatccgggtgtaggtgttccgggttcgccgggtccgccgggtccgccgggtgttaaaggtgatttaggtctaccgggtttaccgggtgcgccgggtgttgtaggttttccgggtcaaacgggtccgcgtggtgaaatgggtcaaccgggtccgtcgggtgaacgaggtttagcgggtccgccgggtcgtgaaggtataccgggtccgctaggtccgccgggtccgccgggttcggtaggtccgccgggtgcgtcgggtttaaaaggtgataaaggtgatccgggtgttggtttaccgggtccgcgaggtgaacgaggtgaaccgggtatacgtggtgaagatggtcgtccgggtcaagaaggtccgcgaggtttaacgggtccgccgggttcgcgaggtgaacgtggtgaaaaaggtgatgtaggttcggcgggtctaaaaggtgataaaggtgattcggcggtaatactaggtccgccgggtccgcgaggtgcgaaaggtgatatgggtgaacgaggtccgcgtggtttagatggtgataaaggtccgcgtggtgataatggtgatccgggtgataaaggttcgaaaggtgaaccgggtgataaaggttcggcgggtttaccgggtttacgaggtctattaggtccgcaaggtcaaccgggtgcggcgggtataccgggtgatccgggttcgccgggtaaagatggtgtaccgggtatacgaggtgaaaaaggtgatgtaggttttatgggtccgcgaggtttaaaaggtgaacgaggtgttaaaggtgcgtgtggtttagatggtgaaaaaggtgataaaggtgaagcgggtccgccgggtcgaccgggtctagcgggtcataaaggtgaaatgggtgaaccgggtgttccgggtcaatcgggtgcgccgggtaaagaaggtctaataggtccgaaaggtgatcgtggttttgatggtcaaccgggtccgaaaggtgatcaaggtgaaaaaggtgaacgaggtacgccgggtataggtggttttccgggtccgtcgggtaatgatggttcggcgggtccgccgggtccgccgggttcggtaggtccgcgtggtccggaaggtctacaaggtcaaaaaggtgaacgtggtccgccgggtgaacgtgtagtaggtgcgccgggtgtaccgggtgcgccgggtgaacgaggtgaacaaggtcgtccgggtccggcgggtccgcgaggtgaaaaaggtgaagcggcgttaacggaagatgatatacgtggttttgttcgacaagaaatgtcgcaacattgtgcgtgtcaaggtcaatttatagcgtcgggttcgcgaccgttaccgtcgtatgcggcggatacggcgggttcgcaattacatgcggttccggttctacgagtatcgcatgcggaagaagaagaacgtgttccgccggaagatgatgaatattcggaatattcggaatattcggttgaagaatatcaagatccggaagcgccgtgggattcggatgatccgtgttcgctaccgttagatgaaggttcgtgtacggcgtatacgttacgttggtatcatcgtgcggttacgggttcgacggaagcgtgtcatccgtttgtttatggtggttgtggtggtaatgcgaatcgatttggtacgcgtgaagcgtgtgaacgtcgttgtccgccgcgtgttgttcaatcgcaaggtacgggtacggcgcaagat

SEQ ID NO: 9585 - DNA, 8832 bp, synthetic construct
  misc_feature 1..8832: note = source = /note="Description of Artificial Sequence: Synthetic coding sequence"
  source 1..8832: mol_type = other DNA
atgaccctgagactgctggtggctgcgctgtgcgcaggaatcctcgccgaagccccgcgggtcagagcgcagcatcgagagcgggtcacctgcacccgtctttacgcggccgacatcgttttcctgctggatggcagctccagcatcggtaggtcaaacttccgcgaagtgcgctcgttcttggaaggactcgtccttccgttttccggagccgcttctgctcagggagtccgtttcgcaactgtccaatactcggacgacccacggaccgaattcggccttgatgcgctcggatccggcggcgacgtgatccgcgctatcagggagctgtcctacaagggaggaaacaccagaactggagccgcgatcctccacgtcgcggatcacgtgtttctgccgcaactggctcggcccggagtcccaaaggtgtgcattctgatcacggacggaaagtcacaggatttggtcgatactgcagctcaaaggctgaaagggcagggggtgaagctgtttgcggttgggattaagaatgctgacccggaagaactgaagagggtagcgagccaaccaacctcggacttcttcttcttcgtcaacgacttcagtattctgcgtaccttgctcccgctggtgtcgcgcagggtgtgtaccacggccggaggagtgcctgtgactcgcccgccggatgattcgactagcgcgccgagggacctcgtcctgtcggagccaagtagccagtccctgagagttcagtggactgctgcctccggtccggtgaccggatacaaggtccaatatactccgctcaccggactcggccaaccgcttccgtccgagcgtcaagaagtgaacgtgccggccggagagacttcagtccgccttagaggactccggccgctgaccgaataccaggtgactgtgatcgcgctgtacgccaattcaatcggagaggcggtatcaggaactgcgagaaccaccgcacttgagggtcccgaactgactatccagaatacgaccgcccactcactcctcgtcgcctggcgctccgttcctggcgcgactgggtacagagttacttggcgcgtcctcagtggaggaccgacccaacaacaagagctggggccaggtcagggttccgtgctcttgagggacctggaaccgggcaccgattacgaggtgaccgtgtcaactctgttcggccgctcagtcgggccggccacctcgctcatggcgcggaccgatgcctccgtggaacaaaccctcagaccggtgatcctggggcccacttcgattcttctgtcctggaatcttgtgccggaagctcggggctaccggctcgagtggcgccgagaaacgggattggagccgccacagaaagtggtgctgccgtcggatgtgactcgctaccagctggacggcctgcagccaggaactgaatatagactgaccctctatacgttgctggaggggcacgaggtggcaactcctgctactgtcgtgccaactgggcccgagctcccggtgagtcccgtcactgaccttcaggctaccgagttgcctggccagagagtgagagtgtcgtggtccccggtgcccggagcgactcagtacagaatcatcgtccgcagcacccagggagtggaacgcaccctggtgctccccgggagccaaaccgcgttcgacttggatgacgtgcaggcgggactttcctacactgtgcgggtatccgcaagagtgggcccgcgggaaggttcggcttcagtgctcactgtccgccgggagccagaaacgccgctcgcagtgccgggtctgcgcgttgtggtgagcgacgcgactagagttcgagtggcttggggcccggtgccgggggcatcaggattccggatctcgtggtcgactggaagtggtccggaatcaagccagactctgccaccagactcgacggccactgatattacgggtctgcaaccgggaactacctaccaagtcgctgtgtccgtcttgcgcggtcgcgaggaaggacccgccgcggtgatcgtggcacgcaccgaccctctggggcctgtccgcaccgtccacgtgacccaagcctcgtccagcagcgtgaccatcacctggacgagagtgcctggcgcaaccggttaccgcgtctcctggcactcagcccacggccccgagaagagccagctggtttcaggggaggccactgtggccgaacttgatggtctggagcctgacactgaatacactgtgcacgtgcgcgcgcacgtcgccggagtcgacggtccaccagcttcggtggtcgtgaggaccgcgccggaacccgtggggcgcgtgtcccgactgcagatcctcaatgcgtccagcgacgttctgcgcattacctgggtgggagtgaccggtgcaaccgcctaccggctggcttggggacgcagcgaaggcggaccaatgcggcaccagatcctccctggaaataccgactcagccgaaatccgcggtctggaaggaggagtgtcctactcggtgcgcgtcaccgccctggtgggagatagggagggaacgccagtgtcaatcgtggtgactacccctccggaagctccgcctgcgctcggtaccctgcatgtggtgcaacggggcgagcattccctgcggctgaggtgggaaccagtcccgagagcccagggctttctgctgcattggcagccggaaggcgggcaggagcagtcccgcgtcctcggacctgagctgtcgtcctaccatctggacggactggaaccagccacccagtaccgggtgcggttgtcagtgctcggcccagcgggcgaaggaccgtcggctgaggtgaccgcccgcactgaatcaccgcgggtgccttccattgaactgcgggtggtggatacgtcaatcgactccgtgaccctggcttggaccccggtgagccgggccagcagctacatcctgtcgtggcgcccactgagggggcctggacaggaggtcccaggatcaccacaaacgctgcccggaatctctagctcgcaaagggtgacgggtctggaaccgggagtgtcgtacatctttagcctgacccccgtgttggatggagtccggggaccagaagcatccgttacccagaccccggtctgcccaagaggcctggctgacgtcgtgttcttgcctcatgccactcaggacaatgctcacagagccgaagccactcggcgggtcctggaacgcctggtgctggccctcggaccactcggacctcaagccgtgcaggttggactgctctcatactctcaccggcctagccccttgtttccactgaacggatcccacgacctcgggatcatcctgcagaggatccgcgacatgccgtacatggacccaagcgggaacaatctgggaaccgcggtggtgactgcacaccggtacatgctggccccagatgcgccaggacggcggcagcacgtgccaggcgttatggtgttgttggtggatgagcccctgcggggcgacatcttcagcccaatccgcgaagcccaggcctcaggattgaatgtcgtcatgctgggaatggccggcgcagatccggagcagctgaggcggctggccccggggatggactccgtgcagaccttctttgccgtggacgatggcccgagcctcgaccaagccgtgtcaggactcgcgaccgcgttgtgccaggcgtccttcacgactcagcccagaccggaaccgtgcccagtgtactgccctaaaggacagaagggagaaccgggtgaaatgggactccggggccaagtgggacccccgggcgacccaggattgcctggaagaacgggcgcacctggaccacagggacctcctggttccgccaccgcaaagggagagcgcggtttccccggagcagacggacgaccgggctcgccggggcgcgcaggaaaccctggaaccccgggagcccctggactcaaaggctcgccgggactgcctgggccgcgcggggatccaggagaacgaggacctagaggaccgaaaggagagcccggagccccggggcaggttattggaggggaaggaccgggactgccgggacgcaagggagatccggggccgtcgggtcctccggggccgcgcggtcctttgggagatcccggaccgcgcggcccaccgggactgccgggaaccgccatgaagggcgacaagggagatagaggtgagcggggaccaccggggcctggagaagggggcatagcaccgggcgagccaggccttccaggactgcctggatccccgggcccacaggggcccgtgggaccgcctggcaagaagggagaaaaaggcgattcggaggacggcgccccagggctcccgggccagcccggaagcccgggcgagcagggaccccgggggccgccaggggcgatcggaccgaagggagatcgggggttcccgggcccgctgggagaagctggagagaagggagaacgcggaccaccgggacctgcgggatccaggggcctgccgggagtcgccggtcggccgggcgccaaagggccggaaggaccgccgggaccgaccggacgacaaggagagaaaggagaaccgggtcggcctggagatcctgcggtggtcggacctgcagtggccggaccgaaaggagaaaagggggacgtggggcctgcgggcccccgcggtgccactggcgtgcagggcgagcgcggaccgccgggcctcgtgcttcctggagatccgggaccaaagggggacccaggcgatcggggcccgatcggcctgaccgggcgggccgggccgccgggagattcaggcccgcctggagagaagggtgatcctggacgccctggtccaccgggaccagtaggccctagaggcagggacggagaggtcggagagaagggggacgaaggaccgccgggagatcctggcctgcccggaaaggcaggagagaggggattgagaggtgctccgggggtccgcggtcctgtcggagaaaagggagatcagggcgacccgggagaggatggtcgcaacggatcgcctgggtcatcggggccgaagggggaccgcggagagccgggaccaccgggtccgcctggaaggctggtggataccgggccaggggcacgggagaaaggagaaccgggagatcgcggacaggaaggcccacggggaccgaagggagatccgggcttgccgggagcgccgggagagagaggaatagaaggttttcggggtcctccaggtccacagggagatcctggtgtccgcggaccggcgggagaaaaaggtgatcgcggaccgccgggcctggacggaagatccggactggacggaaagccgggggcagctgggccttcgggcccaaatggggccgcaggaaaggccggcgaccccggaagggacgggctgccaggattgcgaggtgaacagggcctgcctggaccaagcggtcctccgggtttgcccggaaaacctggggaggacggaaagcctggcctgaacggaaaaaacggggaacccggcgaccccggagaagatggtagaaagggtgagaaaggcgactcgggcgcttcggggcgggaaggccgcgatggaccaaagggagagcgaggagccccaggaattctggggccacagggaccgccgggcctgccgggtccggtaggtccacctggtcagggcttcccaggagtgccgggagggacgggcccaaagggcgacagaggcgaaactggtagcaagggcgaacagggactgccgggagagcgcggactgagaggcgagcctggaagcgtgccgaacgtcgacagactgttggaaactgcagggattaaggcttcggcacttcgggaaatcgtggagacttgggacgaatcatcagggtcgtttctccccgtccccgaaagacgacggggaccgaaaggcgattcaggagaacagggacctccagggaaagaagggccaatcggcttcccgggagaacggggtctgaagggtgaccgcggtgaccctggtccgcaaggaccaccgggcctcgccctcggtgaacgggggccgcctggcccgtcggggttggccggcgagccgggcaagccaggaatccccggacttcctggacgcgcaggaggcgtgggcgaagcaggacggccaggagaaagaggggaaagaggagaaaagggggagcggggcgaacaaggtagagacgggccgcctggcctgccaggaactccggggcctccgggaccccctggaccaaaggtcagcgtggacgaaccgggcccggggctctcgggcgagcagggcccgcctgggttgaagggcgccaaaggcgaaccaggatcaaatggagatcagggacccaaaggagatcgtggtgtcccgggaatcaaaggcgacagaggagaaccaggacctcggggccaggatggcaaccccggactgcctggagagcggggcatggctggaccagaggggaaaccaggactgcagggaccgcgcggaccgccgggcccagtgggcgggcatggcgacccgggacccccaggcgccccggggctcgccgggccggccggcccgcagggaccatcgggtctgaagggcgagccgggagaaaccggacccccagggcgcggcctgactggtccaactggagctgtcggactcccaggtcctccgggaccatccgggctggtgggaccgcaaggatccccaggactgccgggtcaggttggggagactggaaagccaggcgccccaggaagggacggcgcaagcgggaaggatggggaccgcggcagccccggcgtgccaggatcgcctggattgccgggacctgtcggacctaagggtgagccaggaccaaccggcgcccctggacaggccgtggtggggcttccaggagctaaaggagaaaaaggcgcgcccggaggattggcaggcgacctggtgggggagccgggagccaagggggaccgcggattgccgggaccgcggggcgagaaaggcgaggcgggccgggcaggtgaaccgggggaccccggcgaagatggacagaagggcgcccctggacctaagggattcaaaggagatcccggagtcggggtgccaggctcaccaggcccgccaggaccaccgggagtcaagggagatctcggtctgccgggccttccaggggcgcctggcgtggtcgggttcccgggccaaaccggcccaaggggagagatgggacaaccaggaccgagtggggagcgggggttggccggtccacccggaagagaaggtatcccaggaccgcttggtccgccgggtccgccgggttcggtgggcccacctggcgcatcagggttgaagggcgacaagggtgacccgggggtcggactgccgggaccacggggagagcggggagaacctggaatcaggggagaagatggacggcctggccaagaaggtccgcgcggcctcactgggccgccgggatcgagaggtgagcgtggcgaaaaaggagacgtgggcagcgctggcctgaagggagacaagggggacagcgcagtcatcctcggaccaccgggaccgcggggagcaaagggagacatgggcgaacgcggaccgcgtgggctcgacggggacaagggcccgcgcggagataacggggatccgggcgacaagggtagcaagggcgagccgggcgacaagggctcggccggcctcccgggcctgcgcggactgttgggtccacaaggccagccgggcgcagcgggaattccgggtgacccgggatcaccgggcaaagacggagtgccgggcatccgaggagagaagggcgatgtgggattcatggggcctaggggattgaaaggcgagcggggagtcaagggcgcgtgtgggcttgacggagaaaagggcgataagggagaggcaggtccaccaggcaggccgggtttggccgggcacaagggagagatgggtgaaccgggggtgccaggacagtccggagcgccaggaaaggagggcttgatcggcccgaagggggaccgcggcttcgatggtcaaccgggaccgaaaggggaccagggggaaaagggggagcggggtactcccggaatcggcggctttcctggcccatccggaaatgacgggagcgccgggccaccagggcccccaggttccgtgggcccgcgcggaccggaaggcctgcaaggtcagaaaggggagcgggggccgccaggggaacgggtggtcggtgcccccggggtgccaggagcaccgggtgagcgcggagagcaaggccgaccggggcctgctggacctcgcggcgaaaagggagaggcggctctcactgaagatgacatcaggggcttcgtgcggcaggaaatgtcccaacactgcgcctgtcagggccaattcatcgcatccgggtcacgcccactgcctagctacgctgcggacactgcaggttcccaactccatgcagtgccagtcctgcgtgtgtcgcatgccgaggaggaagagcgcgtgcccccggaagatgacgaatacagcgagtactcggagtactctgtcgaagaatatcaagacccggaggccccttgggattccgacgacccttgctccctgcctcttgacgaaggctcgtgcactgcttacaccctgcggtggtaccatcgggcagtgaccggatccaccgaagcatgccatccgttcgtgtatggtgggtgcggagggaatgccaatagatttggaactcgggaggcctgtgaaaggcgctgtccgcccagggtggtgcaatcccagggaaccgggactgcgcaagat

SEQ ID NO: 9586 - DNA, 8832 bp, synthetic construct
  misc_feature 1..8832: note = source = /note="Description of Artificial Sequence: Synthetic coding sequence"
  source 1..8832: mol_type = other DNA
atgaccctgaggctgcttgtcgcggccctctgtgcaggaatactggcggaagccccccgggtccgcgcccagcatagagagcgcgtgacctgcactcgcctgtacgccgccgacatcgtctttctcctcgacggaagctcttccatcggccgctcgaacttcagagaagtgcgttcgtttctggaggggctcgtcttgccattctctggagccgccagcgcgcagggcgtgcgcttcgcaaccgtgcaatactccgacgacccgaggactgagttcgggctggacgcgttgggatccggcggcgacgtgatccgggcgatccgcgaactgagctataagggtggcaacacccggaccggagctgcaattctgcacgtggcggaccacgtgttcctgccacagcttgctcgcccaggagtcccgaaggtgtgtattcttattactgacggaaagtcacaagatctggttgataccgcagcacagagactgaaaggacagggagttaagttgttcgccgtcggaatcaaaaatgcggacccagaagagctgaagcgcgtggcatcgcagccgacctcggacttcttcttttttgtgaatgacttcagcatactgcggaccctcctgccgcttgtgagccggcgggtctgtaccaccgcaggaggagtgcccgtcacccggccgcctgatgattctaccagcgctccgcgcgatctggtgctgtcggagccgtcatcacaatcgctgcgcgtgcagtggactgcagcatctgggcccgtgactggttacaaagtccagtacacgccgctcaccggacttggacagcctctgccaagcgagcgccaggaggtgaacgtgccagcaggggaaacgagcgttcggttgcggggacttagacccctgactgagtaccaggtgactgtcatcgcgctctacgcgaattctatcggagaagccgtgagcgggaccgctcgcaccaccgcactggaaggcccggagcttacgattcagaacacgacggcacactccctcctcgtggcctggcgttcagttcccggcgcaactggatatcgggtgacttggagagtcctgtcaggtggaccaacccaacaacaagaactcggcccaggtcagggcagcgtcctgctgcgcgaccttgaacctggaaccgactacgaagtcactgtctccaccctgttcgggcggagcgtcggacctgccacgtcactgatggctcgcaccgacgcctcagtggaacagaccctgcgcccggtgatcctggggccgacctccattctgttgtcctggaacctcgtcccggaagcaagggggtatcggctggaatggcgccgcgagactggactggagcccccacaaaaagtcgtgctgccttctgacgtgacccgataccagctggatggactccagccaggcactgagtaccgcctgaccctctacactctgcttgaaggacatgaagtggccactccagccactgtggtcccgactggaccagagctcccagtgtcacctgtgaccgacctccaagcgaccgaactgccaggacaaagagttcgggtgtcgtggtcaccagtccctggagccacgcaatacaggattatcgtcagatccactcaaggagtcgagagaacgctggttctgcctggttcgcaaaccgctttcgacttggacgacgtgcaggctggactgagctacaccgtccgcgtctcggcccgcgtggggccgcgggagggatccgcgtccgtgctgactgtgcgtagagagccggaaactccgttggcggtgcctggacttcgggtggtcgtgtcggacgccacccgggtccgcgtcgcttggggaccggtgcctggcgcctctggattcaggatctcctggtcaactggaagcggaccagaatcctctcagactctgccaccggactccactgcaactgatatcactggtttgcagcctgggactacctaccaggtggctgtgtccgtgctccggggaagagaagaggggcctgctgcggtcatcgtcgcccggactgaccccctgggcccggtgcgcaccgtgcacgtgactcaagcctcctcgtcctccgtgaccatcacctggaccagagtccccggcgctactggctaccgggtcagctggcattccgcacacgggccggaaaaatcacaactggtgagcggagaagccactgtggcggagctcgatggactcgaacctgacaccgagtacactgtgcacgtccgtgctcacgtggccggagtcgatggaccaccggcctcagtggtggtccggaccgctccggaaccggtggggcgcgtgtcccggctccagatcttgaatgcatcaagcgatgtgctcagaatcacttgggtgggagttacgggagccactgcgtatcggttggcctggggccggagcgagggtggtcccatgagacatcaaatcctgccgggaaacaccgacagcgccgagatccgcggcctcgaggggggagtgtcatactcggtgagggtgacggcactggtcggtgacagagaaggaactcctgtgtcaatcgtcgtgactaccccacctgaggctcccccggcactggggacccttcatgtggtccaacgcggagaacatagcctcagactgcggtgggaacctgtgccgcgggcacagggattcctgctgcactggcagccagaaggtgggcaggagcagtcccgcgtcctcgggccagaactgtcgtcctaccatctggatggacttgaacctgcaactcaataccgcgtgaggctgtcggtccttggaccggcaggagaaggcccttcagccgaggtgaccgcacggaccgaatcgcctagagtgccttccatcgagctgcgggtcgtggacactagcatcgactccgttaccctcgcctggactccggtgtcccgggcttcgtcgtacatcctgtcctggcggccactccgcggaccgggccaggaagttccaggatcgcctcaaacccttccgggaatcagcagctcccaacgggtgactggactcgagccgggggtgtcctacatcttcagcctgaccccagtcttggatggcgtgagaggtccggaagctagcgttacccagacccccgtttgtccccgcggcctggccgacgttgtctttctgcctcatgccacgcaggacaatgcacatcgcgccgaagcaactaggagggtgcttgaacgcctggtgcttgccctcgggcccctgggcccgcaagctgtgcaggtcggcctgctctcgtactcccatagaccgtcgccgttgttcccactgaatggatcccacgacctcggcattattctccaaagaatccgggacatgccgtacatggaccccagcggaaacaatctcgggaccgcagtggtcactgctcaccgctacatgctcgccccagacgctccgggccggcgtcagcacgtgcctggcgttatggtgctgttggtggacgagcctctgagaggggatatcttttcgccgattcgagaagcacaagcgtccggactcaacgtggtgatgcttggcatggctggcgctgatccggaacagttgagacgactggcccccggaatggattccgtccaaacgtttttcgccgtggacgatgggccatccctggaccaagctgtctcgggactcgcaaccgcactctgccaggccagcttcaccacccagcctcggccagaaccttgcccggtgtactgccctaagggccagaagggcgagccaggagaaatgggactgcgcgggcaggtcgggccaccaggagatcccgggctgcctggcagaactggggccccgggaccacaggggccaccaggctcggcgacggccaaaggggaaaggggctttcctggtgctgacggccggcccggctcgccaggaagagccggcaaccctggaaccccgggcgcgccaggactgaaaggaagcccgggcctgccgggaccgcggggagatccgggcgaaagaggcccacgcggcccgaagggcgaaccaggggctcctggtcaggtcattggaggagagggacccggccttcccggtaggaagggtgatcccggaccatccggacccccgggacctcggggaccactgggggacccgggccctagaggtcccccgggcctgccgggcaccgcgatgaaaggggataagggggacagaggggaacgcggaccgccaggaccgggagaggggggaatcgccccgggagaacccgggctcccgggtctgccgggaagcccgggtccgcaagggccggtgggaccgccgggaaagaagggtgaaaagggagattcggaggacggcgcaccgggactcccgggtcagccgggatcgcctggtgagcaaggacctcgcggaccgcctggagctatcgggccgaagggggacagaggcttcccgggaccgctgggtgaagcaggtgaaaagggcgaacgcggcccacccggaccggccggctcgcgcgggctcccgggcgtggcaggtagaccaggagcgaagggcccggaaggcccgccaggaccaactggtagacaaggtgagaagggggagccaggcagaccgggcgaccccgccgtcgtcggcccagcggtggccggcccaaagggggaaaagggagatgtgggaccagccgggccccggggagcaaccggagtgcagggagaacggggacctccgggcctggtcctgccgggggacccaggaccgaagggtgacccgggagacagaggaccgatcggtctgaccggacgggctggaccgccgggcgactcgggtcctcccggggagaaaggagatcctgggcgccctgggccgccggggcccgtgggcccgaggggacgcgacggggaagtgggagagaagggcgacgaggggccccctggcgacccggggctgccgggtaaagctggagagagaggactgcggggagcaccgggcgtgcggggacccgtgggagagaagggcgatcagggagatcctggcgaggacggcagaaacgggtcaccgggtagctcaggcccgaaaggagacaggggagaaccaggaccaccgggaccgccaggtagactggtcgacaccggccccggagcgcgggagaagggagaaccaggagatcggggacaggagggcccgcgcggaccgaagggcgaccctggcctgccaggtgctccaggtgagcggggaatcgaaggatttagagggccaccaggaccgcaaggagatccgggtgtgaggggacctgccggcgaaaagggggaccggggaccaccgggactcgacggccgatccggattggacgggaaaccgggagccgcaggtccatccggacctaatggagccgcagggaaggccggtgatccaggacgagatggcctgccagggctccgcggagaacagggactgcctggcccttcggggccccccgggctccctggtaagccaggagaggatggaaaaccaggactcaacggcaagaacggagagccaggagatccaggcgaagatggaaggaagggcgagaagggtgactcaggtgcatcaggacgcgaaggacgggatggccctaagggcgaaaggggcgctccaggcatcctggggcctcagggaccaccgggattgccgggtccagtgggccctccggggcagggcttccccggagtgccgggcggaaccggaccaaagggagatcggggtgagactggaagcaagggagagcagggactgccgggagagagaggcttgaggggtgagccgggttcggtgcctaacgtggaccgactgctggaaactgccggcatcaaagccagcgccctccgagaaatcgtcgaaacctgggatgagtcatcaggatcctttctcccagtcccagaacgccggagaggaccaaagggagatagcggcgaacagggaccaccgggcaaagaaggaccgatcggtttccctggcgagcgggggctgaaaggcgatcgcggcgaccctggaccgcaggggccacctggactcgccctcggggaacgcggaccgccgggaccctccggtttggcaggtgaacctggtaagccgggaatcccaggcctcccgggaagagccggaggtgtgggagaagctggccggcctggtgaacggggggaacgaggcgaaaagggggagcgtggtgaacaaggccgcgacggacctccggggctgccgggaaccccgggaccacccggacctccggggccgaaagtgtcggtggatgaaccaggacctggcctgtccggagaacaggggccgccgggcctcaagggagctaaaggggaacccggatccaatggcgatcagggaccgaagggggaccgaggcgtcccaggcatcaagggagatcgcggtgaacctggaccgcgcggacaggatggaaatccaggactgccgggagagcgcggtatggcgggaccggagggtaagccgggactgcagggcccgcggggcccgccggggccggtcggcgggcacggtgacccgggaccgccgggcgcccctggactcgctggaccggccggaccgcaaggaccttctggccttaagggcgagccgggtgaaacgggcccgccgggacgggggctcactggcccgaccggagccgtcggactgccgggacctcccggtccttcgggactggtcggaccgcaagggagcccaggattgccgggacaggtgggagagacgggcaagccaggagccccgggacgggatggagcttctgggaaggacggagatcggggtagcccgggagtgccaggctccccgggcctgccaggccccgtcggcccgaaaggcgaaccaggaccaactggggccccgggacaggccgtggtggggctgccgggagcaaagggagaaaagggtgcaccggggggtcttgcgggcgacctcgtgggagagcctggtgcgaaaggcgatcgcggacttccgggtcctaggggcgagaagggagaggccggccgcgctggagagcccggcgacccaggagaggacggacaaaagggagctcctggcccaaaggggtttaaaggcgacccgggtgtgggagtcccgggtagcccggggccgcctggaccgccgggcgtgaaaggggacttgggcctgccgggcctcccgggagccccaggagtggtggggttccctggacaaactggaccaaggggtgaaatgggccagccaggaccatcaggcgaaagaggactcgccggaccgccgggacgcgaaggaatcccggggcccctgggccccccgggaccaccaggttccgtgggcccgccaggagcttcgggcttgaaaggtgataaaggagatccgggggtggggctgccgggcccgcgcggagaacgcggggaaccgggaatacgcggggaagatggacggccgggtcaggaaggacctaggggactcactggaccacccggatcccggggtgagagaggtgagaagggggacgtcggatcagccggtctgaagggagataaaggggattcggcggtgatccttggaccgccaggaccacggggagcaaaaggtgacatgggtgaaagaggaccgaggggactggacggagataagggaccaaggggagataacggagatcccggagataagggtagcaagggtgagcccggagacaagggatcggctggactccctggccttcgtggacttctgggaccgcagggtcaaccgggagctgcaggtattccgggcgacccgggatcaccgggtaaggatggcgtcccgggaatccggggagagaaaggcgatgtgggtttcatgggtccgcggggactgaaaggtgaacgcggtgtgaagggcgcctgcggcctcgatggagaaaagggcgataagggggaggccgggcctcccggaaggccaggactggcagggcacaaaggagagatgggcgagccgggagtcccgggccagtccggagcgccgggaaaggaaggactgatcggaccaaagggagacagaggattcgacggacagcccggacccaagggcgaccagggggaaaagggtgagagaggaaccccgggcatcggaggattccctggaccatccggaaatgacggatccgcgggcccgcctggccctccgggcagcgtgggcccgaggggccccgagggactgcagggccaaaaaggagagcgcgggccgccaggcgaacgcgtcgttggggcccctggcgtgccgggagcccccggagaacggggagagcaaggtcgccccggacccgctgggccgcgcggagaaaagggggaggcagcccttactgaggacgacatcaggggattcgtgagacaggagatgagccagcattgtgcttgccaaggccaattcatcgcatccgggtcacgcccgctcccgtcatacgccgcggacaccgccggatctcagctccacgctgtgcctgtgttgagagtgtcacacgccgaagaagaagaacgcgtgcctccggaggatgatgaatactcggagtacagcgaatactccgtcgaagaataccaggacccggaggccccgtgggactccgacgacccgtgcagcctcccgcttgatgagggttcgtgcaccgcctacactctgcggtggtaccaccgcgccgtcacgggatcgaccgaagcctgccacccgttcgtctacggcgggtgtggaggcaatgccaatcgcttcggcacccgggaagcatgcgagcgccggtgcccgcccagagtggtgcagtcacagggtacgggtactgcccaagat

SEQ ID NO: 9587 - DNA, 8832 bp, synthetic construct
  misc_feature 1..8832: note = source = /note="Description of Artificial Sequence: Synthetic coding sequence"
  source 1..8832: mol_type = other DNA
atgacgctccgactgctggttgctgccctctgtgccgggattttggccgaggctccccgtgtccgagcccagcaccgggaacgcgtcacgtgcacccgtctctacgccgcggatattgtcttcctcctggatggatccagctccattggacgtagcaacttccgcgaagtgcgcagtttcttggagggtctcgtccttccattctccggagccgcgagcgcgcagggcgtccggtttgccaccgttcagtatagtgacgatcccaggaccgagttcggccttgacgccttgggcagcggaggcgacgttattcgcgctataagggaactgtcttacaagggcggtaatacccggacgggagctgcgatcctacacgtggctgatcatgtctttttgccacagctcgcccggcccggtgtcccgaaggtctgcatccttatcaccgacggcaagtcgcaggacctcgttgacaccgctgcacagcgtctgaagggacaaggcgtgaaactcttcgctgtcggcatcaaaaacgccgaccccgaggaactcaagcgtgtggcctctcagcccactagtgatttcttcttcttcgtgaacgacttttcgattcttcgcacattgctgcctctcgtatcccgtcgtgtgtgcacaaccgcgggcggagtgcctgtcacccgtcctccggacgattccacctccgcccctcgcgacctagttctcagcgagccgtccagccagtccctccgcgtccagtggacggctgcgtctggtcccgtcaccggctacaaggttcagtacacccccctgactggactcggacaacctctcccctctgaaaggcaggaggttaacgttcctgccggtgagactagtgtccgcctcaggggattaagacctttgactgagtaccaagttaccgtcatagccttgtacgctaactccattggggaagctgtgtccggtactgcccggacgaccgccttggagggcccggagctgacaatccagaacactacagcacactccctgttggtcgcctggagatccgtgcccggcgctaccggttaccgtgtcacttggcgggtcttaagcggcggacctacgcaacagcaagagctcgggcccggccaaggttccgttcttttgagggacctcgagcccggcactgactacgaggttaccgtgtcaaccttgttcggccgttccgtcggtccggccaccagtcttatggctcgcaccgatgcctccgtcgagcaaactctgaggccggtgatactcggccccacctctattctcctttcttggaaccttgtccccgaggcccgcggttatcgtctggaatggcgccgagagacaggtttggagcccccacagaaggttgtccttcctagcgacgtcacccgttaccaactcgatggtcttcagccgggtaccgagtaccgcctgacattgtatactctgctcgagggtcatgaagtggctacgccggccaccgtcgtgccgaccgggcccgagctgcctgtctcccccgtgactgatctccaggccaccgagctccccgggcaaagggttcgcgtgagctggtcgcccgtacccggagctacccagtatcggatcattgtacgcagcacccaaggtgtcgaacgtacccttgttctgcctggttcgcagaccgccttcgatctagatgatgtccaggccggcctctcctataccgtaagagtttccgctcgtgtgggtccgcgcgagggctctgcctccgtcctcacggtcagacgtgagcctgagaccccgctggccgttccaggattgcgtgtcgtggtctctgatgcaacccgcgtccgcgttgcttggggacctgtccccggcgcctcaggattcaggatcagctggtccaccggaagcggcccggagagttcccagaccctgcctccggacagcaccgctaccgacattactggcctgcagcctggcactacatatcaggtcgccgtctctgtcctgcgtggacgcgaagagggccccgccgccgtgattgttgcacgtacggatccattgggacccgttcgcacagtgcatgtgacccaggccagttcatcgtccgtgacgattacgtggacgagggtccctggtgctaccggctaccgcgtctcctggcattcggcccatgggcctgagaagagtcagctggtcagcggcgaggccacggttgcagagctggacggtctggaacccgataccgagtatacggtccacgtccgtgcgcatgtcgccggagtcgacggcccccctgcgtcggtcgtagttcgtaccgctcctgagccggttggccgcgtctcgcgcctccagatccttaacgcttcaagtgatgttctgcgtatcacttgggtgggagtgactggcgccaccgcttaccgcctggcttggggccgctccgaaggaggcccgatgcggcatcagatccttcccggcaacacagactctgccgagatccgtggcctggagggaggggtctcctactccgttcgtgtgacagctcttgttggcgaccgagagggaacaccggtgagtattgtcgtaacgaccccgccggaggccccgcccgctctggggacccttcacgtcgtccagcgaggggagcacagccttcgtctgcgttgggaacctgtcccccgtgcccaaggattcctcttgcactggcagcctgagggcgggcaagagcagtctcgagtgctggggcccgaactctctagctaccacctcgacgggctggagcctgcgacccaatatcgtgtccgtctgtccgtgctcggacccgccggcgagggtccgtctgccgaggtcactgcacgcactgagagcccccgggtgccttctattgagcttcgagttgtcgatacatcgatcgactccgtcacccttgcttggacccccgtctcccgtgcaagctcatacattctgtcctggaggccgcttcgtggccccggacaggaagtccccggtagccctcagactctgcccggcatctcttcatctcagcgagtcaccggcctggagcctggtgtgagttacatcttctctctgacccccgtactcgacggtgttcgcggtccggaggccagcgtcacccagacccccgtttgcccccggggattggctgacgtcgttttcctcccccatgctacccaagacaacgctcatcgtgccgaggctacacgccgggtgttggaacggcttgtcctggccttaggtcccctcggtcctcaagccgtgcaggttgggctcctgagttattcgcatcgacctagtcccttattccccctcaacggatctcacgatctaggtattatcttgcagcggatccgcgacatgccctacatggatccctcgggcaataatctcggcaccgcggtcgttaccgctcaccgctacatgctggctccagacgcacccgggcgacgtcagcatgtccccggcgtgatggtcctcctggtcgacgagcccctgcgtggtgatatctttagccccatccgcgaagcgcaggctagcggtctgaacgttgtgatgcttggcatggcaggcgccgatccagagcagttgcgtaggctcgccccggggatggattcggttcagaccttcttcgccgtagacgacggaccctctctggatcaggcggtgagtggcctcgctaccgcgttgtgccaggcttctttcactacgcagccccgcccggagccttgcccagtgtactgccccaaaggacagaagggcgagcctggcgagatgggccttcggggccaggtcggccctcccggagatcctggtttgccgggccgcactggcgcccccggtcctcagggaccaccggggtcggcgaccgccaagggagagcgcggcttcccgggcgccgacggacgtcccgggtcccccggtcgggcgggaaaccccggtactcctggcgcgccgggtctgaagggtagcccaggtctcccaggcccccgcggggatccgggtgagagaggcccgagagggcctaagggggagccgggcgcccccggacaagttatcggtggcgagggacctggcctgccgggtcgtaagggtgaccccggcccaagcggacctcccggccctcgcggcccactgggagaccctggaccgcgtggccccccgggcctgcccggaaccgctatgaagggtgacaagggtgatcgcggcgagcgtggcccgcccggtccgggggagggtggtatcgcccccggcgagcccggtcttcctggtctgcccggatcacctggtccccagggacctgtcggtcctcctggaaagaagggggagaaaggcgattccgaggatggggcccccggcctcccgggccaaccaggctccccgggtgagcaaggcccccgtggtccgcccggagctatcggccctaagggagaccgggggttcccgggcccacttggagaggccggggagaagggcgagcggggacctcctggtcccgccggctcacgcggcctccctggagtggccggccgtcccggggccaaggggcccgaaggtcccccgggccccactggccgccagggcgagaagggagagcccggtcggcctggggatcccgcggtggtcggaccagcggtggcgggtcctaagggagagaagggggatgtcggcccggccggaccccgaggcgctactggtgtccagggcgagaggggtccacctggtctggttttgcccggggaccccggccccaagggagaccccggagaccgcggcccgatcggcctgaccggtcgcgcgggtccacccggcgattcaggtcctcccggcgagaagggagacccgggcagaccgggacccccaggcccggtgggcccgcggggtagggacggtgaggtgggcgagaagggagatgagggtccgccaggtgaccccggcctcccaggtaaggctggggagcgtggcctgcgtggggcccctggtgttcgcggccccgttggtgagaaaggtgaccagggcgaccccggcgaggacggtcgtaatggatcccctggttcttcgggtcccaagggtgaccgcggcgagcctggccctcctggtccccccggccgtctggtcgatacagggccaggcgcccgcgagaagggagaacccggagacaggggccaggagggcccccgcggtcctaagggcgatcccgggttgcctggtgcgccgggcgagcgaggcatcgagggcttccgtggcccgcctggcccgcagggagacccgggagttcgtggcccggctggggagaagggcgaccgtgggccccccggactcgacggacgtagcggcttagatggcaagcccggtgcagctggtccgtccggccccaacggtgctgcgggaaaggcgggtgacccgggtagagacggcctgccgggtctgcgtggagagcagggcctgcccggtcccagcggcccacccggcctccctggaaagccgggcgaggatgggaagccgggtctcaacggcaagaacggtgagccgggtgatcctggcgaggatggacgtaagggcgagaagggtgactccggcgcctcaggccgtgaaggtagggacggtcccaagggtgagaggggcgctcccggcattcttggtccccaaggtccacctggcctacccggtcccgttggcccaccgggccagggcttccctggagtgcctggtggaactggacctaagggcgatcgcggcgagacgggctccaagggggaacagggtctgcccggcgagcgtggtttgcgcggagagcccggtagtgttccgaatgtggatcgtttacttgagaccgcaggcattaaggcttcggcgttgcgcgagattgtcgaaacctgggacgagtcttctggatcctttctccccgtccctgagcgtcgtcgcggaccaaagggtgacagcggtgagcaagggccccccggtaaggagggtcccatcggttttccgggtgaacgcggcttgaagggcgaccggggtgaccctggcccgcagggcccccccggtctggctctaggtgagcgcggtcccccgggtccgtctgggttggccggagaaccgggaaagccaggcatccccggccttcccggcagagctggaggcgtgggagaagccggccgtcctggtgaacgcggcgaacgcggtgaaaagggagagcgcggcgagcagggccgggatgggcctcctggattgcctgggacccctggcccccccggtcctcccggtcctaaagtcagtgttgacgagcccggccccgggctgtccggtgagcagggacctcctggcctgaagggtgccaagggtgagccgggatccaacggtgatcagggccccaaaggggaccgtggtgtgcccggcatcaagggcgaccgcggcgagcccggtccccgcgggcaggacggtaacccgggtcttcccggtgaaagggggatggccgggccagagggaaagcccggtttgcaagggccccggggcccccccggtccggtcggtggtcacggcgaccctgggccgcctggcgctcccggcctggcaggccctgccgggccgcaaggtccttccggactaaagggcgagccgggtgagactggtcccccaggccgtggattgacaggtcccacaggagctgtcggtctgccgggaccgccggggccctccggcctggtcgggccgcaaggctcgcccggcttacccggccaggtgggtgagacagggaagccgggcgcacccggtcgcgacggagcctctgggaaggacggtgataggggaagccccggtgtgcccggttcgcccggtcttccgggtccggtgggcccgaagggcgagcccggaccgacgggtgctcctgggcaggctgtggtcggcctccctggtgctaagggcgagaagggcgcgccgggtggcctggctggagacctggttggtgaaccaggagccaagggcgaccgtggactgccgggtccccgcggtgagaagggcgaggcggggagagccggcgagcctggcgaccccggagaggacggacagaagggtgccccaggaccaaagggtttcaagggcgatcccggtgtcggtgtccccggcagcccgggccccccaggcccccccggcgttaagggcgatcttggcctcccgggcttgcctggcgctccaggtgtggtgggtttccccggccaaacgggacctcggggcgagatggggcagcccggtcctagcggcgaacgtggcttggcaggtccccccggccgcgagggcattcccggtccactgggtccccccggtccccctggtagcgtcggcccgcccggagcgagcggcctgaagggagacaagggtgatccgggtgttggcctgcctggcccgcggggtgagcgtggtgagcctggcatccggggcgaagatggccgtcccggccaagaaggtccccgtggtcttactggccctccaggatctcggggtgagcgtggagagaagggggacgttggctccgctggtctgaagggcgataagggcgactctgcagtcatcttgggccctcctggtccccgcggagcgaagggagacatgggcgaacgcggaccgcgcggtctggacggggacaagggccctaggggtgacaacggagatcctggtgataagggttctaagggtgaaccgggcgataaaggtagcgccgggcttcccggactgcggggtcttttggggccgcaaggacagcctggcgcagctggtatccccggcgacccgggttctccggggaaggatggcgtccctggtattcgcggcgagaagggcgacgtcggctttatgggaccgcgtggtctgaagggcgagcgcggcgttaagggcgcttgtggtttggacggggagaaaggcgacaaaggcgaggccggtccgccaggtcgtcctggtctcgccggtcacaagggagagatgggtgagccgggggttcctggacagtcgggggcacccggtaaggagggcctcattggccctaagggcgaccggggctttgacggccaacctggtcccaagggtgaccagggcgagaagggcgagcggggtactcccggtataggtggctttcccgggccctccggcaacgatgggagcgccggcccgcctggtccgcctggttccgtcgggccccgcggtcctgaaggtcttcaagggcagaagggagagcgtggcccgcccggtgagagagtggtcggagctcccggcgtgcctggggcccctggggagcgcggcgagcaagggcgtcctggtcctgccggcccgcgcggtgagaagggtgaggctgctctgaccgaggatgatatccgtggtttcgtgagacaggaaatgtcccagcactgcgcttgccagggtcagtttatcgcctcgggttcccgtcccttgccctcgtacgccgctgataccgcaggcagccagctgcacgctgtccctgttctccgtgttagtcacgccgaagaggaggagcgggttcctccggaggacgatgaatacagcgagtactcggagtacagtgtcgaggaatatcaagacccggaggccccctgggactcagacgacccctgcagcctgccgctcgatgagggctcgtgcaccgcctatactttgcgctggtatcatcgagctgttaccggttcaacggaggcatgccatccgttcgtttacggtggttgtggtggtaacgctaacagatttggaacccgagaggcatgtgaacgacgttgccctccgcgcgttgtccagtcgcaaggtaccggcacggcacaagat

SEQ ID NO: 9588 - DNA, 8832 bp, synthetic construct
  misc_feature 1..8832: note = source = /note="Description of Artificial Sequence: Synthetic coding sequence"
  source 1..8832: mol_type = other DNA
atgaccctgcgattgctggtggcagcactttgcgcgggaattcttgcagaggccccaagagtcagagcacagcatagggaaagagtgacctgtaccagactttatgcggcggacatcgtctttcttcttgacgggtcgagctccatcggtagaagcaactttcgggaggtccggtcgtttctcgaaggtcttgtcttgcccttctccggcgctgcttcagctcagggggtgcggttcgccaccgtgcagtactcggacgatcccagaacggaatttggactggacgcactcggtagcggcggggacgtcattagggccatccgggaactttcctataagggtggcaacactagaaccggagcggcgatcctccatgtggcagatcacgtgtttcttccacagctggcaagaccaggggtgcctaaagtgtgtatccttatcactgacggtaagtcgcaagatctggtcgataccgcagcacaaagattgaagggtcagggagtcaagctctttgcagtggggattaagaatgcggatccagaagaacttaagcgcgtggcaagccagccgacttcagatttcttctttttcgtgaacgatttttcaatcctgcgtactctgctgcctctggtgagcagaagggtgtgtaccaccgcaggaggagtgccggtgaccagacctccagatgattccacctcagccccaagagatctggtgctttccgaaccaagctcacagtctcttagggtgcagtggaccgcagccagcggtcccgtcaccggctacaaggtccaatacactcctttgactggccttggacaaccgctgcctagcgagcggcaggaggtgaacgtgccagcaggggaaacttccgtccgccttaggggcctccgacctctgaccgaataccaagtcacggtgatcgcactttacgcaaactcgatcggcgaggcggtgtcagggaccgctagaaccactgccctcgaaggaccagaacttacgattcaaaacaccactgcgcactccctgctggtggcttggaggtcagtgccaggcgccaccggctacagagtgacctggagagtcctttctggtggacctactcagcagcaagaattggggccaggtcaaggatccgtgctccttcgcgatttggagccaggtactgattacgaagtgaccgtctccactctctttggtcgctcagtgggtccagccacctctctcatggcaagaaccgacgcatcggtggaacaaaccttgcgtcctgtcatactgggtcctacctcgattctcctgtcgtggaatcttgtgcctgaggccagaggataccgccttgaatggcgtcgcgaaactggattggagcctccacaaaaggtcgtgctcccaagcgacgtgactaggtaccaactggacggtctgcagcctggaaccgaataccggctgactttgtataccctgctggagggtcatgaagtcgccacgcctgcgaccgtggtcccaaccggacccgagctgcccgtgtcaccagtgactgatctgcaggcgacggaacttccgggtcaacgagtgcgagtgtcttggagccccgtcccgggcgcaactcaatacaggatcatcgtgcgctccactcaaggagtggaacgtactctggtcctccctggatcgcagaccgctttcgatttggacgacgtgcaggccggactgtcctacacggtgcgcgtgtccgcacgggtgggaccccgtgaaggttcggcatcagtcctgaccgtccgacgtgaacccgaaaccccgctggccgtgcctggacttcgggtcgtcgtgtcggacgctactagagtgcgagtggcgtggggtcctgtccccggcgcttccggattccggatctcgtggtcaaccggctctggccccgaatcatcacagacgctgccaccagactccacggcaaccgatattaccgggttgcagccaggaaccacttaccaagtggctgtgagcgtgctgaggggtcgcgaggaaggacctgcggcagtgatcgttgcccgtactgacccactcggacctgtccgcactgtgcacgtgacgcaggcctcgtcatcctcggtgactataacttggacccgcgtcccgggagcaactggttaccgggtcagctggcattcagcgcatggtcctgagaagtcccaactggtgtctggagaagcgacggtcgcagaactggatggattggaacccgataccgaatataccgtccatgtccgggcccacgtggcaggagttgatggtcctccagcgtcggtggtggtgcgcactgcccctgaacccgtcggtcgcgtttcgcgactgcagattcttaatgctagctccgatgtgttgcggattacctgggttggtgtcacgggtgccactgcctaccgacttgcatggggtcggtcggagggaggcccgatgcgccatcaaattctgcctggaaatactgactcggcggagattcggggtctggaagggggtgtgtcctactcggtgagagttaccgcactcgtcggcgatcgtgaaggtactcctgtgtcgattgtggtgactactcctccagaggcaccacctgcactgggaaccctgcacgtggtgcaaagaggagaacattcgctcaggctccgctgggagcccgtgcccagagcgcaaggatttcttctgcattggcagccagaaggaggacaggaacaatcaagagtgcttggacctgaattgtcctcgtaccacctggacggcctcgagccagcgacccaatacagagtcaggctctcggtgcttggacctgcaggggagggcccctcagccgaggtgacggccaggacggaatcgccacgtgttccgtcaatcgaattgagagtcgtggatacctccatcgattccgtgacgcttgcctggacgcctgtgtcgagagcgagctcctatatcctctcgtggcgccctctgaggggcccaggacaagaagtgccggggagccctcagactctcccaggcatctcgtcctcccaaagagtgactggactcgaaccaggtgtgtcatacatctttagccttacccccgtcctggatggagtcagaggacctgaagcctccgtgactcagaccccggtctgtccaagaggcctggcagatgtggtgtttctcccgcatgcaacccaagataatgcgcatagagccgaagcaaccagacgggtccttgaacgccttgtgcttgctcttggacctctggggcctcaggcagtccaggtcggactcttgagctactcccacaggccctcgcctcttttcccccttaatggcagccatgatctgggaattatccttcagagaattagagatatgccttacatggatccatcaggaaacaaccttggaaccgcggtggtgacggcacatcggtacatgcttgcaccagatgcacccggccgtcggcagcatgtgcctggagtgatggtgctgttggtggatgaacctctccggggcgatatcttcagccccattagagaagcacaggcgtcgggacttaacgtcgtgatgctgggtatggcaggagcagaccctgagcagctgcgcagacttgcgcctggaatggacagcgtgcaaaccttttttgcagtcgatgatggaccaagccttgatcaggcagtgagcggtctggcaactgcgctgtgtcaagcatcattcactactcaacctaggccagaaccatgcccagtgtattgtcctaaaggtcagaaaggagagccaggagaaatgggcctgcgcgggcaggtggggcctccaggggatcctggcctgccaggacgaactggagcgcctggaccgcaaggtcctcctgggtcggcaacggcaaagggtgaacggggttttccgggcgcagatggccggcctgggtcgccaggacgagcagggaatccagggacccctggagcgccaggacttaaaggctcgcccggtctgccagggccccggggcgacccaggtgaaaggggaccccgcggtcctaagggagagccaggggcccctggacaggttatcgggggagagggacccgggctccctggacggaagggcgatcctggaccatcaggacctcctgggccgcgcggacctctgggagatccaggaccacggggaccacccggtttgccaggaactgccatgaagggtgataagggggatagaggcgaacgtggacccccaggacctggcgaaggtggtattgccccaggagagccaggccttcctgggcttcctggttcgcctggcccccagggacccgtggggcctccgggaaaaaagggagaaaaaggagactccgaagatggagcccctggactcccggggcagcccggcagtccgggggagcaaggaccgaggggccctccaggagcgataggaccgaagggcgacaggggatttcccggcccacttggtgaggcaggagaaaagggcgaacggggcccaccaggacccgcggggtcgagaggactgccaggagtggcaggtcgtccaggagcaaaggggccagaaggtcctcctggacctaccggccggcaaggtgaaaaaggtgaacccggacggcctggcgatccagccgtggtgggacccgcagtggcaggacccaagggagagaagggagacgtcggtcctgcaggaccaaggggcgccaccggagtccagggcgagcgcggacctcctggactggtgctgccaggagatccaggtccaaagggagatcccggagatagaggaccaattggactcaccggaagagctgggccccccggagactccgggcctccaggcgaaaagggcgatcctggtagacctgggccacccggtcccgtgggcccgcgtggtagagatggtgaagttggagagaagggagatgagggccctccaggagatccaggcctcccgggaaaggccggcgagagggggctccgcggtgccccaggagttcgcggacctgtgggtgagaagggagatcaaggggacccaggcgaggacggacgcaatggttcgccaggttcctcgggtcctaagggtgatcgaggcgaacccggtccaccaggtccgcccggacgtctcgtggataccggccctggagcccgggaaaagggagaaccaggcgatagaggacaggaaggacctcggggaccaaagggcgacccaggcctccccggagcgcctggtgaacgcggaattgaaggattccgaggtccccccggacctcagggagatccaggtgttcgaggccctgctggggaaaaaggagatagagggccaccaggcctggatggtaggtccggccttgatggaaaaccaggagctgcaggtccttccggtcccaacggcgccgcgggcaaggcaggcgatcctggccgcgacggtctgccagggctccggggagaacagggacttcctgggcccagcggaccccccggcctgccaggtaagcctggtgaagatggaaagccagggctcaacgggaagaacggagaacctggtgatcccggtgaagatggacgaaagggagaaaagggtgattcaggagcaagcggcagggagggccgtgatggtccaaagggagagcgcggcgccccaggaattcttgggccccagggcccgcccgggctgccagggccagtcggccccccaggacaaggctttcctggagtccctggagggaccgggccaaaaggggatcggggagaaaccggtagcaagggggaacaaggtttgcccggtgaaagaggtcttagaggagagccggggtccgtgccgaatgtggacagactcctcgaaaccgcaggaattaaggcaagcgcacttcgagaaatcgtagaaacttgggatgaatcttcgggaagtttcctgccggtcccggaacgccggcgcggtcctaagggggatagcggcgaacagggacctcctggaaaggagggccccataggtttccccggagaacgcggactgaaaggcgatcgcggggatcctggaccccaaggtcctcccggactggcactgggcgaacggggccctccgggtcccagcggactggcaggtgaaccagggaagcctggtatcccaggccttccaggacgcgcaggtggagtgggagaggcaggcaggccaggggaacggggggagcggggagaaaaaggtgagcgtggggaacaaggccgggacggacctcctggactgccaggcaccccaggaccgccgggtcctcctgggccaaaggtgtcagtggacgagccaggtcccggtctgtcgggtgagcagggtccaccgggactgaagggtgctaagggagaacctggatcaaacggtgaccaaggacccaagggagatcggggagtgcctgggattaaaggcgaccggggagaacctggaccacgcgggcaggatgggaacccaggtttgcctggggaaagaggcatggccggtccagaaggtaagcctggactccaaggaccccgaggaccacctggccctgtcggggggcatggtgaccccggaccgcctggtgctcccggtcttgccggccctgcaggtccacaaggaccttcaggactgaagggagagccgggcgagactggtcctcccggccggggtcttaccggtccaaccggagcagtgggacttcccggtccgccgggaccttcgggactggtcggcccgcaaggttcccctggacttccgggtcaagtgggagaaaccgggaagccaggcgcacccggcagagatggcgcatcgggaaaggatggagacagggggtcgcccggagtcccaggatcacctggcctgcccggccctgtgggaccaaaaggagaaccaggtccaaccggagcccccggtcaggccgtggttggcctgcccggagcaaaaggtgaaaagggcgcacctggaggactggctggggacttggttggcgaacctggcgcgaagggtgatagaggtctgcctgggccgcgaggcgaaaagggcgaggcgggacgggcaggagaaccgggagatcccggtgaagatggtcaaaagggtgccccagggcctaagggttttaagggtgacccgggtgtgggcgtgcctggctcgccagggcctcctggacctcctggagtgaagggcgacctcggacttcccgggctgccaggagcccccggtgtggtgggattccccggtcaaactgggcctcgcggagagatgggtcagcccggcccatccggtgagcgcggtcttgcaggacctccaggcagagaaggaattccggggccactgggacctcctggaccgccaggatccgtgggcccccctggggcatcgggacttaaaggggacaagggcgacccgggagtggggttgccaggtccacgtggtgaacgaggagaaccaggtattagaggggaggacggaaggccaggtcaagaaggacccagagggctgactggtcctccggggtccaggggggaacgaggagagaaaggagatgtgggttcggcaggtcttaagggtgataagggagattccgcggtgattctgggaccccctggaccacggggggccaagggagacatgggtgaacgtggtcctagaggactggacggagataaagggcctcgcggagacaacggtgatcctggcgacaagggctcgaagggagaaccaggtgataaaggctcagcagggctccctggccttcgaggtttgttgggaccacaaggtcagcctggagcagccggcattcctggtgatcccggaagcccgggaaaggatggtgtccctggaatccgaggtgaaaagggagatgtgggcttcatgggtcccagaggactgaagggtgaacgcggggtgaagggagcgtgcgggctggatggagagaaaggagacaaaggtgaagcaggtcctcccgggcgcccaggattggcaggtcataagggggaaatgggcgaacctggtgtgcccggccagtcgggcgcccctggtaaggaggggctgattggacctaagggcgaccggggtttcgacggccagcccggacccaagggagatcagggtgagaaaggagaacggggtaccccaggtatcgggggctttcccggccctagcggcaacgatggtagcgcaggccctcctggtccccctggctccgtgggtccacgtggacccgaaggactgcaaggccaaaagggggagagaggccctccgggggagagagtggtcggagcacctggtgtgcccggagcacctggagaacggggggagcaaggaaggccagggcctgcaggaccccggggtgaaaagggagaggcagcgctcactgaagatgacattcgcggattcgtgcgacaggagatgtcacaacattgtgcatgtcagggacaattcatagcctcaggtagccggccacttcctagctatgcagccgataccgcgggttcacagctgcatgccgtccctgtacttcgggtgtcccacgcggaagaagaagaaagagttccccccgaggacgatgaatacagcgaatattcggaatactccgtcgaggagtaccaagatccagaagcgccatgggactcagatgatccgtgttcactgcctcttgatgaaggatcatgtaccgcctacactttgagatggtaccatagagcagttactggttcgaccgaggcatgccaccctttcgtgtacggtgggtgcgggggaaatgcaaatagattcggaacgcgggaagcatgtgagcggcggtgtccccctagagtggttcaatcacagggcactggaactgcgcaggac

SEQ ID NO: 9589 - DNA, 8832 bp, synthetic construct
  misc_feature 1..8832: note = source = /note="Description of Artificial Sequence: Synthetic coding sequence"
  source 1..8832: mol_type = other DNA
atgacccttcgcctgttagtcgccgcgctgtgcgccggtatccttgccgaggcaccgcgtgtccgagcgcaacaccgcgagcgagttacgtgcacccggttgtacgcagctgacattgtgtttttattggatggcagctcttccatcggtcgtagcaactttcgcgaggtacgtagcttcctggaggggttggtcctgcctttttcgggtgcagcgagcgcccagggcgtgcgcttcgctaccgtccaatacagcgacgacccgcgcactgagtttggcctggacgccctgggctcaggcggtgatgtgattcgcgcgatccgcgagctctcttataaggggggcaatactcgaactggggcggccattctgcatgtggccgaccatgtgttcttgcctcagctggcgcgcccgggcgtgcctaaagtctgcattcttatcaccgatggtaaaagtcaggacctggtcgatactgcggcccagaggctgaagggtcagggcgtgaaattgtttgcagtggggattaagaatgcggacccggaggaacttaagcgcgtggccagccaacctacgagcgactttttctttttcgtcaatgacttcagcattctgcgtactcttctgcctctggtgtcacgcagggtctgcaccaccgcagggggcgtgcccgttacccgtccacctgatgatagcaccagcgctcctagggacctggtccttagtgaacctagcagtcagagtctgcgagtgcagtggaccgccgctagcggccccgtgaccggctacaaggtgcagtacacgccgctgacgggcctggggcagccactgccaagcgagagacaagaggtgaatgttccggccggggagacgagcgttaggcttcgtggcctgcgcccgttgacggagtatcaggtgactgtgattgccctgtatgccaattccatcggcgaagcggtgagcggcactgctcgcacgactgctctggagggcccagagctcaccattcagaacaccaccgcgcactccctgctcgtggcatggcgctctgtgccgggcgccactggttatcgcgttacttggcgggtactgtccggaggcccaacccagcagcaggagctcggtccgggtcagggtagcgttttgttacgcgacctggagcccggcaccgattacgaggtcaccgtttctacactcttcgggcggagcgttggtccggccacctcgctcatggcacgcacagacgccagcgttgaacagaccctcaggccggtcatcctgggcccaacctctattctgctgagctggaatctggttccagaagcgcgcggttatcgcctggaatggcgccgagagactggtctggagccgcctcagaaggtggtgctgccctctgacgtcacccggtatcaactggatggtctgcagccaggtaccgagtatcgactgaccctgtacaccctgctggaaggtcacgaagttgcaacccctgcgactgttgtgcctacggggccggaactgccggtcagccccgtgacggatctgcaggccaccgaactgccgggccagagggtgcgtgtgagctggagccctgtaccaggtgcgacccagtacaggattattgtgcgttccacacagggcgtggagaggaccctggtgctgccggggagccagacggcgttcgacctggacgacgttcaagcgggattgtcttatacggtccgtgttagcgctcgggtgggcccgcgcgagggttcagccagcgttctgaccgtaaggcgggagcctgagacccctttggccgttccagggctgcgggtggtagtgagcgatgcgacccgagtcagggtagcttggggcccggtgcctggcgcgtcgggcttccgcatttcatggtcaaccggttctggaccggagagcagccagaccctcccacctgattccactgccacggacattacgggtctgcagccgggcactacttatcaggttgcggtgtcagtgctgcgaggtagagaagagggccctgccgctgttattgtggcacgcacagacccgcttggcccggtgcgtaccgtccatgtgacccaagcatccagcagcagcgtgaccataacttggactcgtgtcccgggtgcaactggctaccgcgtgtcatggcacagcgcacacggacccgagaagtcacagctggttagcggagaggcaaccgtcgcagaattggatggactggaacctgatacggaatataccgtgcatgtgcgggctcacgtggccggggttgacggtccaccggcgagcgttgtggttcgtacagctccagagccggttgggagggtgtcccgcctgcaaattctgaatgcatcttccgacgtgctgcgcattacctgggtcggtgtgacaggtgcaactgcatatcgcttggcatggggtcgcagcgagggtggtcctatgcggcaccaaattctgcctggaaacaccgatagcgcagagattcgcggcctggaaggtggtgtgagctactcagtgcgcgtgaccgcattggtgggcgatagagagggaaccccagttagcatcgtcgttacaacccccccggaggcgcctcctgcgctaggtaccctgcacgtggtccaacggggagaacacagcctgaggctgcgttgggagccggtgccacgcgcccagggcttcctccttcactggcaaccagaaggtgggcaggagcaaagccgcgttctgggcccagagctgagctcctatcatttggatggtctggaacctgctacgcagtaccgcgtgcgcctgagcgtgcttggtccagccggagaggggccatccgcagaagtaaccgcgcgaaccgagtccccgcgtgtccctagcattgagctccgtgtggtcgatacatctattgacagcgtgaccttggcatggacgcccgttagccgagctagctcttacattttgagctggcgcccgctgcggggcccaggtcaagaggtgccggggtcaccacagaccctgccgggaatcagctctagccaacgtgtgacgggtctggagccgggtgtcagctacatctttagcctgaccccggtcctagatggcgtacgcggaccggaggcaagcgttacccaaacccctgtttgtccgcgaggcctggcagacgtagtttttctcccacacgctacgcaggataatgcgcaccgcgcggaagcgacccgccgagtcctggagcgtctggtgctagcgctggggcctctgggcccacaggcggtgcaagtgggtctgctgagctatagccatcgcccctcaccgctgttcccactaaatggtagccacgatctgggtattattttgcaacgcatccgcgatatgccgtatatggatccgagcggcaataatctgggaaccgccgtggtgaccgctcaccggtatatgttggctccggacgcgccaggtcgacgccagcatgttccgggcgtgatggtgctgcttgttgacgaaccgctgcgaggagacattttttccccgatcagggaagcacaggcttcaggcctgaacgtcgtcatgttgggtatggctggagcggaccccgaacaactccgtcgcttggcaccgggtatggacagcgttcagacgttcttcgcggtggacgatggacctagcctggaccaggctgttagcggccttgcgaccgctttgtgtcaggccagcttcactacccaaccacgaccggaaccttgcccggtctactgtccaaagggtcagaagggtgagccgggcgagatgggtctgcgcgggcaggttgggccgccgggggatccgggtctgccgggtcgcaccggcgcccccggtccgcaaggcccaccgggaagcgccaccgccaaaggtgagcgcggcttcccgggcgccgacgggcgcccaggcagccctggccgcgctggtaatccaggtactcctggtgctcctggcctgaaaggcagccccggcctgcctggccctcgaggagacccgggtgaacgcggtccgcgtgggccaaaaggggaaccgggagcccctgggcaagtcatcggcggcgagggaccgggtctgccgggccgcaagggcgaccccgggcccagcggaccgccaggtcctagaggccctctcggtgacccaggccctcgcggcccgccaggtctgcctgggaccgccatgaaaggtgacaagggcgaccgtggagaacgcgggccgcctggtccaggcgaaggtggcatcgccccgggtgagccagggctgccaggcctccccggtagtcctggcccacagggtccagtaggcccccctggaaagaaaggcgagaagggcgactctgaggacggcgctcccggtctgcccggccaaccgggcagcccaggggaacaggggccaaggggtcctccaggcgcaataggaccgaagggagatcgcggtttccccggcccactgggcgaagctggagagaagggcgaaaggggtccaccaggaccagcgggatctcgcgggctcccgggcgttgcagggcgccctggggccaaagggcctgagggcccaccgggtccaaccggacgccagggcgagaagggagaaccaggccgccctggggaccctgcagtggtgggtcccgcggtggcaggacctaagggcgaaaagggtgacgtggggcctgcgggccctcgcggggcaaccggggtgcaaggtgaacgcggcccaccgggtctggtcctgcccggcgacccgggaccaaaaggtgatccgggtgatagaggacctatcggactcaccgggcgggccggtccaccaggagattcaggccccccgggtgagaaaggtgacccgggtcggccgggtccacccggtccagttggtccgcgtggccgtgacggtgaggttggtgaaaagggggatgaaggtccaccgggtgaccctggtctcccgggtaaagccggcgaaagaggtctgcgtggcgcaccgggcgtccgcggtcctgttggtgagaaaggcgaccaaggagatcctggcgaggacggtagaaatggtagccctggtagttccggccccaaaggggatcgcggggagccagggcctccgggtcccccgggacgcctggttgacacgggcccaggtgcccgagagaaaggtgagccaggggaccgcggccaggaaggtccacgaggcccaaagggtgatcctggtttgccgggtgcacctggcgaacgcgggatcgagggttttcgcggcccgccgggtcctcaaggcgacccaggcgttcgcggcccagcgggtgagaagggtgatcgcggcccaccaggtctggacggccgctctggcctggatggtaagcccggcgcggcgggcccaagcggtccgaatggcgcagcaggcaaagcaggggacccgggccgtgacggcctgccgggattaaggggcgagcaaggcctgcctggtccctctggtccaccaggactgccagggaagccgggcgaagatgggaaaccaggcctgaatggcaaaaatggcgagcccggtgatcctggcgaagacggtcgaaagggggagaagggcgattccggggcaagtggccgtgaagggcgtgacggccctaagggtgagcgcggcgcgccaggtatcttgggccctcagggtcccccgggtctgccgggtccagtcggtccccctggccaaggctttcccggtgttcctggtgggaccggtccaaagggagaccgcggtgagaccggttcgaagggcgaacagggcttgccaggggaacgcggcttgcgtggcgagccgggtagcgtcccaaacgtggataggctgctggaaacagcaggtatcaaggcgagcgcactccgcgagattgtggagacttgggacgagtcttctggtagcttcctgccagtgccagaacggcgccgaggcccaaagggtgacagcggcgagcagggaccaccgggaaaagagggtccgataggttttccaggtgaacgcggtctgaaaggtgaccgtggtgacccagggccacagggtccaccaggcctagccctcggggagagaggcccaccgggcccaagcgggctcgccggtgagccaggtaagcctggcatccctggtctcccaggccgtgccggcggcgtgggtgaggctggccgcccaggtgaaaggggcgagagaggggaaaagggcgaaagaggtgagcaaggcagagatgggcctcctggtttaccgggtacacctggcccgccgggtcctcctggtcctaaagtgtccgtggatgagccagggcctggactgagcggggagcagggaccccctggcctgaaaggtgctaaaggtgaaccgggcagcaatggcgatcaaggaccgaaaggtgaccggggagtcccaggaatcaaaggtgacaggggtgaaccgggcccgcgcggtcaggacggtaacccaggtctgccaggagagcgcggcatggctggcccggagggcaaaccaggactgcagggtccgcgtgggcctccgggcccggtgggtggtcacggtgatccgggcccccctggagctccggggctggcgggcccagcgggccctcaagggccgtctggcctgaagggtgagccgggagagaccgggccaccaggccgcgggctgaccggccccaccggtgcggtgggtttgccaggacctccaggcccaagtggtctggtcggtccacaaggtagtccaggcctccccggccaggtgggtgagacgggcaaacctggtgcgcccggtagagacggagcttccggtaaagatggcgacaggggctctcctggggtgcccggctcaccagggctgccgggtccagttggtccgaaaggagaacctggtccgactggagcaccaggccaggcggtggtcggtttaccgggagcgaagggcgaaaaaggtgcaccaggcggcctggcaggcgacctggttggtgaaccaggtgccaaaggggacagaggcctgcccgggccgcgaggggaaaagggtgaggcgggcagggccggtgagccgggggatcctggagaagatggtcagaaaggcgcccctggtccaaaaggatttaagggggatccgggtgtgggcgtcccaggcagccctggccctccgggtccgcctggagtcaaaggagatctgggtctgccgggcctcccaggcgcccctggagttgtgggctttccgggccagactggccctcgtggcgagatgggccagccgggcccatcaggcgaacgcggactagcaggccctccaggtcgtgagggcatcccaggaccactgggcccaccaggacctcccggttcagtgggaccaccaggtgcatccggactaaagggcgacaaaggtgatccaggagtggggctgccaggcccgcggggcgagcgtggcgagccgggcatccgcggtgaagacggtcgaccgggccaggagggtcctcggggtctgactggtcccccaggtagccgcggcgaacgcggagagaagggtgacgtaggcagtgccggcctcaaaggtgataaaggagacagtgccgtgattctgggaccgcctggtccgagaggcgcgaagggtgacatgggtgaacgcggcccacgtggacttgacggcgataagggtccacggggcgacaatggtgaccctggtgataagggaagcaagggtgaacctggagacaagggtagcgctggtcttccgggcctgagaggtctgctgggtccgcaaggccagccgggagcagcggggatcccaggcgaccctggctccccgggaaaggatggcgtgccgggtatacggggcgagaaaggagacgtgggatttatgggccccagaggtctgaagggcgaacgcggcgtgaagggtgcgtgcgggcttgatggtgagaaaggtgacaaaggcgaagccggcccaccgggccgtccgggtttggctgggcacaaaggcgaaatgggtgaaccgggcgtccctggtcagtcaggagcaccaggtaaagagggtctcattgggccgaagggtgatcgcggttttgacggtcagcctgggcctaaaggcgatcaaggcgagaaaggtgagcgcggcaccccggggatcggtggctttcctggtccgagtgggaacgatggcagcgctgggcctccaggtccacctggtagcgttggtccccgcggcccagaaggtctgcagggccagaaaggtgagcgcggccctccgggcgagcgcgtggtgggcgccccaggggttccaggtgcgccgggcgagcgcggtgaacagggacgcccaggcccagctggcccacgcggcgaaaagggcgaagcagcgctgaccgaagatgatatccggggttttgtgcggcaagagatgagccaacattgtgcgtgccagggccagttcatcgcaagcgggtcacgccctctgccatcctacgcggcggatacggcagggtcgcagctgcacgcagtgccagtcctgagggtgtcacacgccgaggaggaggaacgggtcccaccagaagatgatgaatactcggagtatagcgagtacagcgtcgaagagtaccaggatccggaggcgccatgggacagcgacgatccttgcagcctgccattggacgagggcagctgcaccgcgtacactctgcgatggtaccaccgagcagtgacgggcagcacggaagcatgccacccttttgtctacggtggctgtggcggcaacgcaaaccggttcggtactcgcgaagcttgcgaacgccgctgcccacccagagttgtgcagtctcaggggaccggaaccgcccaggat

SEQ ID NO: 9590 - DNA, 8832 bp, synthetic construct
  misc_feature 1..8832: note = source = /note="Description of Artificial Sequence: Synthetic coding sequence"
  source 1..8832: mol_type = other DNA
atgactctgcgcctcttggtggctgccctgtgcgcaggaatcttggccgaagctccgcgcgtgcgggcccaacacagggaacgggtgacctgtacccgcctgtacgccgcagacatcgtctttctgttggacggttcgagctcgatcggaagatcgaacttccgcgaagtgcgctcgtttcttgaggggctggtgctcccattctcgggagctgcctccgcccaaggagtgcgctttgccaccgtccaatattcggacgacccgcgaactgagttcggattggacgcactcggaagtggaggcgacgttattcgcgcgatccgcgagctcagctataaggggggcaatacccgcaccggcgccgctattctgcatgtggccgaccacgtgtttctgccgcaactggcacgacctggcgttccgaaggtgtgtatcctgattaccgacggaaagagccaggatctggtcgataccgccgcgcaaagactgaagggacagggtgtcaagctgttcgccgtgggaatcaagaacgccgacccagaagaattgaaacgggtggcttcccagccgacgtccgacttctttttctttgtgaacgatttctccatactgagaacgctcctgccgctcgtctcacggcgcgtgtgtactacggcgggaggagtcccggtcacccggccgccggacgactcaacttcagcaccgcgcgatctcgtcctgtccgaaccatcgtcgcagagcttgcgggtccagtggactgcggcgtccggaccggtgactggctacaaggtccaatacacccctctcaccggactcgggcaacctctgccgtcggaaagacaggaggtgaatgtgccggcaggagagacttccgtgcggcttaggggtctgcggccgctgaccgaataccaggtgactgtgatcgcgctgtacgccaatagcatcggagaagcggtgagcggaactgctcgcactaccgccctggaaggccccgagctgactatccaaaatactaccgctcatagcctgctcgtggcatggcgctccgtgccaggcgcaaccgggtaccgcgtgacctggcgcgtgctttctggaggacctactcagcagcaagagctgggccctggacagggatccgtgctgctccgggatctcgagccgggtactgactatgaagtgaccgtgtccactctcttcggtagatcagtgggaccggccacctccctcatggcgcggaccgacgcaagcgtggaacagaccctgaggccagtcatactcggcccaacttcgatcctgctgtcctggaatctcgtgccagaggcccgcggatacaggctggagtggagacgcgagactggtcttgaacctcctcagaaggtggtactgccatcagatgtcacccgctaccagctggacggactccaaccgggcaccgaataccgcctgacgctgtacacccttctggagggccacgaggtggcgactcccgcaacggtggtccctactggaccggaactgccggtcagcccggtgaccgaccttcaggccactgaactcccgggccaacgtgtgcgcgtgtcatggtccccggtgccgggagccactcaataccgcatcatcgtgcggtccacgcaaggagtcgaacggaccctggttctgcctggaagccaaactgcctttgacttggacgacgtccaggccggtctgtcatacactgtcagagtatcggcccgcgtgggaccgcgcgagggatcagctagcgtgcttactgtccgcagagaaccagaaacgccactcgccgtgccaggattgcgggtggtcgtctctgacgcaaccagagtccgggtggcttggggaccagtgcccggagcatcgggattcaggatcagttggtcgaccgggtctggacctgaatcgtcccagactttgccaccagattcgactgcgaccgacatcaccggccttcagccaggaaccacctaccaggtggcagtctctgtgctccgcggccgtgaagagggcccggcagccgtcattgtggcccggaccgaccctctggggccggtccgcaccgtccacgttacccaggcttcctccagctccgttactatcacctggacgcgggtccctggtgccaccggttaccgcgtcagctggcattcggcgcacggacctgagaagtcccagctggtgtcaggggaagccaccgtggccgagctggatggcctggaaccagacaccgaatacactgtgcatgttagggcacatgtggccggagtggacggaccgccggcgtcggtggtcgttagaaccgccccggaaccggtaggaagggtatcgagactgcagatccttaacgctagctcagatgtccttcggatcacgtgggtcggagtgacgggagctacggcctacagactcgcgtggggcagatcggaaggtgggccgatgcggcaccagatcctgcctggcaacactgatagtgccgagatccggggtctggagggtggtgtgtcctactcagtccgggtgactgcgctggtgggagacagagaaggaaccccagtctcaatcgtggtgactactcctccggaggcgccaccagctctgggaaccctgcatgttgtgcaacgcggggaacactcgctccgactgcggtgggagcctgtccctcgggctcagggatttcttttgcactggcaacctgagggcggacaggagcagtcgcgggtcctcggacctgaactgagctcgtaccacctggacggcctcgaaccggccacccaataccgagtgcgcctttcggtgctcggtccggcgggagaaggaccgtccgcagaggtgactgccaggacggaatccccgcgggtgccgtccatcgagctgcgcgtggtggacacttcgatcgactccgtgactctggcctggaccccagtctcgcgcgcctcatcctacatcctctcctggcgtcctctgcgcggccccggtcaggaggtgccgggaagcccccaaactctgccgggaatttcgtcaagtcagcgcgttactgggctcgaacctggtgtcagttacattttctccctcacgccggttctggatggggtgcgcgggcccgaagccagcgtcacccagacccccgtgtgcccgcggggactggccgacgtcgtgttcctcccgcatgccacccaagacaacgcgcacagagcggaggccacccgccgcgtcctggaacggctggtgttggcgctggggccgctcggaccgcaagccgtgcaggtcgggttgctgtcctactcgcaccgcccctccccgctcttcccgctcaacggatcccacgacctgggcattattctgcagcgcatccgcgacatgccgtacatggacccgagcggcaacaacctcggtactgcagtggtgactgctcatagatacatgctggccccggatgctcctggacgacgacagcatgtgccgggagtcatggtgttgctggtggacgagccgctgagaggagacatcttctcaccgatcagagaagcgcaagcctcgggactgaatgtggtgatgctcgggatggccggagccgacccagagcagctcagacggctggcgcccggcatggactccgttcagactttctttgccgtggacgacggaccatcactcgaccaggccgtgtcaggcctggctaccgctctttgccaagcgtcgttcaccacccagccgcggccggagccgtgccctgtctactgcccgaagggacagaaaggagaaccaggagagatgggacttagaggacaagtgggcccgccgggtgaccccggacttcctggaagaactggagcgccggggccacagggcccgccaggcagcgcgaccgctaaaggcgaacgcggattcccaggagcagatggaaggcctgggagcccaggcagagcaggaaatccgggaaccccgggcgcacccgggctcaagggctcgcctggactgccaggcccaagaggggaccctggagaaagggggcctcgcggcccaaagggagaacctggggcccctggacaggtgatcggaggagaaggtcctggactcccaggcaggaagggagatccaggaccgagcggtcccccgggcccacgcggaccgctgggtgaccctggacccaggggcccgcctgggttgccgggaactgctatgaaaggagataagggggaccggggagaacgcggaccgccggggcctggagaaggaggcatcgccccgggcgaacccggacttccaggactcccgggttctccgggaccgcaagggccggtcggaccccctgggaagaaaggcgaaaagggtgactctgaggatggtgcgccgggcttgcctggacagccaggatctcctggtgaacaaggaccgcgtggaccacctggagccatcggccctaagggcgaccgcgggttcccaggacccctgggggaagctggcgagaaaggagagcgcggtccccccggccccgctggatcgagaggcttgccgggcgtcgcgggtagaccgggcgcgaagggaccggagggacctccaggccctactggtagacaaggagagaagggcgagcctggtagacctggcgacccagcagtggtgggtcccgccgtcgccggtccgaagggagagaagggggacgtcggaccggcgggaccgcggggcgctactggggtgcagggcgaacggggcccacccggtcttgtccttccaggcgatccggggccgaagggggacccaggtgaccgggggccaatcggcctgactggccgggctggcccgcccggagacagcggaccgcctggggagaagggcgatccgggcagaccgggaccacccggaccagtgggacctcgcggccgggatggcgaagtgggagaaaaaggcgacgaaggtccaccaggtgatccgggcctccctggaaaggccggagaacgcgggctgagaggcgcacccggagttcgcggcccagtgggcgaaaagggagatcaaggtgacccaggagaggacggacgaaacggaagcccgggctcttcaggtcccaagggtgatcggggggagcctggaccccctggaccgcccggtcgcctggtggatactggcccaggagcgcgggaaaaaggtgagccgggcgaccggggccaggaaggacccagggggcctaagggtgacccgggtctgccgggcgcccctggtgaacgaggtatcgagggattcaggggaccgccgggacctcaaggagatccgggtgtgcgcggacccgcaggggaaaaaggagatcgcggtccaccaggactggatggtagatcgggactcgacggcaagccgggcgccgcgggaccgtcgggaccgaacggtgccgccggaaaggctggagatcctgggcgagatgggctgcccgggctccgaggtgagcaaggtctgcctgggccatcgggacctccggggctgccggggaaaccgggcgaagatggcaagccaggacttaacggaaagaatggagaaccgggagatccgggagaagatggacgcaaaggagaaaagggcgattcgggagcgtcaggacgggagggccgcgacgggccaaaaggagagaggggtgccccggggatcctgggaccccaaggccctccagggctcccggggccggtgggacccccaggacagggattcccgggtgtgccaggagggacgggtccaaagggggatcgcggagaaactggctccaagggagagcagggtctgcccggggagaggggactgcgcggcgaaccgggaagcgtgccaaatgtggatcgcctgctggaaaccgccggaatcaaggcttcagccctgcgggagatcgtcgaaacctgggacgaatcatccggatcattcctccccgtgccggagcgcagacggggaccgaagggagacagcggcgagcaagggcctccggggaaggaaggaccgatcggtttcccaggcgagcgcggattgaagggcgataggggcgacccggggcctcaaggacctccaggactcgcccttggagaacgggggccccccggcccttccggactcgccggtgagcccggaaagcccggaatccctggcctgcctggaagagccggaggagttggagaagctggacggcccggggagcgtggagagaggggggagaagggtgagagaggggaacagggcagagacgggccccctggattgcctgggacccccggaccaccgggtcccccaggccctaaagtgagcgtggacgaaccgggtccgggactgtcgggcgaacagggcccacctggactcaagggcgctaagggtgaaccaggcagcaatggagatcagggaccaaagggtgatagaggggtgccggggattaaaggagacagaggtgaacctggccctcgggggcaagacggaaacccggggttgccaggagaacggggcatggctggaccagagggaaagccaggtctgcagggtcctcggggtcctccgggccctgtcggaggacatggggatccaggtccgcctggtgccccaggcctggcgggaccagcaggcccccaaggaccatcgggactgaagggtgaaccgggtgaaactggccctccggggagaggactgaccgggccgaccggcgcggtgggacttccgggtccaccgggcccctctggcttggtggggcctcaggggtcgccggggctgcccggccaagtgggggagactgggaagcccggagccccgggacgggacggggcgtcgggaaaagatggcgacaggggatcgcccggggtcccgggtagccccggcctcccaggaccagtggggccaaaaggcgaacctggcccaacgggagcgccaggacaggcagtggttggactgcctggggccaaaggggagaagggggccccgggagggctggcgggagatttggtaggcgaaccaggtgccaagggagatcgcggacttcccggcccacgaggtgaaaagggagaggcgggacgagcaggagagcccggagatcccggggaggatggacagaaaggcgctccgggacctaaaggtttcaaaggcgaccctggcgtaggagtccctggttccccaggaccgccgggtccgcccggggtgaagggggatctggggcttcctggtctgcctggcgcaccgggggtggtcggttttcccggacagacgggaccgagaggcgaaatgggccagccggggccatccggagagcgtggactcgcagggccgccgggtcgcgaaggaatcccgggaccgctgggaccgccaggaccaccgggctcagtgggcccaccgggagcatcaggcttgaagggagacaaaggcgatccaggcgtcggcctgccgggcccgagaggggaacgtggggagccaggaatccgcggggaggacggcagaccgggtcaggagggcccgcgcggattgaccggacccccggggagccgcggcgaaagaggagagaaaggagacgtgggttccgcgggcctgaaaggggacaagggtgactcggccgttatcctcggtccaccgggtccaaggggagcaaagggagacatgggagagcgaggaccacggggtctggacggggataagggtcccagaggcgataacggggaccctggtgataagggatcaaagggggaaccgggcgacaaaggaagcgcgggactgccggggctgcgtggtctgctgggtccacaaggccagcccggggcggccgggatccctggtgacccaggtagccccggaaaggatggcgtcccggggatccgaggcgagaagggagacgtcggcttcatgggtccgcgtggcctcaaaggtgagcggggcgtgaagggagcatgcggactcgacggtgaaaagggcgacaagggggaagccgggcctccaggacggcctggcctcgctggacacaagggtgagatgggcgagccgggcgtgccaggacaatcaggggcgccgggcaaagagggactcatcggcccaaaaggcgatcgggggttcgatgggcagccgggaccgaaaggtgatcagggggaaaagggtgaacgcgggactccgggtattggaggatttcccggcccatccggcaacgatggttcagcaggcccaccaggcccgccggggtccgtgggacctcggggaccagaaggactgcagggccagaagggagaaagaggacccccgggcgagcgggtggtcggagcacctggtgttccaggagccccaggagaacgaggtgagcagggtagacctggacctgccggccctaggggtgaaaaaggagaagcagcactcaccgaggatgacattagagggttcgtgcggcaggaaatgtcgcagcactgcgcctgccagggccagttcatcgccagcggatcgcggccgttgccgagctacgcagctgacaccgctggctcgcagctgcacgcggtgccagtgctccgggtgtcccatgctgaggaagaagaacgggtgcctccagaggatgacgaatattctgagtactccgaatacagcgtggaagagtaccaggatcccgaggcgccatgggattcagacgacccatgctctctcccactcgacgaaggatcctgcaccgcctacacgctgcggtggtaccacagggcggtcaccgggagcactgaggcatgtcaccccttcgtgtacggaggatgtgggggaaacgccaaccggttcggaacgcgggaggcatgcgaaagaagatgcccgcccagagtcgtccagtcccaaggaaccgggactgcgcaggat

SEQ ID NO: 9591 - DNA, 8832 bp, synthetic construct
  misc_feature 1..8832: note = source = /note="Description of Artificial Sequence: Synthetic coding sequence"
  source 1..8832: mol_type = other DNA
atgacgctgaggctcctggtggctgccctctgcgccggcattctggccgaagcgccgcgcgtgcgcgcccagcaccgggagcgcgtcacctgcactcgcctgtacgccgcagatattgtctttctgctggacggttcctccagcatcggacggtctaactttcgcgaagtgagatcgttcctcgagggtctggtgctgccattctccggagccgcatccgcccaaggagtgcgattcgcaactgtccaatactcagacgacccgcgcactgagttcggactggacgccctgggatcgggcggagacgtgatccgggccatccgcgaactgagctacaagggaggaaacactcggactggcgcggctatcctccacgtcgcagatcatgtgtttttgccgcagctcgctagacctggagtcccaaaggtgtgcatcctgatcaccgatggaaagtcccaagatctggtggataccgcggcgcagcgcctgaagggtcagggagttaagctcttcgcggtgggaatcaagaacgcggaccctgaggagctgaagcgcgtcgcgtcgcaaccgaccagcgatttcttctttttcgtgaacgatttctcaatcctccggactttgctgccgctggtgtcccggcgggtctgcaccactgctggaggtgtgccggtgactcgaccgccggacgactcgaccagcgcgccccgggacctggtgctctcagaaccttcctcgcaaagtctgagggtgcagtggaccgccgcatcggggccggtgaccgggtacaaggtgcagtacaccccgctcactggtttgggccagcccctgccgtccgaacggcaagaagtgaacgtcccagctggagaaacctccgttagactgcgcggactccgcccactgaccgaataccaggtaaccgtgattgcgctgtacgccaacagcatcggcgaggccgtctccggcactgcgaggactaccgccctggaaggcccagaactgaccattcagaacaccactgcccacagcctcttggtcgcttggagatcggtccctggcgccactggatacagagtgacctggcgggtgctctctgggggacctactcaacaacaagaactcggaccgggccagggttccgtgctgctgcgcgacctcgaaccggggacggactacgaagttactgtctcgacccttttcggcaggagcgtgggacctgcaacgtcactgatggccagaacggatgcgtccgtggaacagaccctccggccggtcatcctgggccccacctccatcttgctcagctggaacctcgttcccgaggcacgcggatacagactggagtggaggcgggaaaccggccttgaacctccacagaaggtggtcctgccgagtgacgtgacgagatatcaactggacgggctgcagccggggaccgaataccgcctcaccctgtacactctgctggaaggacatgaagtcgcgacccctgcaactgtggtgccgactggcccagaattgcctgtaagcccagtcactgacttgcaggctaccgaactgcccggacagcgggtgcgggtcagctggtcaccggtgccaggggccacgcagtaccgcattattgtgagatccactcagggagtggaacgcactctcgtgctgcctgggtcccagactgcattcgacctcgatgacgtgcaggccggattgagctacaccgtgagagtgagcgcaagagtgggcccgcgggaaggatcggcctcggtgcttaccgtgcgtcgcgaaccagaaactccgcttgcagtccctggcctccgggtcgtcgtgtccgacgccacgagggtgcgggtggcttgggggccggtgcccggggcgagcggattccggatctcctggtcaaccgggtcgggcccggagtccagccagactctcccgccggactcgactgctactgacatcaccggactgcaaccgggaaccacctaccaggtggcggtgtcggtgctcagaggacgcgaggagggccctgctgccgtcatcgtcgcacggacggatcctctgggaccggtgaggaccgtgcacgttacccaagcctcatcatcatcggtgaccatcacctggactcgggtgcccggtgccactggctatcgggtgagctggcactccgctcatggcccggagaagtcgcagctggtcagcggagaggctacggtcgccgagctggatggcctggagccggacactgagtacaccgtgcacgtcagagcacatgtcgcaggcgtggatggaccacctgcttctgtggtggtgcggaccgctcccgagccggtcgggagagtgtcacgcctgcagatcctgaatgcttcgtccgatgtgttgaggattacctgggtgggcgtgaccggggccactgcttaccggctcgcatggggcaggtcggagggaggcccaatgaggcaccaaatcctgcctgggaataccgatagcgccgaaatccgcggtctggagggaggtgtctcgtatagcgtccgcgtcaccgcgcttgtgggagatagagagggaaccccagtgtcgatagtcgttactaccccaccggaagccccgccggcgcttggaaccctgcacgtggtccagcgcggagaacactcgctgcgcctcaggtgggagccggttccgagagcccaaggattcctgctgcattggcagcctgagggaggacaggaacagtcacgggtgctgggcccggaactgtcgtcgtaccatttggacggactggaaccggcaacccagtatagagtgcgcttgagcgtgttggggccggctggcgagggaccctcggcggaggtcacggctcgcaccgaatcccctcgagtgccgtccatcgagctccgcgtggtggacacgtccattgactcagttaccctggcgtggacccccgtctccagagcgtcgagctacatcctgtcatggcgccccctcagaggcccaggacaagaggtcccaggaagccctcaaaccctcccgggcatctcctcgagccagcgggtgaccgggctggagcctggtgtctcctacatcttctctctgactcctgtgctggacggagtgagggggccggaggcgtcggtgacccagaccccggtctgtcctaggggattggctgacgtggtgttcctcccgcacgccacgcaggacaacgcccatagagcagaggccaccaggcgcgtcctggaacggctggtgctggcactcggcccgctcggaccacaggcggtgcaagtgggacttctgtcctacagccaccggccgtcgcctctctttccgcttaacggaagtcacgacctcggaatcattctgcagcgcattagagatatgccgtacatggacccgtcaggaaacaacctcggtaccgccgtcgtgactgcgcaccggtacatgctggccccggacgcacccggacgccgccaacatgtgcccggagtcatggtcctgttggtggacgaacctctgcgcggagacatcttctccccgatccgcgaggcccaagcgtccggcctgaatgtggtgatgctgggaatggcaggcgccgatccggaacagctccggcggctggcgccgggaatggactctgtgcagactttcttcgccgtcgacgatggaccgtcgctcgaccaggcggtgtccggactcgcaactgctctctgccaggcatccttcaccacccagccgcggccggaaccatgtccggtgtactgccccaaggggcaaaagggagaacccggagagatgggccttcgcggacaagttggtcctccaggggatccgggcctgcctggaagaactggagcccctggacctcaggggccgccgggatcagcgaccgcaaagggcgagagaggattcccgggagccgacgggcgtccgggtagtccgggccgcgccggaaatccaggaaccccgggcgcccccgggctcaagggttcgccaggactcccaggaccacgaggcgaccctggtgaacgcgggccacgcggacccaaaggcgaaccaggagccccaggacaagtgatcggaggtgaaggccctggtctgccaggccgcaagggagatcctggtccatcaggtccacctggaccccgagggccgcttggtgaccctgggccgcggggccccccaggactgcctggtacggccatgaagggtgataagggcgaccgcggagagcgggggcccccaggaccaggcgaagggggaatcgccccaggagagcccggcttgccaggcttgccgggcagcccaggaccgcagggtccagtcggtccgcccgggaagaagggggagaagggcgattcagaagatggcgctccaggactcccgggacagccgggctcccctggggagcagggtcccagaggcccaccaggggccatcgggccgaaaggcgaccgggggtttccgggtccgcttggagaagccggtgaaaaaggggaaagaggccctccaggcccggcggggagccgggggttgccaggcgtggcaggaaggcctggtgccaagggcccagagggtcctccgggaccaactggacgccagggcgaaaagggcgagcctggacggcctggtgacccagcagtggtaggaccagcggtggcggggccgaaaggagagaaaggggatgtgggccccgctggcccgagaggagcaactggagtgcaaggggaacgagggccgcctggcctggtgctgccgggggacccagggcctaagggggatccaggtgaccgggggccgatcggactcaccggtcgcgcgggacccccgggagactcaggtcccccaggtgaaaagggtgaccctggacggccgggacctccagggcctgtggggcctagggggcgggacggcgaagtgggagagaaaggcgatgaaggaccgcctggagatccagggctcccgggtaaggccggtgaacgcggactgcggggcgccccaggcgtgcgagggccagtcggggaaaaaggcgaccaaggtgaccctggtgaggacggcaggaacggctcgcctggatcttccgggccgaagggcgatcggggtgagccaggacccccgggccccccgggacgcctggttgacactggacccggagcgcgtgagaagggagaacctggcgaccgcggtcaagaagggccgcggggaccaaaaggtgatcctggtttgccaggtgcacccggagaacgcgggatcgaaggctttcgcggtccgcctggcccgcaaggggaccctggtgtgcggggaccagccggcgaaaagggggaccgtggacccccaggacttgacggacgctcgggacttgatggaaagccgggagctgcaggaccttcaggaccgaacggagcagcaggaaaggcgggtgaccccgggagagatggactgccggggctcaggggagaacaaggtctgccagggccgtcgggaccgccaggcctccccggcaagccaggcgaggacggaaagcccggactgaatggtaagaatggagaacctggagatccgggagaggacggccgcaaaggcgaaaaaggtgacagcggcgcgagcggccgagagggacgagacggaccgaagggagaacgtggcgccccggggatcctgggaccacaggggccacctgggctcccagggcccgtcgggccgcctggtcaaggctttccgggagtgccggggggtaccggtccaaagggggatagaggagaaactggatccaagggggaacaggggctgccgggagagcgtggtctgcgtggagaaccaggctcagtgccgaacgtcgaccgcctgctcgaaacggctggtatcaaagcctcagcgcttcgcgagatcgtcgaaacttgggatgagagctcaggatcatttctgccagtgccggaacggcgccgaggccccaaaggagactctggcgagcaagggccaccgggaaaagaggggccaatcggattcccaggagagcgcggactgaagggagatcggggggatccggggcctcagggacctcctggtcttgcactcggtgaacgtgggccgcccggcccatcaggacttgcgggagagccaggaaagcctggcatccccggcctgccgggccgcgcgggaggagtaggagaagcaggtagacctggtgaacggggggagcgcggcgaaaaaggagagagaggcgaacagggacgggatggaccccccggcctcccgggtacgccagggccacctggcccacccggcccgaaggtgtcggtggacgagccaggaccaggactgtcaggagaacaaggaccaccgggccttaagggagccaaaggagaaccgggatcgaatggtgaccagggaccgaagggtgaccgaggtgtcccaggcatcaagggggacagaggcgaaccgggtccgagaggacaggatggtaatcccgggcttcctggagaacgaggtatggccgggcccgagggcaagcccgggctgcaaggaccgcgcggaccacctgggccagttgggggacatggggatcctggtcctccgggcgcaccgggattggctggtcccgcaggcccgcagggaccgagcggactcaaaggcgagccaggggaaaccggaccgccggggcgcggcctcactggcccaactggagctgtgggacttccgggcccaccgggaccgtccggacttgtgggacctcaaggctcacctggcctgccggggcaagtgggggagactgggaaacccggagcgcctggacgggatggtgcaagcggaaaggacggagatcgcggctcccctggcgtgccaggaagtccaggtctgccgggaccagtcggtcctaagggtgagccgggacctacgggtgcccctggacaggctgtagtgggtttgccgggggccaaaggtgagaaaggagctccaggggggctggctggggatcttgtcggagaaccgggggcgaagggtgataggggcctccctggacctcgaggagagaagggtgaggccggtcgggccggcgaaccaggtgacccaggagaggacggacagaaaggagccccggggccgaagggattcaaaggggacccgggagtgggagtgcctggaagcccaggcccgccgggccctccgggagtcaagggagatctcggacttccgggactcccgggcgctcctggcgtggtcggatttcccggccagactggaccacgaggagaaatgggccagccaggcccctctggagagaggggcctcgccggaccaccgggacgggaaggaattccgggacctttgggaccaccggggccgcccgggtccgtgggaccacctggagcctcgggactgaagggcgataaaggagatccaggcgtgggcttgcccggaccccgcggtgaacggggcgaacccggaatcagaggcgaagatggccgaccggggcaggaggggccgagaggtctgactggaccgcccggctctcgcggcgagcggggagagaagggagacgttggatccgccggtctgaagggcgacaagggtgactccgcggtgatcctgggcccacctggcccgcgtggcgctaaaggagacatgggggagagaggacctcgtggattggatggcgataagggacccagaggagataacggcgacccgggagacaagggttcaaaaggcgaacccggggacaaaggatcggccggattgcctggcctcaggggcctgctcgggccccaagggcaaccgggggccgccggcataccgggcgacccggggagcccgggaaaagatggagttccgggaatcaggggtgaaaagggggatgtgggattcatgggaccgcggggtctgaaaggagaacgcggcgttaaaggagcctgcgggctggacggggagaagggagataagggagaagcaggcccaccgggtcggcctggactcgcgggccacaaaggagagatgggtgaacctggtgtcccagggcaatcgggagcacccggaaaggagggattgatcggcccaaagggtgaccgcggattcgatggacagccgggtccgaagggggatcaaggtgagaagggggaacgcggaactccgggaatcggaggatttccgggcccgagcggaaatgacggatcggctggacctcccggaccgccaggatcagtcgggcctcggggacctgaaggcctgcaaggccagaagggagaaaggggcccgcccggagagcgcgtggtcggtgccccaggggtaccgggcgcaccaggtgagcgcggtgaacaggggcgccccggcccggctggaccaagaggcgagaagggagaggccgccctcacggaggatgacatccgcggtttcgtgagacaggagatgagccagcactgtgcctgccagggccagttcatcgcctcgggatcgcggccgctgccgagctacgcggccgacactgctggctcccagttgcatgccgtgccggtgctgagagtgtcccatgcggaggaagaagaaagagtgccgcctgaggacgacgagtactcagaatacagcgaatactcggtcgaagaataccaggatcctgaggccccatgggactcggacgacccatgttcgctgccactggacgaaggatcatgcaccgcgtacacccttcgttggtaccaccgggcggttactggaagtaccgaggcgtgccacccgttcgtgtacggaggatgcgggggcaacgcaaatcggttcggtactcgcgaggcgtgtgagcgccggtgcccgcctagagtggtccaatcccagggaactggaactgcacaggat

SEQ ID NO: 9592 - DNA, 8832 bp, synthetic construct
  misc_feature 1..8832: note = source = /note="Description of Artificial Sequence: Synthetic coding sequence"
  source 1..8832: mol_type = other DNA
atgaccctcagacttctggtggcggcactgtgtgcgggcatactggcagaagctcccagagtgcgcgcgcaacatagagagagagttacctgtaccaggctttatgccgcagatattgtctttcttctggacggatcgtcgtcgattggcaggtcaaacttcagggaagttaggtcgttccttgaaggactggtcctcccttttagcggagcagcgtcagcacaaggtgtgcgctttgctactgttcagtattcggatgatccaagaaccgaatttggacttgatgcccttgggtccggaggtgacgtgatccgggcaattcgcgaattgtcgtacaaagggggaaacacgagaaccggagcagccatactgcacgtggcagatcacgtctttttgcctcaacttgcacgtccaggtgtgcccaaggtctgtattctcattaccgatggtaaaagccaagacctcgtggacactgctgcacagagactgaaaggccagggcgtgaaactttttgccgtcggcataaagaacgcagacccggaggagctgaagcgggtggcaagccaaccaacgagcgacttcttctttttcgtcaatgatttttcgattctccgaacccttctccctctcgtgtcgagacgggtgtgtaccactgccggcggggtgcctgtcactcgccctcctgatgattcgactagcgcaccacgtgatctcgtgctgtctgaaccttcctcacagtcgctgcgggtgcagtggactgccgcgtcgggtcccgtgactggctacaaagttcagtacactccacttactggactgggccagccactgccctcggaaagacaagaggtgaacgtgccagcaggagaaacctcagtgcgtctccgtggactgaggcctctcaccgaataccaggtcactgtgattgcactgtacgcgaactccattggtgaagcagtgagcggtactgcaaggacgaccgccctcgaggggcctgaattgaccattcagaatacgaccgcacattcgctcctggtggcatggagatctgtgccgggagccaccggataccgagtgacgtggagggtcctttcgggaggacccacccagcaacaggaactgggaccagggcagggttccgtgttgttgagggatcttgaacccggtactgattatgaggtgaccgtttcgactctcttcggaagatcggtcggccctgcaaccagcctgatggcacggacggatgcaagcgtggaacagaccctgcgacctgtgatcctgggacctaccagcatccttctgagctggaatcttgtccctgaggcacgaggttacagacttgagtggcgtcgtgagactgggcttgaaccacctcaaaaagtcgtccttccgtcagatgtgactcgttaccaactcgacggactgcaaccaggaacggaataccggctcaccctctacacccttctcgaaggtcatgaagtggccactcctgcaactgtggtgccaaccggtcctgaacttcctgtcagccccgtcacggacctccaagcaaccgagctgccgggtcagcgggtgcgggtgagctggtcgccagtgcccggagctacccagtaccggataatcgtgaggtctactcaaggagtcgagcggactctcgtgcttcccggaagccaaactgcattcgatcttgacgacgtgcaagcagggctctcatacaccgtcagagtctcagccagagtcggtccacgagagggttcagcatcagtgttgaccgtgagaagagaaccagaaaccccactggctgtcccagggctcagggtcgtggtgtccgatgccactagagtgcgcgtggcatggggacccgtcccaggagcgtccgggtttcgcatctcgtggtccactggatcgggaccagagtcgtcacaaaccctcccccctgattccaccgccacggatattacgggacttcagcccgggactacgtatcaagtggccgtctcagtgcttcgcggtcgagaagaaggtcccgcagcggtgatcgtggctagaacggatcctctgggacctgtccgcactgttcacgtgacccaggcctcctcgtcctcggtgactataacgtggacccgcgtcccaggagcaactggctaccgtgtctcctggcactccgcccacggacccgagaagtcccaattggtgtccggcgaagccacggtggctgaactcgatggactggaaccagatactgaatacactgtgcacgttcgtgcgcatgtggccggggtcgacgggcctccagcaagcgtggtcgtcaggactgcaccagaaccggtggggcgggtgtcaaggcttcagattcttaatgcatcgtcagatgtgcttcgcataacttgggtgggtgtgactggcgccaccgcatacaggcttgcatgggggagatcagaagggggtcctatgcggcaccaaattctgcccggaaacaccgacagcgcagaaatccgcggactcgaagggggagtttcttactccgtgagagtgactgcgcttgtcggagatcgtgaagggactcctgttagcattgtggtgactacccctcctgaagctccccctgcactgggaaccctgcatgtggtccaacggggtgagcattcactgcgattgaggtgggaacctgtgcctagggcccaaggattcttgttgcattggcagccagagggtgggcaagagcagagccgcgtgttggggcctgaacttagctcgtaccatctcgacggtcttgaaccggcaactcagtacagagttcgcctgtcagtgctcgggcctgccggcgaaggacctagcgccgaagtgaccgcaaggaccgaatccccaagagtgccttccattgaactcagggtggttgacacctcgatcgatagcgtgactcttgcttggactccggtgtccagggcaagctcgtacatcctttcgtggcgccccttgcgcggccctggacaagaagtgcccggttctcctcagactctccctgggataagctccagccaacgcgtcaccgggcttgaaccaggagtgtcgtacattttctcgctgactccagtgctcgatggggtgcgaggaccagaagcatctgtgacccagaccccagtgtgcccacggggactcgcagatgtggtctttctgccacatgccacccaggataatgcacatcgagcagaagcaactagaagagtgcttgagaggctcgtgttggcccttggtccacttggtccgcaagccgtgcaggtgggtctgctgtcgtactctcatagaccatcccctctcttcccgcttaacggttcacatgacttgggtattatcctgcaacgcataagagacatgccctacatggatcctagcggtaacaatctgggaactgcagtggtcaccgctcatagatacatgttggctccagacgctcctggtagacggcaacatgtgcctggcgtgatggtgcttctggtggacgaacctcttcgcggagatatcttttcccccattagggaggcacaggcttctggtcttaatgtggtgatgctgggaatggccggtgccgatcctgagcaactgagacgcctggcacctggaatggatagcgtgcaaactttctttgcagtggatgatggacctagcctcgatcaggcagtgtcaggcctggcaacggcactgtgtcaagcctcctttaccacccagccccggcctgaaccttgtccggtctactgcccaaaggggcaaaagggtgaacctggcgaaatgggtctgagagggcaagtgggacccccgggagatccaggactgccgggacgcactggcgcccctggacctcaagggccccctggcagcgcgaccgccaagggcgaaagaggtttccctggagcagatggtagaccgggatccccgggtcgggcaggtaatccgggtacccccggggcgcctggtctgaagggaagcccaggccttcccggtccccggggggacccaggtgaaagagggccaagaggacccaagggggaacccggggcacccggtcaagtgatcggtggcgagggccctggtctgcctggccggaaaggtgatcctgggcctagcggcccacccggaccgcgaggtcctctgggcgaccccggaccaagaggacctcctggacttcctggaaccgcgatgaagggcgacaagggagatcgaggcgaacggggacctcccggtcctggcgaaggtggaattgcacccggagagcctggactgccaggcctgcctggatcgccaggcccacaaggcccagtgggacctcctggtaagaaaggtgaaaaaggagactccgaggatggagccccaggacttcccgggcagcccgggtcgcctggtgagcaaggccctcggggaccgcccggagcgattggtcctaagggtgatcgtggattccctggtccactcggtgaagcaggtgaaaagggagagcggggaccacccggacccgccggatcaagaggccttccgggcgtggcaggacgccccggagctaagggtccggaaggacccccgggtccaactggtcggcaaggcgagaagggtgaaccaggtcgtccgggcgaccctgccgtggtggggcccgcagtcgccgggcctaagggagagaaaggagacgtgggtccagctggcccgcggggcgccactggagtgcagggagaaagaggaccgccaggcctggtccttcccggagatcctgggccgaaaggtgacccaggagacaggggacctattggactgactgggcgagcaggccctcctggtgatagcggaccccccggcgaaaaaggagatccagggcgcccaggtcctcctggtcccgtgggacctcgcggccgggacggtgaggtgggagaaaagggcgatgagggaccgccaggagatccgggacttcctggcaaggcgggtgaacgtggccttcgtggagcccctggtgtcagggggcccgtcggcgaaaagggagatcagggagatccgggtgaggatggacgaaacggaagccccggttccagcggaccgaagggagacagaggtgaacctggacctcccggacctcctggacgacttgtggatactgggcccggcgccagggagaagggtgaaccaggggaccggggtcaagagggacctcgcggaccaaagggagatccggggcttcccggtgcaccgggagagcggggtattgaaggctttagaggacctcccgggccgcagggagatccaggtgtcagaggtccagcaggcgagaagggtgacagaggacctcccggcctcgatggacgatcgggtcttgatggaaagcccggagctgctggaccctccggccccaacggtgcagcaggtaaagcaggtgaccctggacgagatggattgccaggtctgcggggcgaacagggactgcctgggccaagcggcccacccgggctgcctggtaagcctggtgaggatggtaagcctggacttaatggcaagaacggcgaacccggggaccccggcgaagatggtcgtaagggggagaagggtgactcaggagcgtcgggacgggaggggcgtgatggtccaaagggagaacgtggagccccaggcatcctgggccctcaagggcctccggggctccctgggccagtgggtcctcctggtcaaggatttccgggcgtgccaggaggaaccggtcctaagggcgacagaggcgaaaccggatcgaagggggaacaggggctcccgggcgagcgcggacttcgaggagaaccaggctcggtgccaaatgtggatagactgcttgaaacggctgggataaaggcttcggcgctgagggagatcgtggaaacttgggacgagtcatccggctctttcctgcctgtgcctgagcgtcgcagaggtccgaagggcgattcaggcgaacaagggccacctggtaaagaaggtcctattggtttccctggtgaaagaggccttaaaggagatcgtggggatcctggtccgcaaggaccgccagggctcgcacttggggaaagagggccccctgggccttccggtcttgccggagaacccggcaagccaggaatccctggactgccgggaagagccggtggtgtgggagaagcaggacggcccggagaaaggggggagcgcggcgaaaagggtgaaaggggcgaacaaggacgcgacgggccgccaggattgccaggaaccccaggcccgcctgggccgccaggtccaaaggtgtccgtggatgaacctggccctggtcttagcggagaacaggggcctccgggtcttaaaggcgcaaaaggagaaccaggatccaatggagatcaaggacctaagggagatagaggtgtgccaggtatcaaaggtgaccgcggggaacctggcccacggggacaggacggaaatcctggactgcctggcgagcgagggatggccggtccagaaggtaagccaggactccaagggcccagaggtcctcctggccctgttggcggacatggagatccaggtccgccaggcgcacccggactggcaggacccgcgggacctcaaggaccatcgggtctgaagggggagccgggggaaaccgggccacccggacgtggactcactggccctacgggagcagtgggactgccaggtcctccgggcccgtcaggcctcgtcggacctcaaggatccccgggattgccaggacaagtcggagagactgggaagccaggagctcctggtcgggatggagcatcagggaaggatggtgaccgtggttcaccaggcgtgcccggatcgccaggactccctggacctgttggaccgaaaggagaaccagggccaactggtgcacctggacaagcggtggtcggactccccggtgcaaaaggtgaaaagggggcaccgggaggcctggccggcgacctcgtgggggagcctggtgccaagggggatagaggtctgccaggtccccgaggcgagaagggtgaagcaggtcgcgccggcgaaccaggggaccccggagaagatggacagaagggcgcaccaggccctaaaggatttaagggagatccaggcgtcggagtcccgggatcaccgggtccgccaggtcctcctggtgtgaagggcgatctgggtctgcctgggctccccggcgcccccggtgtggtcggctttcccggacaaaccgggccgaggggtgaaatggggcagcctggtccctcgggagaacgcgggctggcagggcctcccggtagagaaggtattccaggccccctgggtccacctggtccacccggtagcgttggacctcctggagcatcaggactcaagggcgacaagggggaccctggtgtgggcttgccaggtcctcggggtgagcgcggggaacctggaatcagaggagaagatggaaggcccggacaggaagggccaagaggcctcacgggaccaccgggttcgaggggggagcggggtgaaaagggggatgtcggatccgctgggcttaagggtgataaaggagattccgccgtcatcctgggacctcctggaccacggggagcaaagggcgatatgggagaaagagggccgcggggacttgatggagacaagggacctaggggtgacaacggcgacccgggagataaggggtccaagggagagcccggcgataagggtagcgcggggcttcccgggctgcgcggactgttggggccccaaggtcaacctggagcggccggtattcctggtgacccaggttcaccaggcaaggatggtgtgccgggaattaggggggagaaaggggacgtgggctttatgggacccaggggcctcaaaggagaacggggtgtcaagggagcatgtgggctggacggcgaaaagggggacaagggcgaggcaggaccaccagggcgtcccggactggcaggacataaaggggagatgggagaacccggggtcccaggacaatcgggcgcacctggtaaagagggattgattgggccaaagggagataggggatttgatggacaacctggacctaagggagatcaaggcgagaagggagaacgcggcacgcccggaatcggcggatttcccggtccttccggcaacgatggatccgccggacctcctggtccgccaggttccgtgggaccacgcgggccagaaggattgcagggccagaagggtgagcggggacctccgggggaaagggtcgtgggtgcaccaggtgtgccaggtgcaccaggcgaacgcggagagcagggtcgcccagggccagcaggccctcgtggagaaaagggcgaggcagcccttactgaggacgacattcggggattcgtccggcaggagatgtcacaacattgtgcatgtcaaggacagttcatcgcgagcggttcgcgacctctgccttcctatgccgcagataccgcaggctcccaacttcacgcagtgccagtgctgcgagtcagccatgccgaggaagaagagcgcgtgcccccggaagatgatgaatactcggaatactcggaatactcggtcgaggagtaccaggatccagaagccccctgggattccgacgatccttgctccctgcctctggatgaaggctcatgtacggcctacacccttagatggtaccatagggccgtgaccggatccaccgaagcctgtcacccttttgtttacggaggctgcgggggaaacgcaaaccgatttggaactcgtgaagcatgtgaacgtcgatgtcccccgagagtggtgcaatcgcagggcactggtactgcccaagat

SEQ ID NO: 9593 - DNA, 8832 bp, synthetic construct
  misc_feature 1..8832: note = source = /note="Description of Artificial Sequence: Synthetic coding sequence"
  source 1..8832: mol_type = other DNA
atgacactgagactgttagtagctgccctgtgcgccggtatccttgcagaagcacccagggtcagggctcagcatagagagagagtgacgtgcacccgcctatacgcggctgacatcgtttttttactagatggttccagctcgatcgggcgcagtaatttccgggaagttcggtcatttctcgagggtctggttttgccattctccggagcggcatcggcccagggagtacgattcgccaccgtccagtactccgatgatccccggacagagtttggtctggatgctctgggaagcgggggcgatgttattcgggctatccgcgagctctcctacaaaggcggaaatacaaggactggtgctgcgatcctgcacgtcgccgaccatgtcttcctacctcagctggcacgccctggcgtccccaaagtgtgcatcttgataaccgacgggaaaagtcaggacttggtagacacagcagcacaacggctaaaaggccagggcgtaaagctctttgcagtaggcataaagaatgccgatccggaagagttgaagagagtcgcgagccagcctaccagcgactttttcttcttcgttaatgatttcagcatactgcggaccttactcccactcgttagccgccgtgtgtgcacgactgctggcggggtccccgtcacgcgcccaccagacgactccacttccgcccctagagatctcgtactctctgaacctagctcccaaagtctgagggtccagtggaccgccgcctcggggccagtgaccgggtacaaggtgcagtacacgcctctcacaggactcgggcagccattaccctcagagcggcaggaagtgaatgtgccggccggcgaaacatcagtaaggctgcgtggactgagacccctgaccgaataccaagtgacagtgatagccctgtacgccaactccatcggcgaagcagtgtcaggaactgctaggacaactgctctggagggcccagagctgaccattcagaatacaaccgcgcactctcttctggtagcctggcgatcggtaccgggcgcgaccgggtaccgcgtcacatggagggtgctctctgggggtcccactcaacaacaggagttaggtcccggtcagggcagtgtgctcctgagagacctcgagccaggtacagactacgaagtgaccgtcagcaccctctttgggaggtccgtgggacccgcgacgagcctcatggcccggaccgatgccagcgtagagcagaccctccggcctgtgatcctggggcctacctcaatcttactatcttggaatcttgtgccagaggccaggggttacagactggaatggcggcgcgagacaggtctcgaaccaccccagaaggtagtacttcctagcgatgtaacgcgctaccagttagatggccttcagccggggacagaatacagactgaccctatatacgttactggaaggccacgaggtggctaccccagcgactgtggttccaactggcccggagcttccagtcagccccgtgacggatctacaggcaaccgagctcccgggtcaaagggttagagtttcttggtctcctgtgcccggcgcaacccagtaccgcataatcgtgcgttctactcagggagtagagcggacgctcgtgctcccaggttcccagactgctttcgatctcgacgacgtgcaggctggtctgagttacaccgtacgcgtgtctgcacgtgttggtccccgggagggttcagcttccgtactgactgtgcggcgcgagccagagacgccactggctgtcccaggcctcagggtagtggtgtctgatgctacccgggttcgagtggcttggggacccgtccccggcgcctccggtttcaggatctcttggtcgacgggcagcggtcctgaaagctcccagacacttccaccagactccaccgccacagacatcaccggactgcaacctggcacgacctaccaggtggcagtttctgtgcttcggggcagggaggaaggacctgccgctgtcatcgtggcccgcacagatcccctgggacctgtgcggaccgtccacgtcacccaggcttcaagcagttcagttactattacctggaccagggttcctggcgccaccggataccgtgtgtcatggcattccgctcatgggccagaaaagagccagttggtctctggggaggctacggtggccgagctggacggacttgagcccgacacagaatacacagtccacgtaagagcccatgtggctggggtcgacgggcccccagcaagtgtggtcgtgcgtacggcccctgagcccgttggccgagtatcacggctccagatcctcaacgcgagcagcgacgttctgaggattacctgggtgggcgtaacaggcgcaaccgcctatcggcttgcctggggccgcagtgaaggcggacctatgcggcaccagattctgccggggaatacggactcagccgaaatcagaggcctcgaagggggggtaagctacagcgtccgtgtgacagcccttgtgggggacagggaaggaacccctgtcagtattgtcgtgacaaccccccctgaggctcctccagcattgggcacgctccatgtagtgcaaagaggcgaacacagcctgcggttaaggtgggagccggttcccagagcccaagggtttctgctgcactggcagcctgaggggggacaagaacagagcagagttctgggaccagagctgagctcatatcatctcgatggcctagaaccagccacccagtaccgcgtgcggttgtctgtcctgggacccgccggggagggcccctccgctgaggtgaccgcccgaactgaaagtcctagggttccatcaatcgagttgcgcgtggtggacacatcaatcgactccgtgaccttggcctggacgccagtaagccgagccagtagttacatcctttcctggcgtcctcttcgcggacctggccaggaggtccccggatctccccagactctgcccggaatttctagctctcagcgcgttacaggccttgaacccggcgtgagctatattttctcccttacccctgtacttgacggagtaagaggaccagaagctagtgttactcagacacccgtgtgtccacgtgggctggccgacgtggtgtttctgccccacgcaacacaggacaacgcccacagggccgaggccaccaggagagtcctggaacgcttggtacttgctctgggcccactaggcccacaagctgtgcaggttggtctcctgagctattctcaccgaccctcaccattgtttcctctgaatggatcacatgatcttggtattatattgcaacgcatcagagatatgccttacatggatcctagcggaaacaacttggggaccgcggttgtaaccgcccacaggtatatgttggctccggatgcccctggacgcaggcaacatgtacccggcgtgatggtgctgctggtggacgagccattgcgcggcgacatctttagccccattagagaggcccaggccagtggcctgaatgtggtcatgttaggaatggccggagctgacccagagcagttgcgacgccttgcacccggaatggattccgtgcagactttcttcgcagtggatgacggaccctcactggatcaggccgtgtcaggcttggccaccgccctgtgtcaggcaagcttcacaacccagccacggcccgagccctgccccgtgtattgtcccaagggccagaagggagaaccaggtgagatgggcctgcggggacaggtgggcccaccgggcgaccccggcctccccggtaggaccggcgcaccagggcctcagggtcctcctggcagcgctaccgctaaaggtgagaggggattccctggcgcagatggacgcccaggaagcccgggccgcgctgggaacccgggcacaccgggtgcacccggccttaagggaagccccggactgcccggtccccggggagaccccggtgagcggggtccgcggggtccaaagggggagcccggggctcctggacaggtgattggaggagagggaccaggactcccaggacggaagggtgatcccggaccatccggccccccaggcccaaggggtcccctgggggaccctggtccaaggggtccgcctggcctgcccgggaccgctatgaagggtgacaaaggagaccgcggggagcgcggtccccccggccccggtgagggcggcattgcacctggcgagccaggcctgccgggacttcctggctccccgggaccccagggccccgtggggcccccggggaaaaagggggagaagggagatagcgaagatggtgcaccggggctgcctggacagcctggtagtccaggggaacagggccccaggggccctccaggggcaatcggccccaagggtgacaggggttttcctggccccctgggggaggcaggagagaagggagagagagggccacccggccccgccggcagtaggggcctccccggggtcgccggtaggcctggcgcgaaaggtcctgaaggtccacctggcccaacagggcgacaaggcgagaaaggggagccgggccgaccaggagaccctgctgtggtcgggcccgcggtcgccggccccaagggcgaaaagggcgatgtgggtcctgccggacctcgcggggccactggagttcaaggggagaggggaccaccgggtctcgtcctgccaggtgatcccggccccaaaggtgacccaggcgaccgcgggccaatcgggctgaccgggagggccggacctccaggagactctggcccgcctggggagaaaggagaccccggtcgacccggcccgccaggcccagtcggcccacggggccgagacggggaggtaggcgaaaaaggagacgagggtccccctggtgacccagggttgcctggcaaggccggtgagcggggtcttcgcggagcacccggggtaaggggccccgtgggagagaagggtgaccagggggatccaggagaggatggacggaacggctcaccaggtagctcgggccccaagggcgatcgcggcgaacccggcccccccggcccccccggacggttagtggatacaggacccggcgccagagaaaaaggagaacctggggataggggtcaggaaggtcctcgtggacccaaaggtgaccctggcctgcccggggccccaggagagaggggaatcgaaggtttccgaggacccccaggtccacagggcgatccgggtgtgagaggacctgccggcgagaaaggtgacagagggcctccagggctcgatgggcgctccgggctggacggaaaacctggggccgcagggccatctggccccaatggagcggccggaaaggcaggcgaccctgggcgggatgggctacctggactgcggggtgaacagggcctgcccggtccgagtgggcccccgggactgcctgggaagcccggggaggacggcaaacccggtctgaatggaaagaatggcgagcccggggacccgggagaggatggtagaaagggtgagaagggcgactccggcgcgagtgggagagagggacgggacggacccaagggggaacggggcgcccccggcattctaggaccgcagggccctcccgggctgcctggacctgtgggacctcccgggcaagggttccccggcgtgcccggcggaaccggaccgaagggagaccgcggggaaacaggcagcaagggcgagcagggactccctggagaacgcggcctgaggggcgagccgggttcggtgccaaatgtggacagactgctggagactgccggaattaaagccagcgccctccgggagatcgttgaaacctgggacgaatcctctggcagtttcctccctgtgcccgagaggcgaagaggccccaaaggggactctggtgaacaggggccaccagggaaggaaggcccaatcgggtttcctggtgaacgcggcctgaaaggtgaccgcggagatcccggcccgcagggcccgcctggcttggcccttggcgagcgcggccctcccggcccttccggactggcgggagagcctgggaaaccagggatacccggcttgccaggccgcgctggcggcgtcggggaagctgggcgccctggggagagaggggaacggggtgaaaagggcgagaggggagagcagggtcgggacggcccacctggattgccgggcactcctggtcccccaggaccccccggcccaaaagtgtccgtcgatgagccggggcctgggttgtcaggggagcagggtccccccgggctgaaaggggctaaaggagaacccggaagtaacggtgaccaagggcccaagggagaccgtggcgtaccgggcatcaagggagataggggagagcctggaccccggggccaggatggcaatccaggactgcctggcgagcgggggatggcgggcccggagggcaaacccggactgcagggccccagagggccacccggccctgtcggtgggcatggcgaccccggaccccccggagctccaggcctggcaggccccgctggacctcagggccccagtggactgaaaggtgagcccggcgaaacaggccccccaggacgtggactgactggccccaccggggcagtgggcctgccgggacccccaggaccttcaggactggtcggtccacaggggtcacccgggttgcctggacaggtcggagagacgggcaaaccaggagctcctggtagagatggcgcttcagggaaagacggcgatcgcggatcacccggagttcctggttcccctggcctcccaggtcccgttgggcctaaaggagagcccgggcctacaggagctcctgggcaggccgtggtcggactgccgggagccaagggagagaagggcgcacctgggggactcgccggggacctagtgggcgaaccaggtgccaagggggatcggggactacccggacctcggggcgaaaagggagaggcaggtcgggctggagaacctggagaccctggagaggacggtcagaagggagcgcccggacctaaaggtttcaagggcgaccccggagtgggagtgccaggcagtcctggacctccaggtccacccggtgttaagggcgacctgggcctccccggccttcctggcgcacccggtgttgtcggattcccaggacaaacaggtccacgcggggagatgggccagcctgggccttccggagagcgaggattagctggtccaccaggcagggaggggatacctggacccctggggccacccggccctccgggctcagtcggtccacccggagcatcaggtctcaagggtgacaagggagatcccggtgtgggcttgcctggccccagaggcgaaaggggcgagcctggaatccggggcgaagatggaaggccgggccaggagggccctcgaggcctcactgggcccccaggtagtagaggagagcgtggtgaaaagggggacgtaggttcggccggcctgaaaggggataagggcgatagtgccgtgattttggggccccccgggcccagaggggccaaaggggacatgggtgagagaggcccaagaggcctggatggagataaggggcctaggggggataatggagatccaggagataaggggagtaagggggagcccggcgataagggctcagccgggttacccggtcttagggggctgctgggaccgcagggccagcctggcgcagctggcatccctggtgatcccggcagtcctgggaaagacggcgtccctggcatcaggggcgaaaaaggggatgtgggatttatgggtcccagaggattgaagggcgagcgcggagttaagggagcctgtgggctcgacggtgaaaaaggagataaaggcgaggccggtccaccaggaaggcctggactggccggacataagggcgaaatgggcgagccaggcgtaccaggtcagtctggtgcccctggtaaagaaggactaatcggcccaaagggcgatcgagggtttgatggtcagcctggtcccaagggcgaccagggagagaagggtgaaagaggcacgcccggaattggggggttcccaggaccatcaggcaatgatggaagcgctggtccccctgggccgcccggcagtgttgggccacgggggccagaggggctgcagggtcagaaaggcgaacgtggaccgcccggagaacgggtggtaggggcaccaggggtgcctggggcgccgggggagagaggcgaacaaggaagacctggccctgcgggtccaaggggggagaaaggcgaggcagccctgactgaggacgatatccgcggatttgtacgtcaggagatgtcacagcactgtgcatgtcagggacagttcatcgcttctggcagcagaccccttccttcatacgcagccgatacggccggaagtcagctgcatgcagttcccgtcctgcgggtgagtcatgctgaggaggaggagcgggtgcctccggaggatgacgaatactccgaatacagcgagtactcggtggaggaataccaagatccagaggctccttgggactccgacgacccatgctctctacccctagatgagggcagttgtacagcctatactttgagatggtaccacagagccgtgacaggctcaaccgaggcttgtcatccttttgtgtacggaggctgcggaggaaatgctaatcgtttcggcaccagagaggcctgcgaaagaaggtgcccccccagggtggttcagtctcaggggacgggaacagcacaggac

SEQ ID NO: 9594 - DNA, 8832 bp, synthetic construct
  misc_feature 1..8832: note = source = /note="Description of Artificial Sequence: Synthetic coding sequence"
  source 1..8832: mol_type = other DNA
atgaccctgcggctacttgtcgcggctctctgtgctggtattcttgccgaggctccaagagtgagggcacaacatcgagagcgtgtgacatgtacccgcttgtatgccgctgacatcgtattcctgctggacggctcatcttctatcggccggagtaattttcgggaggtgcggtcattcctcgaggggctggtccttccattctcaggcgccgcctccgctcagggggtgcgcttcgctactgtgcaatattctgatgatccccgtactgaattcggtctggacgcccttgggtcgggcggggatgtcattcgggccatcagggaactgagttataagggcgggaacactagaactggagcagcaatcttacacgtcgcggatcatgtgttcctgccacagctagctcgtcccggcgtgccaaaggtttgcatcttgatcactgatggcaaaagccaggacctggttgatacagcagcccaaagattgaagggacagggtgtgaagctttttgctgtcggcatcaaaaacgctgaccctgaagagctgaagcgagtggcctcacagcccacatctgattttttcttcttcgtcaacgacttctctattctcaggaccctgctccccctggttagccgaagggtgtgcaccactgcaggcggcgtgcctgtgacacgtcctccagacgacagcacgtccgcacccagagatctggtccttagcgagcccagctcccagtctcttcgtgtgcagtggaccgccgcatcggggcccgtgaccggatataaggtgcaatacacacctcttactggtctcggacagcctctgccttcagaacgccaggaggtgaacgtgccggccggcgagacgagcgtgcggctgcggggcctgaggcctcttacggagtaccaagtcactgtcattgccctgtacgctaatagcataggagaggccgtttcaggaacagcccggaccaccgctctcgagggaccggaactaaccatccagaatactacggctcacagcctgctggtcgcttggcggagcgtgcctggggcgaccggttacagagttacctggcgggtcttgagcggcggacctacacagcagcaggagctgggcccaggccagggatccgtattgttgagggaccttgaaccgggaaccgactacgaagttaccgttagtaccttatttggacgaagcgtggggcctgccacttcactgatggctaggacggacgcctcagtggagcagacactgagaccagtgatactaggtccgacctccatactgctgagctggaacctggtgcctgaagccaggggttacagattggaatggcgaagggagactgggttggaacctcctcagaaggtagtcctgccttcagatgtgactcggtatcagctagatggcctgcagccgggaactgagtaccggctgacgctttacactttgcttgagggccatgaggtagcaacgcctgcgaccgtcgtccccaccggtccagagctgcccgtgagccccgttactgatctgcaagcgacagaactgcccggacagcgggtgcgtgtcagctggtcccctgtccccggcgccacgcagtatcggataatcgttagatccactcagggggtggagcggaccttggttctaccgggaagtcagacggcctttgacctggatgacgtacaggccggactgtcttatactgttcgcgtgtccgcccgcgtcggcccacgagaagggtccgcatcagtcctgactgtgcgccgggagcctgagacacccctggctgttccgggccttcgggttgtggtttccgatgccacgcgcgttcgagttgcatgggggcctgttccaggagcgtccggatttcgcatctcatggtccaccgggagtgggcctgagagcagtcaaacactgccacctgatagcacggcgactgacatcacggggttgcagcctggtacaacgtaccaagtcgcggtgagtgtgctgcggggcagggaagagggacccgccgcagtgatcgttgccaggaccgacccattgggaccagtgcgaaccgtccatgtcactcaagcctctagcagttccgtcaccatcacatggaccagagttccaggggcaacaggttatcgcgtgtcatggcactccgctcacgggcctgagaagtctcagctagtaagcggcgaggcaacagtggccgagttggatggcctggagcccgataccgagtacacggtgcacgtccgggctcacgttgctggagtggatggacctccagcctccgtggtggtgagaacagcccctgagcccgtcgggagagtgtccaggctgcagattttgaacgcctcaagtgacgtgctgagaatcacctgggttggggtgacaggggcaactgcttacagacttgcctgggggcgttccgaaggtggccctatgagacatcagatactaccgggcaatactgactccgcagaaatccggggcctggaaggcggtgtttcctactctgtaagagtcacagcgttggttggggatagggaggggactcccgtgtcaatcgtggtgactacaccgcccgaggcgcctcccgcattgggaaccctgcacgtcgtacagagaggcgagcactctctgaggctgcggtgggagcctgtccctagggcccaggggttccttctccattggcagcccgaaggaggccaggagcagtcacgcgtactgggccctgagctctcgtcctaccacttggacggcctcgaaccagcgacccagtaccgggtacggctctctgtcttgggcccggcaggggagggtccaagtgctgaagtgacggccagaacagagtcccctcgcgtgcctagcatcgagttaagggttgtggatacctctatcgactctgtcactcttgcctggaccccagtgagtcgagcatcaagctatatcctgagctggaggccattgaggggaccggggcaagaggtgcctggatccccccagaccctgccaggcatttcttcctcacagagggtaactgggctggagcctggtgtctcctatatctttagcctgacgcccgtgctcgatggcgtccgtgggcccgaggcctcagtgactcagacccccgtttgccctcgcggcctggctgatgtagttttcctacctcacgccacacaggataacgctcatcgggcagaagccacccggagggtccttgagcgccttgtacttgccctaggaccgctggggcctcaggctgtgcaggtgggccttctctcctacagtcatcggccgagtccattgttcccactgaacggttctcatgatctaggcattattttgcagagaatccgggatatgccctacatggacccaagcgggaataacctgggaacagctgtggtaaccgcccacaggtatatgttggcccctgatgcccctggcaggcgacaacatgtgcctggtgtgatggtgctgttggtagacgaacctttacgcggtgacatcttcagccctattagggaggcccaagcttccggactgaacgttgtgatgcttggaatggccggagccgatccggaacagctgagaaggttggctcctgggatggattctgtgcaaacattctttgccgtggacgatggtccctcgctggatcaggccgttagtggcctggcaacagcattgtgccaggccagttttacaacccagcctcgtcctgagccatgcccggtctactgccctaagggccaaaagggagagccaggcgagatgggcctccggggccaagtcgggcccccgggcgatccagggctgccaggtagaaccggcgctcctgggccacagggcccccctggttccgcgactgcgaagggtgagcgtggattcccaggcgccgacggtcgcccaggcagtcctggacgggccgggaatcctggcacccccggggctccagggctcaaaggatctccaggcctccctggtccgcggggagacccaggcgaacgagggccaaggggccctaaaggggaaccaggcgcccctggccaggtaattggaggagagggcccaggcctcccagggcgcaaaggcgaccccggcccatctggacctccaggtccaagggggcctctgggcgatcctggtccgcgaggccctcccgggcttcccgggaccgctatgaaaggagataaaggcgacagaggtgagcgcgggcccccaggccccggcgaggggggaatcgcccctggggaaccgggtctgccagggctgcccgggtcgcctggaccccagggaccagtgggacccccgggaaagaaaggagagaagggggactctgaggacggagcccctggtctgccaggtcagcccggctctcctggcgagcagggaccaagagggcccccaggtgccattggtcctaaaggagatcgcgggtttcccggccctttaggcgaggctggagagaagggcgaaagaggccccccgggtccagctggatctagggggcttcccggagtggcgggccggcctggtgcaaagggacctgagggaccgccaggccctaccggacggcagggcgagaaaggcgagccaggtaggcccggcgatcctgccgttgttggaccagctgttgctggaccgaagggagagaagggagatgtcgggcccgctgggcccaggggtgcaaccggggtacagggggaacgggggcctccggggctagttttgccaggggaccctggcccaaagggagacccgggcgaccgtggtcctatcggactgacgggcagagcggggccgccaggcgatagcggccctccaggagaaaagggggacccaggacgtcccggacctcccggaccggtgggcccacgaggccgtgatggagaagttggtgaaaaaggcgatgaaggcccacccggggatcccgggctccctgggaaggcaggcgagagggggctgaggggggcccccggcgtgcgtgggccagtcggggaaaagggggatcaaggcgacccaggtgaggacggacgaaatggatcccctgggagctcaggcccaaagggagatcgaggcgaaccggggcccccaggccccccaggtcgcttagttgacaccggcccgggcgccagggagaaaggcgagccaggcgaccgcggacaggagggaccacggggtccaaagggcgatccgggtctgccaggcgcccctggggaacgcggcattgaaggatttcgggggccaccgggtccccaaggtgacccaggcgtgcgtggccccgcaggcgagaagggggacagaggtccacccggattagatgggcgaagtggattggatgggaagcccggggctgcaggcccctccggcccgaacggagccgccggtaaagcgggggatcctgggcgggacggactccccggtcttagaggagagcagggcctgcccggcccgtcgggccctcctggcctgccagggaaaccaggtgaggatgggaaaccaggactgaatggaaagaacggtgaacctggcgatcccggggaggatggtaggaagggggagaagggcgactccggggcctccgggcgggaaggccgagacggtccgaaaggcgaaagaggggctcctggaatcctggggcctcaagggccaccaggactaccgggccctgtaggtccaccaggacaagggttccctggggtgcctggtggaacagggcctaagggtgataggggcgaaacgggcagcaagggcgaacaagggctgccaggcgaacgggggctaaggggcgagccagggtccgttcctaacgttgaccgtcttctcgaaaccgccggaattaaggcgagcgcactccgggaaattgtggaaacgtgggacgagagttccgggtcgtttttacccgtaccagagcgacgccggggacccaagggggactccggagaacagggcccacccggaaaggaaggcccgatcggatttcccggggagcgggggttgaagggggatcgcggggatcctggcccgcagggccccccgggactggctttaggcgagcgcggacccccggggccttccggcctggccggcgaacctggtaagccaggtatcccgggcctacccgggcgcgctggcggggtcggcgaggctgggcggccaggggaacgtggcgagcggggggagaagggtgagagaggcgagcaaggccgcgacggacccccaggactgcccggcacacccggcccgccggggccccctggtccaaaagtcagtgtggacgaacctggccccggcctgagtggcgagcaaggtcctcctggcttgaagggcgccaaaggagaacccggatctaacggagaccagggtcctaagggcgatcgcggtgtcccgggaatcaaaggcgacaggggagagccaggcccccgcggccaagacggtaatccaggcctccccggtgaaaggggtatggccgggccagaggggaaaccaggactgcagggcccccggggaccccctggaccagtaggcggtcacggcgatccaggacctcctggcgccccgggcctggccggacctgcaggtccccaggggccttccggcctcaaaggcgaacccggagagaccggcccccctggccgaggtcttacgggacctaccggcgccgtggggctgccagggccccccggaccgtctggtctcgtcggcccccagggctccccaggactgcctggccaggtgggggagactggtaaacccggagcaccaggccgcgacggtgcatcaggaaaggatggtgatagaggtagccctggtgttccaggaagtcctggcctccccggacccgtaggccccaagggggagccaggacctaccggcgctcctggccaggccgtggtcgggttgcctggcgctaaaggagaaaaaggggctcccggcggcttggccggggatctggtcggtgagcctggggcgaagggagaccgcggactcccggggcccaggggagagaaaggagaagccggacgggctggcgaacccggcgatcctggcgaggacggacagaaaggtgccccaggccccaagggctttaagggggatccaggggtgggggtgccggggagtcctggccccccgggtcccccaggcgtcaagggcgatttaggactccccggactgcctggagcaccaggagttgtgggattccctgggcagactgggccgagaggagagatggggcagcccggacctagtggggagagaggactggccgggcccccgggacgcgagggaatccccggacccttggggccacctggacctccaggctcagtggggccacctggggcaagtgggctgaaaggcgataaaggcgatcctggagtgggtctaccaggcccacgcggagagcgcggagagccagggatccggggtgaggacgggagacccgggcaggagggccctaggggccttacaggcccacctggctctcggggtgagcgcggcgagaaaggagacgtcgggagtgctggcctgaagggcgataagggggactcagccgtgatactgggtcctcctgggccgcggggtgcgaaaggggacatgggcgaacgcggcccaagaggcctagatggggacaagggccctaggggggacaacggggaccccggggacaaaggatctaagggggagcctggagataaaggttccgccggcctccccggcttacgaggccttctcggccctcagggtcagcccggcgccgcagggatccctggcgatccaggaagccctggcaaggacggcgtcccagggatccggggagagaagggcgatgttggtttcatggggccccgcggactgaaaggtgaacgcggtgtcaaaggcgcctgtggcctcgacggcgaaaaaggcgataaaggggaggccggacctcctgggcgccccggattggcaggacacaaaggcgaaatgggtgagcctggggtcccagggcagagcggtgcaccgggaaaggaggggctcatcggtccaaaaggcgacagagggttcgatggccagcctgggccaaagggggatcagggagaaaagggcgagcgtggtacccctggcattggggggttcccaggcccttccggcaacgatggctctgcaggaccaccggggcccccgggaagtgttggcccaaggggccccgaggggctgcagggacagaagggggagagggggcccccaggcgaacgggtcgtgggtgcacctggggtaccaggcgcccctggcgaaagaggagagcaaggcaggccagggcccgccggccctcgtggggagaaaggagaagctgcattgaccgaagatgacattagaggctttgttcggcaggagatgtcccagcactgtgcatgtcaaggacagttcattgcaagtggatcccgacccttaccaagctatgccgcggacacagcaggatctcagctgcatgctgtgcctgtcctgcgagtgagtcacgcagaagaggaagagagagtccccccagaagatgacgagtactctgaatactcagagtacagtgtggaggaataccaggatccggaggctccctgggattcggatgacccctgcagcctcccactggacgagggctcttgtacagcatatacccttcgctggtaccaccgggcagtcactgggagcacagaggcctgtcacccttttgtctatggaggctgtggaggcaacgcaaataggttcggaactcgggaagcatgcgagaggagatgtcctcctagagtcgtccagtctcagggaacaggaacagcgcaggat

SEQ ID NO: 9595 - DNA, 8832 bp, synthetic construct
  misc_feature 1..8832: note = source = /note="Description of Artificial Sequence: Synthetic coding sequence"
  source 1..8832: mol_type = other DNA
atgactctgaggcttctggtggctgccctgtgcgctggcatcttggcggaggccccccgcgtgagagcgcagcatcgggagcgggtgacttgcacccggctgtacgccgccgatatagtgttccttctcgatggaagcagctccattgggcggtctaacttcagggaagtccggtcctttctcgagggactggtcctcccgttctccggcgccgcttcagcacagggagtgcggttcgccacggtgcagtactcagacgacccgcggaccgaattcgggctcgacgcactgggatctggaggcgacgtgatccgcgccatcagagaactgtcgtacaagggaggaaacacccggaccggagccgcaattttgcacgtggctgaccacgtctttctgccgcagctcgctcgcccgggagtccctaaggtctgcatcttgatcaccgatggcaaaagccaggatctggtcgatactgcggcccaaaggttgaagggccagggtgtgaagctctttgccgtgggtatcaaaaatgctgatccggaagagctcaaaagagtggctagccagccgacgtccgatttcttcttctttgtgaatgacttcagcatccttcgcactctgttgccactcgtctcccgccgggtttgcaccaccgccgggggagtgccggtcactcggcccccggacgactccacctcggctccccgggatctggtgctgtcggagccgtcctcccagtcgctccgcgtgcagtggactgcagcttcgggaccggtgacgggatacaaggtacagtacacccctttgactggccttggacaaccactgccgagcgagcggcaagaggtgaacgttccagcgggcgagactagcgttcggctgcggggactcagacccctcacggagtaccaggtgaccgtcatcgccctttatgcgaactctatcggcgaggccgtgtctggaaccgcccgcaccaccgcactggaagggccagaattgaccatccaaaacactacggcccattccctgctcgtcgcatggcggtccgtccctggagcgactggttatagagtgacctggagggttctctcaggcggaccgacgcaacagcaggaattgggaccaggacaaggatcggtgctcctccgggatctggagccgggaactgactacgaggtgactgtgagtactctctttggccggtcagtgggaccggcaacctctttgatggccaggaccgacgcatcggtggagcaaactctgcgccccgtgatcctcggcccgactagcatcctgctgagctggaatctggtccccgaagcgcgcggatacaggttggagtggcgccgtgaaacgggacttgaaccacctcaaaaagtggtcctcccttccgacgtgacccgctatcaactggacggtctgcagccgggaaccgaataccgcctgaccctgtacaccctcctggaaggccacgaagtggcgaccccggctaccgtcgtgcccactgggcctgaactgcccgtctccccggtcaccgatcttcaggccactgaactgccgggacaacgcgtgagggtgtcctggtccccagttccgggcgccacccaatatagaatcatagtcagatcaacccagggtgtggaacgcactctcgtgctgccaggctcgcagaccgccttcgacctggatgacgtccaagctggcctgtcctacactgtgcgcgtgtcagctcgggtggggccgcgcgaaggttccgcctcagtgctcactgtgagaagagagccggagactcccctcgcagtgccggggctcagagtggtggtgtccgacgccactcgcgtgcgcgtcgcttggggacctgtgcctggcgcctccggcttccgcatctcttggagcactggatccggaccagagtcgtcacagacgctgccgccggactcaaccgctaccgacatcactggactgcagccggggactacctaccaagttgccgtgtcggtcctccggggccgggaagaaggaccggcagcagtgatcgtggcccggactgatcccctcggacctgtccgcaccgttcatgtcactcaggcaagctcctcatccgtcacgatcacctggactagagtgcccggagccacgggatacagggtgagctggcactcggcccacggacccgaaaagtcacagctcgtgtcgggtgaagccaccgtggccgaactggacggactggagcctgacactgaatacaccgtgcatgtgcgcgcgcacgttgcgggtgtcgacggaccgccggcctcggtggtggtcagaaccgccccggaaccagtgggcagggtgtcccgcctccaaattcttaatgccagcagcgacgtgctgaggatcacctgggtgggagtgacgggagcgacggcctatcggctggcatgggggcgctcggagggcggaccgatgcgccatcaaatcttgccaggaaatactgattcggctgagattcgcggactggagggaggagtgtcctactcagtgcgggttacggcgctcgttggcgacagggaagggaccccggtgtcgatcgtggtgactactcctcccgaagccccgcctgccctcgggactctgcatgtcgtgcaacgcggagagcattccctccggctgaggtgggagccggtcccgcgggcccagggatttctgttgcattggcaacctgaaggtggtcaggaacagtcaagggtgctcggcccagaactctcgtcgtatcatcttgacgggctggaaccggcaactcaataccgggtgcgtctgagcgtgctgggaccggcaggcgagggcccatcggcagaagtgactgcccggaccgaatcaccgcgcgtgccttcaatcgagctgcgtgtggtcgatactagcatcgactcagtcaccctggcgtggaccccagtgtcccgggcgtcgtcgtacattctctcgtggcggcctctgagaggaccaggacaagaggtcccgggatctcctcaaacgttgccgggcatctcatcctcgcagcgggtgactggtctggaaccgggtgtgtcatacatcttctccttgactccggtgctggacggagtgagaggcccagaggcctcagtgactcaaactcctgtgtgcccgaggggactggcagatgtggttttcctgccacatgcaacgcaagacaatgcgcaccgggccgaagccactaggagagtgcttgagaggcttgtgctcgctctgggaccgctgggaccccaggctgtccaggtgggactgttgtcgtacagccaccggcctagccccctgttcccacttaatggatcacatgacttgggaattatcctgcaaagaatcagagatatgccgtacatggatccctcgggaaacaacctgggaaccgctgtggtgactgcacacagatacatgctggcacccgatgctcctggtcgcagacaacatgtcccgggagtgatggtcctcttggtggacgaaccgcttcggggagacatcttcagcccaatcagagaagcccaggcctcgggcctcaacgtggtcatgctgggaatggctggagcggaccctgaacaactccgccgcctcgcgccaggaatggatagcgtgcaaacttttttcgcggtagacgacggcccaagcctggaccaagccgtctcgggactggcaaccgcactgtgccaggcttctttcaccacccaaccgcggcccgaaccgtgcccagtctactgcccgaagggccaaaagggtgagccgggcgagatggggctgcgcggccaggtcggaccacctggggacccgggtctgcccggccggactggagcccctggaccgcagggcccgcccggatcggcaaccgccaaaggtgagcggggtttcccgggggcggatggtcggcctggaagccctggaagggcaggcaatcccggcactccgggagcgccgggtctgaaaggtagcccgggattgcctggaccgcggggagatcctggagaaagaggaccgagaggtcctaaaggagagcctggagctccgggacaagtaatcggcggcgagggtccgggactcccagggcggaagggagatcctggcccatccgggccaccgggaccgcgcggacctcttggggacccaggacctagaggacctccggggctgccaggaaccgcgatgaagggtgacaagggtgaccgcggagaacggggcccgccgggcccaggcgaaggaggaatcgccccgggagaaccgggactgccgggactgccaggatccccaggccctcaagggccggtcggtccgccgggcaagaaaggtgaaaagggcgactccgaggatggagctccaggacttccgggccagccgggatcaccgggagaacaaggcccgcgcggcccgcccggagcgatcggccctaaaggcgacagaggattcccagggcctctgggcgaagctggagaaaaaggggaaaggggaccacccggaccggccggatcgcgggggctcccgggtgtggccggcagacctggggcgaagggacccgaaggcccgcctgggccaacgggaaggcagggcgaaaagggagaaccggggcgccctggtgacccagcagtcgtcggccccgcagtggccgggccaaagggtgaaaaaggagacgtgggacccgctgggccaagaggagcgaccggagtgcaaggagaacgggggccacctggcctcgtgctcccgggggacccgggaccgaagggggaccccggagacagagggccaatcggacttactggacgggccgggccgccgggcgattcaggacctccgggcgaaaaaggagatcccggccggccgggcccgcccggaccggtgggacctcgcggacgggacggagaggtcggggaaaagggcgacgaaggacccccaggtgatccgggactcccgggcaaggccggagagcgcggtctgcggggcgccccaggagttcggggcccggtcggagagaaaggtgaccaaggagatccgggagaagatggaagaaacggatcacctggatcgtccggacctaagggcgaccgcggtgaaccaggccctccgggcccacccggacgtctggtcgataccggaccgggtgccagggagaagggtgagccgggtgatcgcgggcaagagggtcctcgcggacccaaaggggatcctggactcccaggtgctccgggtgagagaggcatcgagggctttcggggcccaccgggtccacagggagatccgggggtgcgcggacctgcgggtgagaagggcgaccgcggcccgcctggcctggacggacgaagcgggctcgacggaaaaccgggcgcagctggtccgtccggcccaaacggagccgccggaaaggctggagatccaggaagagacggactgcccggcctgaggggtgagcaaggcctgcccgggccgtcgggtcccccgggtctgccggggaagccgggggaggatggaaaaccaggtcttaacggcaagaacggcgagcctggcgacccgggcgaagatggccgtaagggagaaaaaggcgatagcggggcatcaggacgcgagggtcgggacggccctaagggtgaaaggggcgcgccgggaatactcggaccgcaggggcctccggggctcccgggcccggtcgggccgccagggcaaggatttccgggagtgccgggcggcaccgggccaaaaggggaccggggcgagactggttcaaagggcgaacagggactgccgggtgagcggggattgaggggtgaaccaggatcggtgccgaacgtggacaggttgctggagacggcgggaatcaaggcctccgcactgcgggaaatcgtggaaacctgggacgaatcctcgggatcgttcctcccagtcccggagcgcagaagaggaccgaagggtgattccggagagcagggtcctccagggaaggaaggtccgattgggtttcctggagagcgggggcttaagggtgataggggtgatccaggccctcagggcccgccaggactggccctcggagaacgcggaccgcccggtcctagcggcctggcaggagagcccggaaagccgggcatcccgggactcccaggacgggcaggcggcgttggcgaggccgggcgcccgggagagcgaggcgaacggggagaaaagggggaaagaggagagcagggaagagatgggcccccggggttgcctggaaccccaggaccaccgggaccacctggtcctaaagtgagtgtggacgaaccaggtccgggcctttcaggagagcaaggaccacccgggctgaagggggccaagggagaaccaggctcgaacggggaccaggggccaaagggagatcgcggagttccaggaatcaaaggggaccgcggcgaacccggcccaagaggacaggacggtaacccgggcctgcccggtgaacggggcatggcgggacccgaagggaaaccgggactccagggcccgcgcggaccgcctggaccggtgggtggacacggtgaccccggcccacccggcgcaccgggattggccggtccggccggaccgcaggggcctagcgggctgaagggagagcctggtgaaactggtccacccgggcggggattgactggacctaccggggccgtgggcctccctggtccgccgggaccgagtggattggtaggaccgcagggatccccggggctgccgggacaggtgggagagactgggaagccaggagcaccaggacgcgacggggccagcggcaaagatggagatagaggtagccctggtgtccccggaagtccgggcctgccgggcccagtcggaccgaagggggaaccggggccgaccggggcaccgggccaggcggtcgtgggcctgccaggtgcaaagggagaaaagggcgcacctggcggtctggccggtgacctggtgggcgaaccaggagccaaaggagacagagggctcccgggaccacgcggagagaaaggcgaggcgggccgcgcgggcgaacctggggacccaggtgaggacggacagaaaggagcaccgggcccgaagggattcaagggagatccaggggtgggagtgccggggagcccgggacctccgggaccgccaggagtcaaaggagatctgggactgcccggactgcccggagcaccgggtgtggtgggattccctggtcagactgggccgcgcggagaaatggggcagcccggcccgagcggggaacgtggcctcgccggacctccaggtcgcgaagggatcccgggcccgttgggcccgccaggaccacctggatcggttggacccccgggggcctccggactgaagggcgacaagggtgatccgggcgtcggtctgcctggtccgcggggtgaacgcggggagcccggtattagaggagaagatggaaggcccggccaggaaggacctagaggtctgaccggacctcctggatctcgaggggaacggggtgagaaaggcgatgtgggctcagcgggacttaagggagataagggagattcagctgtgattctgggaccgccaggcccgcgcggtgcgaagggggacatgggagaacgagggcctcgggggcttgatggtgataaaggtccgaggggagacaatggtgatcctggtgacaaaggctcgaagggggagccaggagacaagggctccgccggtctgccggggctgcgtggtttgctcgggccacagggacagccgggcgcggctggaattccaggcgatccgggcagcccagggaaagacggagtgccgggaataagaggagaaaagggagatgtgggattcatgggaccacgaggactgaagggcgagcggggagtgaagggagcctgcggtcttgacggggaaaagggagataagggggaggccggaccacctggccgcccaggactggctggacataagggtgaaatgggagagccaggagtcccgggccaatccggagctccgggaaaggaagggctcatcggacccaagggagatagaggattcgacgggcagccaggaccaaagggtgatcagggcgaaaagggagagagaggcactccaggaatcggcgggtttcctggaccgagcggcaatgacggctccgccggccctcctggacctccaggctccgtgggaccgagaggaccggagggactgcaaggccagaagggagagcggggtcccccgggtgagagggtcgttggcgctcctggagtgcccggcgccccgggcgaacggggcgagcagggcagaccgggcccggcgggcccaagaggagagaagggggaagctgccctgactgaggacgatatccgcggattcgtgcgccaagaaatgtctcagcactgcgcctgccagggccagtttattgcttcgggatcacgcccgctgccctcctacgcggccgatacggctggatcccagctgcacgccgtcccagtcctgagagtttcgcacgctgaggaagaagagcgggtgcccccggaggacgacgagtactccgagtacagcgagtactcagttgaggagtaccaggatccagaagccccctgggactcggacgatccctgcagcctgccgctggacgaagggagctgcactgcttacaccctgaggtggtaccaccgtgccgtgactggctccacggaggcgtgccacccgttcgtttacggtggatgtggcggaaacgccaaccggttcgggactagagaggcttgtgagcgccggtgtccaccgcgggtggtgcaatcgcagggcaccggcactgcgcaggat

SEQ ID NO: 9596 - DNA, 8832 bp, synthetic construct
  misc_feature 1..8832: note = source = /note="Description of Artificial Sequence: Synthetic coding sequence"
  source 1..8832: mol_type = other DNA
atgacgctacgattgctcgtggccgccttgtgcgccgggattcttgccgaagcgcccagagtacgtgctcagcaccgcgagcgcgtcacctgcactcggctctacgccgctgatattgtgtttctgcttgacggcagctcttctatcggtaggtcgaactttcgcgaggtgaggtccttcttggagggccttgtcctacccttctcaggcgccgcaagtgcccagggggttagatttgctactgttcagtacagcgatgatccacgaactgagttcggtttggacgcgttggggagcgggggtgacgtgatcagggccattcgcgaactgtcttataagggaggcaataccagaaccggggctgccatcttacatgtagcggaccatgtgttcctgccccagctagctaggcccggtgtgccgaaggtgtgtatcctgataactgatggcaaatcacaggacctggtcgacaccgccgcccagaggctcaagggccagggtgtgaagctattcgccgtaggcattaagaatgccgatcctgaagagctgaagcgggtcgctagccaaccgacctcagacttctttttctttgtcaacgatttctcgattctgcgcacactgctgcccctcgtctctagacgtgtctgtactacagccgggggggtgccagtcactaggccacccgacgactccacaagcgcccccagggaccttgtcctcagcgaaccctctagtcaatccctaagggttcagtggactgccgcctccggccccgtcaccggatataaggtgcagtacacaccactgacagggttgggacaacccctgccaagtgagcgccaagaggtgaacgtgccagcaggcgaaacctccgtgcgactcagaggactccgcccactgacagaataccaggtgaccgtcatcgccctgtacgccaactcgatcggggaggctgtctcagggacggccagaacaacagccttagaaggccccgagctgaccatccagaataccaccgcccactctctgctcgtcgcatggaggtctgtgcccggagctacggggtacagagtcacctggagggtcttgtccggtgggccgactcaacaacaggagctgggtccgggacagggatctgtgttgcttagggatctggaacctggcacagattatgaggtgaccgtgtccactctttttggcaggagcgtcggaccagcaacgagcttgatggccaggactgacgcttcagtagagcagacactgcgacctgtgatcttgggacccacttcaatcttgctgagctggaacctcgttcctgaagcaagaggttatagactggaatggcgccgggaaaccggtctcgagcctccacagaaggtggtactcccttctgatgtgacaaggtatcagctggacggactgcagcccggtacagaatatcgactcactctgtatacactgctcgagggacatgaggtagccacccctgcaacggtcgtgccaaccggacccgagctgccagtctcacctgttacagaccttcaagccaccgaactgcctgggcagcgcgtgcgagtcagttggtcacccgttccaggcgccactcaatatcggataatcgttaggtccactcagggagtggagcggacattagtgcttcccgggtctcagacagcgttcgatcttgatgatgtgcaggcgggtttgagctataccgtgagggtgtctgcccgggtgggtcccagggagggctccgctagtgtgcttactgtaagaagagagccggagactcctctggctgtgccaggactccgcgtcgttgttagtgacgccactagggttcgggtcgcctggggaccagtccccggggcctctgggttccgaatctcctggtccacgggatcaggacctgaaagttcccagacgctgccgcccgattccacagccaccgatatcacaggtctccagcctgggaccacttatcaagtggctgtttctgtgctccggggacgcgaggagggcccggcagccgttatcgtagccagaactgatcctttgggcccagtgcgaacagtgcatgtcacccaggctagcagctcctcagttactataacctggacacgcgtgccaggtgctaccggctatagggtttcttggcattccgcgcatggacccgagaaatctcagctggtttcaggcgaggccacagtggcagaactggacggactggagcccgataccgagtataccgtacacgtgcgggcgcacgtggccggggtggatggtccccccgcatctgtggtagtcaggacagcacctgaacccgttggacgtgtgagcagattgcagattttgaacgcttcctccgatgtgcttcgcatcacctgggtaggcgtgactggagcaacagcctatcggcttgcatggggcagatcggaaggaggtcccatgcgccaccagattctgcctggcaataccgactctgccgagatacgaggactggaggggggggtatcctacagtgtgcgggtcacggcacttgttggagaccgggaaggcactccggtttcaatagtagttaccactcccccagaagctcctcctgccctgggaacacttcacgttgtccagaggggcgaacattcgctgcgtctccgctgggagccagtgcctagagcacaggggttcctgctgcactggcaaccagagggtgggcaggaacagtcacgagtgttggggcctgagttatcgagctaccacctggatggtttggaacccgctactcaatatcgagtccggttatcagtccttggccccgccggcgagggaccgtctgcggaggtgacagccagaacagaatctccgcgtgtcccctcgatcgaactgcgggtggtggacacttctattgattccgtgacattggcatggactccggtatcaagggcttcttcatatattctgtcgtggagacccctgcgcgggcctggacaagaggttcccggatctccacagaccctgcccggaatcagctcttcgcagcgagtcactggactggaacccggtgtgagctacatcttcagcctgaccccggtgttggatggcgtgcgaggcccagaggcgtctgtgactcagacccccgtctgtccccgcggtcttgccgatgtcgtctttctcccgcatgcgacacaagataatgctcatcgcgctgaagccactcgacgggtactcgaacgcctggtcttggcattgggaccccttggcccgcaggccgtgcaggtaggcctgttatcatatagccataggccatcacccctgttcccactgaacggttcgcacgaccttggtataattttacagagaattagggacatgccttacatggatccctccggaaacaacctggggacagctgtagtgacagcccaccggtacatgcttgcacctgacgcccctggcaggagacagcatgtgcccggtgtcatggtgctgctggttgatgaaccactgcggggcgacatctttagccctatccgagaagcacaagcctcaggtctgaatgtagtcatgctaggcatggccggggccgatcctgagcagcttcgaagactcgccccggggatggacagtgtgcagacctttttcgcagtcgacgacgggccttccctggaccaagctgtgtcagggctcgcgacagccttatgtcaggcatcttttacaacacagccgagacctgagccatgtcccgtttattgtccaaaaggccagaagggcgagcccggtgaaatggggctaagaggacaggtggggccccctggtgaccctggattgccggggagaacaggcgcacccgggccgcaggggcccccaggtagtgcaaccgccaagggggaaagaggattccccggcgccgacggcagaccaggatctccggggagagcgggcaatcccgggactccgggggcccctggccttaaggggagccctggcctccctgggcctaggggagatcctggtgagcggggccctagaggaccgaagggggaacccggagccccaggtcaggtcatcggaggcgagggccccggattacccggtagaaagggagatccaggtccttccggcccgcctggcccaagagggccgctgggggaccccggcccacgcggtccacccggcttgccaggcactgcgatgaaaggcgataagggggaccgcggggaaaggggtcccccggggcccggagaggggggtatcgccccaggggaaccaggcttgcccggattgcctggatcccccggcccacagggacccgtgggccccccagggaagaaaggagaaaagggggatagtgaggatggggcaccagggctgcccggacagcccggtagtcccggagaacagggtccaagaggccctcccggggcaattggaccgaaaggtgatagagggttcccagggcctttgggcgaggccggtgaaaagggggagcggggcccccccgggccagcaggaagtcgcggcctgcctggcgtggctgggaggcccggcgcaaagggtcccgaaggacccccaggcccgaccggaaggcagggtgaaaagggagagcctgggagaccgggtgaccctgcggtggtggggcccgcagtcgccggccctaaaggcgagaagggtgatgtggggcctgctggacctcgaggcgcgactggtgttcagggtgaacgcgggccacctgggcttgttctgccgggagatcctgggcctaagggcgacccaggagatcggggtcccatagggctcaccggccgagccggtcccccaggcgattctggacctccaggagaaaagggcgaccccgggaggccgggaccgcctgggccagtgggccctagaggccgcgacggggaggtgggcgaaaagggggacgaaggacctccaggtgatccgggattgcccggcaaagcaggcgagagagggttgagaggcgcacccggcgtacgtggccccgttggtgagaagggtgatcagggcgacccaggggaggatgggaggaacgggagcccaggctcaagtggccctaagggcgaccgaggggaaccaggcccaccgggtccacccggcagactcgtcgacaccgggccaggcgcgcgggagaaaggtgagcccggcgatcgaggtcaagagggacctcgtggccctaagggcgatcccggcctccctggggcacctggcgaacggggtatagagggcttccgcggcccgccgggccctcagggtgatcccggagtccgtggccctgctggtgagaagggggaccggggaccacccggccttgacgggcgcagtggcctggacggaaagcccggggcagctggacctagcggacccaatggagctgcggggaaagccggagacccaggcagagacggtcttccagggcttcgcggggaacagggtctgcctggcccgagcggacccccgggtctacccggcaaacccggggaggatgggaaaccaggtctgaatgggaaaaacggagaacccggagatcccggagaggatggtcgcaagggcgagaagggcgatagcggggcctcgggtcgcgaaggtagggacgggccgaaaggggagcggggggcccccggcatcctcggtccccaaggaccacctgggctgcccggacctgtcggcccccctggacagggatttccaggcgttccgggagggaccggaccaaaaggcgacaggggggagaccggctcgaagggcgagcaaggactgccaggagagaggggcctgaggggggaacctggctcggtgccgaacgtcgatagactgctcgagactgcaggcataaaggctagtgcactgagagagattgtagaaacctgggatgaatcatccgggtcttttttgcctgtgcccgagcggagacgggggcccaaaggggatagcggtgagcagggccctcctggcaaggaagggccgattggctttcctggagagaggggcctgaagggggaccggggcgatcctggaccccagggtccccccggactcgctctgggagaacggggccctccaggaccctctggacttgcaggcgagccgggcaaaccagggatccctggcctccctgggagggccgggggagttggggaagccggacgacctggcgaacgcggtgagcgcggtgagaagggcgaacgtggcgagcaaggccgcgacgggccacctgggttgccagggactcccggcccaccaggcccccccggaccgaaggtgtccgtggacgagccaggacctgggctgagcggagagcaggggcctcctgggctcaaaggagctaagggagaaccaggctccaacggagaccaagggcccaaaggagatcggggtgtgcctggcattaaaggcgatcgcggcgagccgggaccccgtggccaggacggcaatccgggcctgcccggtgaacgcggcatggcgggaccagagggaaaacctggcctgcagggcccaagggggccacccggccccgtgggagggcacggtgatccaggcccacctggagcgccgggactggctgggcccgcgggcccccagggtccgtcggggctgaaaggagaacctggcgagacggggccgcccggcaggggcttaacaggaccgactggtgcagtaggtttaccagggccccctggcccttccggccttgttggccctcagggtagccccggacttccaggacaggtaggggaaactggaaaaccgggggccccgggtagggatggggcgagcggaaaagacggtgataggggatcaccaggcgtgcccggctcccccgggctgcccggtcccgtggggcccaaaggggaacctggtccaacgggcgccccagggcaggccgtagtcggcctccccggggccaagggagagaagggcgctcctgggggcctggccggggacctggtgggggaacctggggccaagggcgatcggggattgcctggaccaagaggtgagaagggcgaagccgggagggctggggaacccggagatcccggtgaggacgggcagaaaggcgcccctgggccaaagggttttaagggggacccgggagtcggggttccaggcagccccggccccccggggccacccggtgtgaagggggatctgggtctgcccggattgcccggcgcacctggagttgtaggctttccaggccagactggacccagaggcgaaatggggcagcctggcccgagcggcgagagaggcctggcgggtccgccggggagggaaggtatacctggaccactgggcccgcctggtcccccggggagcgtggggccacccggggcgtctggtctgaagggagacaagggcgaccccggtgtgggcctaccaggtcccaggggagagaggggggagcccgggatcaggggggaggatgggaggcccggccaggaagggccccgcgggctgactggacctcccggtagcagaggagaaagaggtgaaaaaggtgatgtaggatccgctggtttgaagggagacaagggcgattcagctgtgattctggggccaccgggcccaagaggcgcaaagggcgacatgggtgaacggggtccccgcggcttggacggggacaaagggcctaggggagacaatggtgaccccggtgataagggtagtaagggcgagcctggggacaaggggtctgcaggtctaccaggacttcggggactcttaggcccccaaggacagccaggagcagctggaattcccggtgaccccggctcccccggcaaagacggcgtgcccggcattcgcggggagaagggcgatgtggggttcatgggcccacgaggcctgaagggcgagcgcggagtgaagggagcctgcggattagatggggaaaagggagataaaggcgaggcgggccctcccggacgacctgggttagccggccacaaaggggaaatgggcgagccaggggtccctggacaatcaggcgctcccggcaaagagggtctaattggaccaaaaggtgatcgggggttcgacggccagccgggacctaagggtgaccagggagagaagggggagcgtggcactccaggcatcggaggcttccctggtccctccggcaatgatggatcggcaggccctccagggcctcccggttccgtcggaccgcgaggacctgaggggctgcagggacaaaagggagaacgggggccacctggggagagagtggttggcgcccccggcgtgcccggcgccccaggcgaacgtggtgaacaggggaggcctgggccagcaggaccaaggggcgagaaaggagaggctgccttaaccgaagacgatattcggggttttgtaagacaggagatgtctcagcactgcgcgtgtcagggccagttcattgcctctggctcacggcccctgccaagctacgcggccgatacagcgggctcccagctgcacgcggtgccggtccttagggtaagccacgctgaggaggaagaacgggtcccaccagaggacgacgagtattctgaatactcagaatattccgtcgaggaataccaggatcctgaggccccatgggatagcgatgatccctgttccttgccactagacgaagggtcatgtacagcttacaccctgaggtggtatcaccgggctgtgaccggcagcacagaagcatgtcacccatttgtgtacggcggatgcggggggaatgccaataggtttggcactagagaggcttgcgagcgaaggtgtcccccacgggtggttcagtcgcaaggaaccggtacggctcaggac

SEQ ID NO: 9597 - DNA, 8832 bp, synthetic construct
  misc_feature 1..8832: note = source = /note="Description of Artificial Sequence: Synthetic coding sequence"
  source 1..8832: mol_type = other DNA
atgactctgcgtctgcttgtcgcagcactgtgtgcaggcatactggctgaagcgccgagagtgcgcgcacaacatcgggaacgtgtgacttgtacccgcctgtacgcagccgacatcgtgtttctcctcgatggatcatcgagcatcggacgctccaactttagagaagtgcggtcatttctggaaggattggtgcttcctttttccggagcagcctcagcccagggagtgagatttgcaactgtgcaatattccgatgatccacgcaccgaatttgggctcgatgcacttggatccggtggtgatgttatccgagccattagggaattgtcctacaagggcggcaacacccgtacgggagcagcaattctgcacgtcgccgatcacgtattcctcccccaacttgcaaggcctggagtgcctaaggtgtgtatcctgattaccgacggaaagtcccaggatctggtggataccgccgcacaaagacttaagggtcagggagttaagctgttcgccgtgggcatcaaaaatgctgaccctgaagaactcaaacgcgtggcgtcccagccgacctccgatttcttcttttttgtgaacgattttagcattctgaggactcttctgccacttgtcagtagacgtgtctgcaccactgctggaggagtcccagtcactagaccgccggacgattcgacgagcgcccctagagacttggtcctgtccgaaccctcttcgcagtccctgagggtgcagtggactgcagccagcggtccagtgaccggctacaaggtgcaatacactcctctgactggcctcggccagcctctgccgtccgaacgtcaagaagtcaatgtcccagctggtgaaacctcggtgcgccttcgcggtctgcgccctcttaccgaataccaggtgactgtcatcgcactttatgcaaactccataggcgaggcagtgtcagggactgcgcgcacgaccgcacttgaagggccggaacttactatccaaaacacgacggcccattcgctgctcgttgcatggcgctcggtgcctggcgcgactgggtaccgagtcacctggcgggtgctgtcgggcggtccaacccaacaacaggaattgggacccggtcaaggcagcgtcttgcttagggatcttgaacctggaacggactacgaagtgactgtctcaaccctcttcggtcgttccgtgggccccgcaacctcgcttatggcccggaccgacgcatcggtggagcagaccctccggcccgtgattctgggccctactagcattctgctttcctggaacttggtgccagaggcgaggggatacaggctggagtggcggcgggaaaccggtctggagcctcctcaaaaagtggtgctgccatcagacgtgacccgataccagctggacgggcttcaacccggtactgagtacagactgacgctttacaccctgttggaaggacatgaagtggcgactccagcgaccgtggtgccaaccggacctgaattgccagtcagccctgtgaccgatctgcaagcaaccgagcttccggggcaacgtgtccgggtgagctggtcgccagtcccaggggcaactcagtaccgaattatcgtgcgttcgactcagggagtggagcggactcttgttctgccagggtcacaaacggcctttgatcttgacgacgtccaagcaggactctcctacactgtgcgggtgagtgcaagagtgggacctagagaaggatccgcttcggtgcttacggtgcggcgggaaccagaaactcctctggcagtcccaggcctgcgggtggtggtgtcggacgcaaccagggtgagggtggcatggggaccagttcccggggcatcaggctttcgtatttcctggtcaaccggttcaggtccagaatcatcacaaacccttccaccagactcgaccgccactgatataacgggactgcagcctggtactacctaccaagtggccgtgagcgtgctgagaggaagagaggaaggtcctgctgcagttattgtcgcgcgtacggatccattgggaccagtgagaaccgtgcatgtgacccaggcgtcgtcatccagcgtgactatcacctggactagagtgccaggagccacgggttaccgcgtcagctggcattcggcgcatggacccgagaagtcgcaacttgtcagcggggaggccactgtggccgagctggatggacttgaacctgatactgagtataccgtgcacgtgcgagcccacgtggcaggcgtggatggtccaccagcgagcgtggtggtcagaactgcaccggaaccagtcggtcgtgtgtcgcggctgcagatccttaatgcgtcctcggacgtgctgcggattacctgggtcggtgtcaccggagcaactgcataccggctcgcatggggccgatccgaaggaggtccgatgcgtcaccagattctgccaggaaacaccgattctgcagaaattcggggacttgaaggaggagtttcctactccgtcagagtgacggcattggtcggcgatcgtgaaggaactccagtgtctatcgtggtgactactccgccggaggcaccgcctgcactggggactctccatgtggtgcagcggggggaacatagccttagactccgatgggagccagtgccgagagcacaaggatttctcttgcactggcagcctgagggtggtcaggaacaatcccgcgtgcttggtccagaactttcgtcctaccacctggatggccttgaacctgcaactcagtaccgagtgcggctttccgtgcttgggcctgcaggtgaaggaccttcggcagaggtcaccgcccggactgagtcgcctagagtgccatcaatcgagctccgagtcgtcgatactagcatcgactccgtgaccttggcatggacccctgtcagcagggcatcgtcttacatcctttcatggcgtccccttagaggtcctggccaagaagtcccgggaagccctcagactctccctggaatctcatcgtcacaacgcgtgaccggactggaacctggtgtcagctacattttcagccttaccccagtccttgacggagtgcgcggacccgaagctagcgttacccagacccctgtgtgcccgagaggtcttgcagacgtggtgttcctcccccatgcaacccaagataacgcccatagagcggaagccacgagacgcgtcttggaacggctcgtgctggcactcggtcctctcgggccccaggcagtgcaagtgggacttctgagctacagccatagaccctccccgctgtttcccttgaacggatcccatgatctgggcatcatcctccaaaggattcgggacatgccatacatggatccttcggggaacaacttgggtactgccgtggtcactgcccaccgctacatgctcgcccctgatgcacctggccgacgacagcatgtgcctggagtgatggtccttctcgtcgatgaaccgctgcggggtgacattttctcaccaatccgggaagcacaggcatcgggtctgaacgtggtgatgcttgggatggccggcgcggaccctgaacaactgagacggctggcacccggcatggatagcgtccagacttttttcgccgtggatgatggtccgtcccttgaccaggccgtctcgggtttggcaaccgcgctgtgtcaggcctcgttcaccacccaacctcgtcccgaaccttgtccggtgtactgtcctaagggccaaaagggggaacctggtgagatgggtcttagaggccaagtcggacctccaggtgatccaggattgcccggtagaacgggagcccctggcccacagggacctcctggatcagcgaccgcaaagggcgagaggggctttcctggagcagatggccgacctggttcacctggtagagcaggcaacccggggactccaggcgcgcctggtcttaaggggagccccggacttcccggcccaaggggtgatccaggggagaggggtcctcgcggtccaaaaggagaaccaggggcaccaggccaagtcattggaggggaagggcccgggctcccgggtcgcaagggcgatcctggtccctctgggccacccggtccaaggggccctctgggtgaccccgggcctcgcggccctcctggactgccaggaacggcaatgaagggtgataaaggggatcgcggtgaacgtggtccacccggacctggagaaggaggaatagcacccggagaaccgggcttgccagggctgccgggttctcctggacctcaaggccctgtcggtccccctggaaagaagggagaaaaaggggattccgaggatggagcacctggacttccgggtcagcctggctcaccgggcgagcaggggccccgcggtccaccgggagcaataggacccaagggtgaccgcggatttcctggtccgttgggtgaagctggggagaagggtgagaggggacctccaggtcctgcaggttcccggggactgccgggtgtcgccggcaggccaggcgcaaagggaccagagggtcctccgggccccaccggacgacagggagagaagggggaaccaggacgtccaggtgatccggcagtggtgggtcctgccgtggcaggacctaagggggagaagggagacgtggggccggcaggaccaagaggagcaaccggcgttcagggcgagagaggaccacctggcctcgtgctgcctggggatccaggtcccaaaggagatccaggggatagaggtcccattggactcaccgggagagcaggccctccaggagattcgggtccaccgggagagaagggcgatcccgggcggcccggtccaccagggcccgtggggccgagggggagagacggagaggtgggtgaaaagggagatgaaggccccccaggagatccaggactccccggaaaggccggggagcgaggacttcggggtgcccccggggtcagaggcccggtgggagaaaaaggtgaccagggagatcctggagaagatggcaggaatggctcaccaggaagctcgggaccaaaaggtgaccgcggagaaccaggacctcccggtcctcctggtaggctggtggataccggtcccggtgcgcgggaaaaaggcgagccgggtgacagaggtcaagaaggcccacggggacccaagggtgaccccggtctgcctggtgccccgggcgagaggggaatcgagggttttcgcggccctccggggccacagggtgatcctggagtccgaggccctgcaggggaaaaaggcgaccgggggccaccgggattggacggacggtcgggactggatggtaagcctggggcagcaggacctagcggccctaatggagcagccggcaaggccggagatccgggtagagatggactccctggactgcggggtgaacaggggctccctgggccatcgggtccgcctgggcttccaggcaagcctggagaagatggaaagccagggctcaacggcaagaacggagaaccaggcgaccctggcgaggatggaaggaagggggaaaagggcgattcaggagcatcgggcagagaaggcagagatggacctaagggagaaagaggagcacctggtatactgggccctcaaggaccccctggtctgccaggtcccgtggggccaccaggacagggattccctggagtgcccggtggcaccggaccaaaaggggaccgcggtgaaaccggatccaaaggagagcagggactcccaggagaaagaggactgagaggagaacctggttcagtgcccaacgtggataggcttcttgaaactgccggtattaaggccagcgcccttcgcgagattgtcgaaacctgggacgaatcctccggatcctttctccccgtacctgaacgcagaagaggtccaaagggtgattccggagagcaaggcccacctggcaaggagggaccaattgggttcccaggtgaacgaggacttaaaggtgacagaggggatccgggaccacagggacctcctgggctggcattgggggaaagaggacctcctggcccctcggggcttgcaggagagccgggaaagcctggaatcccagggctccctgggagagcaggaggggtgggtgaagcggggaggcccggtgagagaggggagagaggcgaaaagggagaaagaggtgaacaaggacgggacggaccacctgggctgccaggcactcctggaccacccggtccccccggacctaaggtgtcagtcgatgaacctggacccgggctctccggggaacagggtcctccaggcctgaagggagcaaagggtgagccgggatcgaatggcgaccagggtcctaaaggggatagaggtgtgccaggcattaagggtgatcggggggaaccaggaccaagaggacaggacggaaacccagggctcccaggagagagaggaatggcaggtcctgaaggaaagccaggtttgcaaggtcctcggggaccccccggacctgtgggcggtcatggagatccaggcccacccggtgcacccggactggcaggccccgcaggaccccaggggccttcaggactcaaaggggaaccaggtgaaactggaccaccagggagaggtctgactggtcccacgggagcagtcggacttcctggtcctcccggcccttccgggctggtgggaccgcaaggaagcccagggctgcctggccaagtcggagagactggaaagcctggtgccccaggtagagatggagcaagcggaaaggatggagacagaggttcaccaggagtgccaggatcgcctggtctgcccggaccagtgggtcctaaaggtgagcctggtcctaccggggcgcccggtcaggccgtggtgggacttccaggcgcaaaaggagaaaagggcgccccagggggtttggcaggtgatctggtcggagaaccaggagcaaagggagatcgcggattgcccggcccacgcggcgaaaaaggagaagccggacgagctggcgagcccggggaccctggggaagatggacaaaaaggtgcacctgggccaaagggatttaagggcgatcctggggtgggcgtgcctggctctcccggccctcccggtcctccgggagtgaagggtgatctgggtttgccaggactgccaggagcccccggtgtggtgggctttccaggccaaaccggacctagaggtgaaatgggtcagccgggaccttcgggagagcgaggcctggcgggaccgcctggtagggaagggatacctggcccccttggaccacctggccccccggggagcgtgggcccaccgggtgcctccgggctgaagggagacaaaggagatcccggagtgggtttgccaggccctcgtggcgagagaggagaacccggaatcagaggggaggatggaaggccagggcaggaaggtcctcgaggacttacgggaccgcctggcagccggggcgaaagaggtgagaaaggagacgttggctcagcaggactgaaaggagataaaggggattccgcagtcatcctcggacctcccggtcctcgaggtgcaaagggtgatatgggtgaaagaggtcctcgcgggctggacggagacaagggtccccggggagataacggcgacccgggcgataagggctccaaaggggaacccggtgataaaggatcagctggtttgcccggtctgcggggtctgttgggcccgcaaggtcaacccggagcagcgggcataccaggcgaccctggctcacctggcaaggatggtgtgcccggaattcgaggggagaagggggatgtgggattcatgggaccacgcggcctcaagggagaaagaggagtaaagggagcgtgcggccttgacggagaaaaaggggataaaggagaggccgggccaccgggtcgtcccggcctcgcggggcataagggggagatgggagaacctggagtccctggacaatccggagcaccgggaaaggaaggccttattggtcccaaaggagatagaggcttcgacggtcagcccggacctaaaggggaccagggtgagaagggagaacgcgggactccaggaattggtggatttcctggtccctcaggaaatgatggttctgccggtcctccagggccacctggttctgtgggacctagaggaccagaaggacttcagggtcagaagggtgagcgcggtcctcctggcgagcgggtcgtgggtgcccccggagtccccggtgcacctggagagcgtggagaacaaggacgccctggacccgccggtccaaggggtgaaaagggcgaagcggcgctcactgaagatgatattcggggatttgtgcgccaggaaatgtcgcagcactgtgcatgtcagggacagttcatcgcctccggaagccggccacttccaagctacgcggcagacaccgccggttcccaattgcacgcagtgcccgtgcttcgcgtctcccacgcggaggaagaagaacgggtgcctcctgaagatgatgagtattccgaatactcagagtactccgtggaagaataccaagatccggaagcaccatgggattcagacgacccttgttccctgccgttggatgagggttcgtgcactgcatacacgctgcggtggtaccacagagccgtgaccggttccaccgaagcatgccacccatttgtgtacggtggatgcggcgggaacgcgaaccgatttggaactagagaagcatgcgaaagacgctgccctccacgcgtcgtgcaatcccaaggtaccggtacggcacaagac

SEQ ID NO: 9598 - DNA, 8832 bp, synthetic construct
  misc_feature 1..8832: note = source = /note="Description of Artificial Sequence: Synthetic coding sequence"
  source 1..8832: mol_type = other DNA
atgacgctccggctgcttgtggccgcactgtgcgccgggatcctggcagaggctcctcgggtccgggcgcaacatcgggaacgggtgacttgtacgagactctacgcggctgacatcgtgtttctgttggacggttcctcgtcgatcgggcggtccaacttcagggaggtccggtccttcctcgaggggctggtgctgcctttcagcggcgcagcctccgcccagggagtccgctttgccaccgtgcagtacagcgacgatccaagaaccgaattcggacttgatgccctgggatcaggaggggacgtcattagagcgatccgggagctctcgtacaaaggaggaaacactagaaccggagctgcgattctgcacgtggccgaccatgtctttctgccacagttggcccggccgggagtgccgaaggtgtgtattctcattaccgacggaaagtcacaggacctggtggacaccgccgctcaacgactgaagggacaaggagttaagctgttcgcggtgggtatcaaaaacgcggacccggaggaactgaagagggtggccagccagccaacgtcggatttcttcttctttgtcaacgacttttccattttgcgcactctgctgccgttggtgtcgagacgtgtctgcaccaccgcaggaggagtgccggtcacgaggccaccggacgattcgacttctgcaccgcgtgacctggtgttgtcggaaccatcgtcccaatccctcagagtgcagtggactgccgcatcggggccagtgaccggctacaaggtgcagtacactccgctcaccgggctgggccagccactgccgtcggaacggcaagaagtgaacgtcccggccggagaaaccagcgtgcggttgcgcggactgcggccgctgaccgagtaccaagtcaccgtgatcgccttgtacgcaaattctatcggagaagctgtctccggtaccgcacgcaccaccgccctggagggaccagagctgaccattcagaatacgacggcccactcactgttggtggcgtggcgctcggtgccgggcgcaacggggtatcgggtgacgtggagggtgctgtccggcggcccaactcaacaacaagaactcggaccaggacagggctccgtgctgctgagagatctggaaccggggaccgattacgaggtgaccgtctcgaccttgtttgggcgctccgtcggcccagccacgtcgctcatggcccgcaccgacgccagtgtcgaacaaaccctgcgccctgtgatcctgggacccacctcaatcctgctttcttggaacctcgtgcccgaggccagaggataccgcctcgaatggcggcgggaaaccggacttgagccaccacagaaagtagtcttgccgtcagatgtgactcgctaccagctcgatggactgcagccgggcactgagtacagactcactttgtacacccttctcgaagggcacgaagtggcgacgccggccaccgtcgtgcctactggaccggaactgccggtgtcaccagtgactgatctgcaagccactgaactcccaggtcagcgagtgagagtgagctggtcaccggtgccgggagcaactcagtaccgcatcatcgtgcggtccacccagggagtggagcggaccctcgtgctgccgggatcgcagactgcattcgacctggacgacgtgcaggcagggctctcttacaccgtgcgagtctcagcccgagtgggccctcgcgaaggaagcgcatccgtgctgaccgtgcgcagggagccggaaaccccgctcgcggtgccagggctgcgggtggtggtgtcggacgcgactagggttagggtggcatgggggccagtgccaggagcgagcggttttagaatcagctggtctacgggatccggaccggaatcgagccaaaccttgccgcctgattcgaccgccactgacattactgggctccagccaggcactacctaccaggtcgcagtttccgtgctgcggggccgggaagagggaccggcggccgtgatcgtcgcgcggactgacccgctggggcctgtgcggacggtgcatgtgacccaggcgagcagctcctcagttactatcacgtggacgcgggtcccgggcgccactggataccgcgtgtcctggcattcggcccatggaccggagaagtcccagcttgtgtcaggagaggccactgtagctgagttggatggcctcgagccggacaccgaatacaccgtgcacgtgcgcgcccatgttgcaggagtcgacggaccaccggcgtccgtcgtggtgcgtaccgccccggaaccagtgggacgcgtgagccgcctccagatcctcaacgcatcttcagacgtgctgcgcatcacctgggtcggagtgacgggagcgactgcatacagattggcttggggtcggtcggaagggggaccgatgcggcaccagatcctgccgggcaacaccgatagcgctgaaatcagaggcctggagggaggcgtaagctactccgtgagagtgaccgctctggtaggcgatcgggaaggaaccccggtgagcatcgtcgtgacgacccctccggaagcgccgccggcactcggaaccctgcacgtggtgcagcgcggggagcacagcctgcggcttcggtgggagccggtgccgagggctcaaggatttctgctccactggcagccggaagggggacaagaacagtcgagggtcctcggcccagaactgagctcgtatcatctggatggactggaacctgcaactcaataccgtgtgagactgtccgtcctgggtcctgccggggaaggcccgtccgcggaagtgaccgcgaggaccgaatcacctagagtgccctccattgagctccgggttgtggacaccagcatcgattccgtgactctggcctggactccagtctcacgcgcctcctcgtacatcctctcgtggcgcccgcttcgcggcccgggccaggaagtcccaggctcgccgcagaccctcccaggcatctcctcgtcacagcgcgtgactggcctggagccgggagtgtcgtacattttctccctcactcccgtgctggacggggtgcggggcccagaggcctcggtcacgcaaaccccagtgtgccctagggggctcgccgacgtggtgttcctgccacacgcgacccaggacaatgcgcacagggctgaagcaactcggcgcgtgctggagaggctggtgctcgccttgggcccactgggaccgcaagctgtccaggtggggctcctttcttacagccatcgcccgtcccctctgttcccgctcaacggcagccatgaccttggaattatcctgcagcgcatccgggacatgccatacatggacccgtcgggcaataacctgggaactgctgtcgtgaccgcccaccgctacatgcttgctccagacgcgcccggccgcagacaacatgtgcctggagtgatggtgcttctggtggatgaaccgttgaggggagacatcttctccccgatccgggaagcgcaggcgagcggattgaatgtggtcatgctgggcatggccggtgctgacccagagcaactccggcggctggctccgggtatggattcggtccaaacgttcttcgctgtggacgatggaccgtccctggatcaggctgtgtccggcctggcgactgcactgtgccaggcatcattcactacccagccgcgcccggaaccatgtcctgtgtactgcccgaaaggacaaaagggggaaccaggagagatgggactccgggggcaagtcggaccaccaggcgatcctggactgccgggacggactggagccccgggcccacaagggccccctggatccgcgactgccaagggggagagaggattcccgggagctgatgggcggccgggaagtccgggccgggctggtaacccggggacccctggcgccccgggacttaaaggttcgcccgggctcccggggccgaggggtgacccaggagaacggggcccgaggggaccgaagggcgagccaggcgcacctggacaggtcatcggaggcgagggaccagggctgccgggacggaagggtgacccgggaccaagcgggccgcctggaccacgcggacctctcggagatcccggaccgcgcggcccacctggactccctgggaccgccatgaaaggcgacaaaggagatcgcggcgaacgcggacctccgggaccgggcgaagggggaattgcaccgggcgaaccgggcctgccagggctccccggctcacccggaccgcagggaccggtgggcccgccgggaaagaagggcgaaaagggcgactctgaggacggtgcacctggactgcccggccagccgggctcgccaggagagcaaggaccacgtggcccgccgggagcgatcggaccaaaaggtgaccgtggattccccggcccgctcggggaagcaggagaaaaaggagaacgagggccacctggccccgccggctccagaggactcccgggcgtggcaggtaggccgggtgctaagggcccagagggtccgccaggcccaactggtagacaaggtgaaaagggagagccgggacggcctggagatcctgcagtggtcggacctgcagtcgcaggtccgaaaggggaaaagggagatgtgggacctgcgggaccccgcggggcaactggcgtgcagggagaacggggcccgccaggactcgtgctgcctggggaccccggaccaaagggggatcctggcgatcggggcccgatcggacttactggtagggccggacctccgggcgattccggaccaccaggggagaaaggcgacccaggtcggcctggaccaccaggaccagtcggtcctcgaggcagagatggagaagtcggcgagaagggagatgagggtcccccgggggaccccggcctgcctggcaaggcaggagagcggggcctgagaggcgccccaggcgtcaggggaccagtcggagaaaagggtgaccagggcgaccctggagaagatggaagaaatggcagccctggatcctccgggccaaagggcgacagaggggagccgggaccacctgggccaccggggcggttggtggatactggcccaggagctcgggagaagggggagccaggagatcgcggacaagagggaccgagaggccctaagggcgaccctggactccctggcgccccgggagagcgcggaatcgaaggattcagaggaccgcccggtccccagggggacccaggagtgcgcggtcccgccggtgaaaaaggggatcggggtccgccgggactcgatgggagatcaggcctcgacgggaaaccgggagccgctggaccgtccgggcctaacggagcagcgggaaaagctggagatcccggacgggacggactgccgggactgcgcggcgaacaagggctgcccggcccgtccgggcccccaggactccctggcaaaccaggggaagatggaaagccggggctcaacggaaagaatggagagccgggtgatcctggagaggacggacgcaagggggaaaagggggattccggagcatccggacgcgaaggccgggatggcccaaagggagagagaggagcgcctggcatcctcggcccgcagggaccgccgggtttgccgggaccagtcgggcctcctggacagggatttccaggagtgccggggggaaccggacccaagggcgatcggggtgagacgggaagcaagggggaacaagggttgcctggcgaacgcggtctgcgtggggaacccggatcggttcccaacgtcgaccgcctgctggaaactgcgggtatcaaggccagcgccctgagggaaatcgtagaaacttgggacgagagctcaggctccttcctgccagtgcccgagcgccgtagagggccgaagggcgactccggggaacagggccctcctggaaaagaaggacctattgggttcccgggagagagaggattgaaaggcgatagaggcgaccctgggccgcaaggtcctccgggacttgcattgggtgagcgcggaccccctggcccgtcgggattggctggtgaaccaggtaaacctgggatcccagggcttccgggacgcgctggcggcgtgggggaggcgggcagaccaggagaacgcggggaaagaggagagaagggggagcggggtgagcagggtagagacgggcccccgggacttccgggcaccccgggaccaccggggccaccgggaccgaaagtctccgtggacgagccgggtccgggactcagcggcgaacagggcccgccagggcttaaaggagcgaagggcgagccaggatcgaacggggatcagggaccgaagggagatcggggagtccctggaattaagggagatcgcggtgagccgggaccacgcggccaggacggaaaccctggccttcccggagagcggggcatggcgggaccggaaggtaagcccggccttcaaggtccacgcgggccgccgggtcctgtcggcggacacggcgacccgggaccgccgggtgctccaggactggccggtcctgccggaccccagggaccaagcggccttaaaggagagcctggagaaacggggccaccgggcagaggattgaccggccctactggtgccgtcgggctgccgggaccaccaggaccctcgggcctggtgggcccgcaaggttcaccaggactgccaggacaggtgggagaaactggtaaaccaggtgcgccaggtcgggacggagcaagcggaaaggatggtgatagaggtagcccaggggtaccaggatcgccaggcttgcctggtccagtgggcccaaagggggaaccggggcctaccggcgccccgggacaagcggtggtgggactgccgggtgcaaagggtgagaagggagcccccggaggccttgcaggggatcttgtgggagaacctggtgccaagggagacagaggtctgccagggccgcgcggagagaagggcgaggccggacgagccggcgagcctggcgatcccggagaggacggacagaagggtgccccggggccgaagggattcaagggggacccgggcgtgggagtgccgggatcaccggggccgccaggcccaccgggagtcaagggcgacctgggactgcctggattgccgggagccccgggagtggtgggtttcccgggtcagaccggtccgcggggagaaatgggtcaacccggtccgtccggggagagaggattggccggacctcctgggcgggagggcatcccaggcccgcttggaccgcctggcccaccgggctcggtgggtccgcccggagcgtcaggacttaagggtgataagggtgacccaggcgtgggtctgccgggaccgaggggggagcggggagaaccgggcatcaggggcgaggacggcagaccgggccaggaaggcccgcggggcctgactggaccgccgggatcccgcggagaaagaggagaaaagggagatgtcggatcggctggactcaaaggcgataagggagattcggccgtgatcctgggaccgccaggcccaagaggagcgaagggagacatgggggaacgcggcccgcgcggactggacggagacaaggggccgagaggtgacaatggggatccaggggataaaggatcgaagggagagccgggtgacaaaggaagcgccggactgcctggcctccggggattgctgggaccgcagggacagccaggcgcggccggaattcccggcgacccagggagccctggaaaggacggtgtgccgggaatcagaggagagaaaggtgatgtgggatttatgggaccgagaggtcttaaaggagagcgcggggtcaagggagcctgcggactggatggagagaaaggtgataagggggaggccggaccgccaggccgccctggactggcgggccacaagggtgaaatgggcgaaccaggagtgccgggacagtcgggagcgccaggaaaggagggcctgattggacctaagggcgatcggggattcgacggccagcccggcccaaaaggggatcagggtgaaaaaggagaacgcgggaccccaggaatcggcggattcccggggccgtcgggaaatgatggatcggctggtccgccgggacctccgggctcagtggggccacgcggaccagagggactccaggggcaaaaaggagaaaggggtccgccgggggagcgcgtggtgggcgctcccggagtccccggcgcccctggagagcggggcgaacaagggaggcccggacctgcagggcctcgcggcgagaagggcgaagctgccctcactgaagatgatatccggggattcgtgagacaagaaatgagtcagcattgcgcgtgccagggacagtttatcgccagtggatcacggccgctgccgagctacgcggcagacaccgccggcagccagctccatgccgtgcccgtgctcagggtgtcccacgccgaggaggaggaacgagtgcccccggaggacgacgaatactcggaatactctgagtattctgttgaggaatatcaggaccctgaggctccatgggactcagacgatccttgcagcctcccgctcgatgaaggctcgtgtaccgcatacacccttagatggtaccaccgggctgtgactggttccactgaagcatgccacccattcgtgtacggtggatgtggaggcaatgccaaccgctttggtactagagaagcctgcgaacgccgctgcccgccgagggtggtgcaaagccagggaaccggaaccgcgcaggac

SEQ ID NO: 9599 - DNA, 8832 bp, synthetic construct
  misc_feature 1..8832: note = source = /note="Description of Artificial Sequence: Synthetic coding sequence"
  source 1..8832: mol_type = other DNA
atgaccctccgcttgctcgtggcggcattgtgtgcaggaatcctcgcagaagctccacgcgtgagagcgcagcatcgagaacgcgtgacctgtaccaggctgtacgcagcagatatcgtgttcctgctggacggttcatcgtccattggacggtcaaactttagagaagtgcgttcctttctggagggactcgtgcttcctttctccggggcggcatccgcacaaggcgtgcggtttgcaactgtgcagtattccgacgacccacgaactgaatttggacttgacgcgcttggctcgggtggtgacgtgataagagctattcgggagctgtcatacaagggaggtaatactaggaccggagccgcaattctccatgtggccgatcatgtgttccttccccagttggcccgcccgggagtgcctaaggtgtgcattcttatcaccgatggcaaatcgcaagacttggtcgatactgcagcacagaggctgaaaggccagggggtgaaattgttcgcagtgggaatcaagaacgcagatccagaagaactgaagcgagtggcgtcccagcctacctccgatttcttcttcttcgtgaacgattttagcatcttgagaaccctgctgccactggtgtcacgtagggtgtgtaccaccgcaggaggtgtccctgtgacccggccccctgatgattccacctcggcacctagagatctcgtgttgtcggagccgtcctcgcaatcgctgcgagtgcagtggactgcggcatcggggccagtcactggctacaaggtgcaatacactccgttgaccggcctgggtcaaccactgccatcggagcggcaggaggtgaatgtgccagcaggagaaacttcggtgcggcttcgtggcctccgccctctcacggagtatcaagtgactgtgattgcactgtacgcaaactcaattggagaggctgtctcaggcaccgcacggactactgcattggaaggacctgaactgaccatccaaaacactaccgcccattcactgctcgtggcatggcgctccgtccccggagccactggttacagggtcacctggcgtgtgctctctggtggacctacccagcaacaagaactgggaccagggcaaggctcggtccttcttcgcgatttggagccaggtacggattacgaggtgaccgtttccactttgttcggcagatccgtgggtccagcgacttcgctcatggcaaggactgatgctagcgtggaacagacgttgcggcctgtgatacttggacctacgtccattttgctttcctggaacctggtgcccgaggccagaggataccggttggaatggcgtagagaaaccggccttgagcctccgcaaaaagttgtcctgcccagcgacgtgaccagataccaactcgacgggctgcagcctggtactgagtaccgattgacgctgtacaccctgctggagggacacgaagtggcaactccagccaccgtcgtgcctacgggaccagaacttcccgtgagccccgtgaccgatcttcaagcaaccgaactgccaggacaacgagtgcgtgtgagctggtcgccagttccaggcgcgactcaataccgaatcatcgttagatcgactcagggagtcgaacggactcttgtgctgccaggatcgcagactgcatttgacttggatgatgtccaggcaggtcttagctacacggtgcgagtcagcgcacgtgtcggtcctagagaaggttcggcgtcggttctgactgtgaggagagaaccagaaacccctcttgccgtgcctggtcttagggtcgtcgtctcggatgcaacgagagtccgcgtggcgtggggcccagtgccgggggcatcgggatttagaatctcatggtcgaccggcagcgggcctgagtcatcccaaaccctgccccctgattcaactgcaaccgacatcactggtctgcagcctgggaccacttatcaagtggcagtctcggtgctgcggggtagggaggagggacccgccgcagtgatcgtggctcgtaccgatcctctgggtcctgtcaggacggttcatgtcacccaggcttcgtcctcgtcagtgaccattacctggacccgggttccgggagcaacggggtacagagtgtcgtggcattcggcacatggaccagaaaagagccagctcgtgtccggtgaagccaccgttgcggagcttgatggcctcgaacctgacactgaatacacggtgcatgtgagagcgcacgtggctggggtggatggtccacccgcatctgtggttgtgagaaccgcacctgaacctgtcggcagagtgtcacgcttgcagattttgaacgcatccagcgacgtgctgagaattacctgggtgggagtcactggtgcaactgcttataggcttgcgtggggacggtccgagggtggcccaatgaggcaccagattcttcccggaaacactgatagcgcagaaatccgcggccttgagggcggagtgtcatactcagtgcgcgtgactgcacttgtcggggacagggaaggcactcctgttagcattgtcgtgactaccccacccgaggcgccgccagcgctgggaaccctccacgtggtccaacgtggagagcattcactccggctgagatgggaaccggtgcctcgcgcgcaggggttcctcctgcattggcagcccgagggaggccaagaacaatcaagagtgctgggacctgaactttcgagctaccatctggacggactggagccagctactcaataccgtgtgagacttagcgtgctcggtcctgccggggagggtccgtctgccgaggtgactgcaagaactgaatccccacgcgtgccttcgatagagcttagggtcgtggatacttccattgatagcgtcaccctggcctggacgcccgtctcgcgagcatcaagctacatcctgagctggaggccgctgcgaggaccaggacaggaagtgcctggatctccacagacccttcctggcatttcatcgtcacaacgggtcactggccttgagccaggagtgtcctacattttctcgctcacgcctgtgctcgacggagtcagaggacctgaggcttcagtcactcagactcccgtgtgtccaaggggcctggccgacgtggtgtttctgcctcacgcaacccaggacaacgcacaccgtgcagaggccactcgtcgcgtgctcgagcggcttgtcctggcactgggtcccctgggtccacaagcagtccaagtcggcttgttgagctactcgcaccggccttctccactttttcctcttaacggttcccatgatctcggaatcattctccaaagaatcagagacatgccatacatggatccatctggcaacaatctcgggaccgccgtggtcaccgcccatagatacatgcttgctcccgacgctcctggccgtagacagcacgtgcccggggtcatggtgctccttgtggatgaacctcttcggggagatatcttcagcccgattagggaagcccaagcaagcggattgaacgtcgtcatgttgggaatggcaggtgcagaccccgaacaacttagacgcctggcacctgggatggactcggtgcaaaccttttttgccgtggacgacgggccctcgctggatcaggcggtgagcggcctggcaaccgcactctgccaggcgtcctttaccacgcaacctagacccgagccttgtccagtttactgtcctaagggacagaaaggtgagcctggcgagatgggccttcgcggacaggtcggtccaccgggtgaccctgggcttccgggacgcactggagcccctggacctcagggtccacccggttctgcaaccgcaaaaggtgaacggggattccccggcgcagatggacgacccgggtccccgggccgtgcagggaatccgggcactccgggtgcccctggactcaaagggtcgcctggtttgccaggccccagaggcgatcctggtgaaaggggtccacggggcccgaagggtgagcctggtgcccccgggcaggtgatagggggagaaggacctggcctgcccggcaggaagggtgatccaggaccgtcggggccaccaggtccgcgcggcccactgggcgaccctggcccaagaggcccaccaggcctccctggcacggctatgaagggtgataagggtgatcgtggtgaaagaggacctcctgggcccggcgaaggaggaattgcaccgggagaacccggacttcctggactgcctggatcaccagggcctcaaggacccgtcgggccaccagggaaaaagggagaaaagggagattcagaggacggagccccaggcctgcccggacaaccaggttccccgggagaacaaggcccgcggggaccgcccggcgcaatcggccctaagggggatcggggatttcccggaccgctgggtgaagcaggggaaaagggggaacggggaccaccagggcccgccggatcaagaggacttcctggagtggccgggaggcccggggccaaaggtccggagggtcctcctggacccaccggtagacaaggagagaagggagaaccagggcgccccggagatcccgccgtggtgggccctgcagtcgcaggccccaaaggcgaaaagggtgacgtgggcccggccggtccacgaggtgcaactggggtccagggagaacgaggtccacctggacttgtgctccccggtgatccaggaccgaagggggacccgggagatagaggacccatagggctcaccgggagagccggtccaccgggggattctggcccccctggtgagaagggagatccgggaaggcctggcccgcctggtccggtgggtccacggggccgggacggagaagtcggagagaaaggggatgaaggaccacctggtgatcccggtctgcctggtaaagcaggagagcggggtctgagaggcgccccaggagtcagaggccccgtgggagaaaagggggaccaaggtgatccaggtgaagatggaagaaacggtagccccggtagctcaggacctaagggagatcgtggagagcctgggcccccgggaccacccggtcgcctcgtcgataccggacctggcgctagggaaaagggcgaacccggggaccgagggcaagaaggtcctcgtggacctaagggagatcccggactgccaggcgccccaggagagcgcggaattgaagggtttcgtggtccaccaggtccccaaggtgaccctggagtgcgaggaccggcaggagaaaaaggagatcgaggccctcccgggcttgatggaagatcaggactggacggtaagccgggagcggccgggccttccggtcccaacggggcagccggaaaggccggtgaccctgggcgagatggacttcccggtctgcggggggagcaaggccttcctggtccaagcggaccacctggactgcccggaaagcccggagaggatggcaagcctggcctgaacggtaaaaacggagaaccgggggatcctggtgaagatggtcgcaagggtgaaaagggcgattcaggggcatcggggcgagagggacgcgatggtcctaagggcgaaaggggcgcacctgggattcttggcccgcaaggtccacctgggctgccaggaccagtcggcccgccaggccaaggttttcccggggtgccaggcggaactgggcctaaaggagatcgcggagaaaccggttcaaagggagagcagggtctgccaggtgaacgagggcttaggggcgaaccgggtagcgtccctaatgtggatagattgctcgaaactgcagggattaaggcgtcagcactcagagagattgttgaaacctgggatgaatcctccggatcctttctgcctgtgccagaacggcggagaggacctaagggagactcgggggagcagggtcctcctggtaaggagggacctattggatttcctggtgaaagggggctgaaaggcgatagaggtgatcctgggccccagggacctcccggtctggcactgggagaaagaggtcctcctggtccttccgggctggcaggagaaccaggcaagcctggcataccggggttgcccggaagagcaggaggcgtcggagaggccgggcggcccggggaacggggagagagaggtgaaaagggcgaaaggggtgagcaaggtagagacgggcctcctggcctgcccggaactcccggaccgccagggcctcctggtccgaaggtgtcagtcgacgaacctgggccaggcctttcgggtgagcaaggtcctcctggtctgaagggtgcaaagggggagcctggtagcaacggtgatcaaggacctaaaggggaccggggagtccctggaattaagggagatcgtggggaacctggtcctagaggccaggacggaaacccaggactccctggtgaaagaggtatggcaggtccagagggaaagcctggtctgcaagggcctcgcggtccccctggacctgtcggaggacacggcgatcctggcccccctggagctcctggtctggcaggaccagccggaccccagggaccttccggtttgaagggtgaacctggtgaaactggaccccccgggcggggtctgaccggacctaccggggccgtcggccttcccgggccacctggaccatcaggacttgtcggaccacaaggttcccctgggctccctggacaagtgggagaaaccgggaagccaggggcacccggccgggacggagctagcggaaaggatggcgatcggggatcgcctggagtgccaggatcccctggtttgccaggacctgtcggaccaaagggagaaccagggcccaccggtgcaccaggacaagctgtggtgggacttccgggagcaaagggcgaaaagggtgccccaggtgggcttgccggagatctcgtgggtgaacccggcgcgaagggtgatcgcggactgccgggacctcgcggggagaagggcgaagccggtagagcgggagaaccaggagatcctggtgaagatggacagaagggagcaccaggacccaaggggtttaaaggcgatccaggtgtcggagtccctggatcgccagggcctcccggcccacctggtgtgaagggagatctgggcttgccaggtctgcccggtgcaccgggcgtggtgggattccccggacagacggggccaagaggagaaatgggtcaacctggtccatccggagaacgaggactggcgggtcctcctggcagggaaggaatccctggtccgctgggccctccgggtccacctggttcagtcgggcctcccggagcctcggggctgaaaggggataagggagatccaggagtgggtttgcccggcccaaggggagaacgcggtgagcctggaattagaggggaagatggtagacccgggcaagagggtcctcgcggactcactggcccgccgggatccagaggagagagaggagaaaagggcgacgtgggtagcgctggactcaagggggacaaaggagacagcgccgtgattcttggccctcctggtccgcgcggggcaaagggggatatgggcgaaagaggtccacgtggtctggatggcgacaaaggacccagaggcgataacggggatccaggtgacaagggctcgaagggagaacctggcgacaagggaagcgcaggactgccaggactgcgtggcctgctgggacctcaaggtcagcctggtgcagcaggtatccccggcgatcccggatcccctggtaaagatggagtgcctggcattcggggtgaaaagggagatgtcggctttatggggccaaggggactcaagggagaaagaggagtgaagggcgcttgcggacttgatggtgaaaaaggggacaagggtgaagccggaccaccagggcgccccggacttgccggccataagggcgaaatgggtgagccaggtgtccccgggcagtccggagctccaggtaaggaaggtcttattggtccgaaaggtgatcgcggatttgacggacagccagggccaaagggagatcagggcgaaaagggcgaacgtggcaccccaggaatcggaggttttcctggtccatcgggtaacgacggcagcgcaggtccaccaggaccaccaggttcggtgggacctcgcggaccagagggactgcagggacaaaaaggagaaaggggacccccgggagaaagagtggttggggcaccaggagtgcccggagcgccaggggagcgaggagagcaaggacgtccaggtccggccggaccaaggggagaaaagggtgaagcagccctcacggaggacgacataagaggatttgtgagacaagagatgtcgcagcactgcgcatgtcagggccaattcatagcaagcggatcccggcctcttccttcctacgctgcagacactgccggatcgcaactccatgctgtgcctgtgctgcgagtgtctcatgctgaggaagaagaacgagtgccacccgaagatgatgaatactctgaatacagcgaatactcagtggaggaataccaggatcccgaagcaccttgggattctgacgatccttgttcactccccttggacgagggttcctgcaccgcttacaccctgcgctggtaccaccgcgcggtcaccggtagcactgaggcatgtcatccttttgtctacggtggatgtggggggaatgcaaatcgcttcgggaccagggaagcatgcgagaggcgctgtcctcctagagtcgtgcaatcgcagggaactggaaccgcacaagat

SEQ ID NO: 9600 - DNA, 8832 bp, synthetic construct
  misc_feature 1..8832: note = source = /note="Description of Artificial Sequence: Synthetic coding sequence"
  source 1..8832: mol_type = other DNA
atgaccctcaggctcttggtcgctgcactttgcgccggcatactggccgaggcaccgagagtgcgcgcccagcacagagaaagagtcacgtgcactcgcttgtatgctgcggacatcgtgtttctcctggacggttcatcaagcattggcagatctaatttcagagaagtcaggagttttctggaaggactggtgctccccttctccggtgcggcttcagctcagggcgtgaggtttgctacggtacagtactctgatgatcccaggacagaatttggattggatgctttgggttctggtggtgacgtgattcgcgcaatccgcgaactctcatacaaaggaggaaacaccagaaccggagctgctatcctgcacgtggcggaccacgtctttttgccacagctcgctcgccctggagtgcccaaggtatgtattttgattaccgatggtaagtctcaggatctggtggacacagctgcgcagaggctgaagggccaaggagtaaaactgtttgccgtcggtatcaagaacgccgatccggaagagctgaaaagggtagcatcacagccaacctctgatttcttctttttcgtcaacgattttagcatcctgaggaccctgttgcccctggtttctagaagagtctgcactacagctggcggagtccctgtcacacgcccacccgacgacagcacgtctgccccaagagatctggttctgtcagagccctctagtcagtccctgagagttcagtggaccgctgcctctggccctgttaccggatataaagtgcagtacacaccactgacaggacttggacaaccactcccaagtgaaaggcaagaagtcaacgtccccgcgggcgagaccagcgtcaggttgcgcggcctcaggcccttgacagagtaccaagttacagtgatcgccctctatgcaaactctattggcgaagcagtgtccggaaccgcaagaaccaccgcacttgagggtcccgaattgacgattcagaacactacagctcactccttgctcgtggcttggagatccgttccaggtgccactggctacagggttacgtggagagttttgagcggtggtccaacgcagcagcaggagctgggcccaggtcaaggtagtgttctcctgagggacctggaacccggcacggattacgaggtgaccgtctccaccctgttcggtcgcagcgtgggaccagctacgagtttgatggcgagaacggatgcttctgttgaacaaacacttcgccccgtcatattgggaccaacctccatcctgctgagctggaacctcgtgccggaggcacgcggttaccgccttgaatggaggcgcgagaccggactcgagccacctcagaaggtggtcctgcctagcgacgtaacacgctaccagttggatggtctgcagcccggtacggaataccgcttgaccctgtataccctgttggagggccacgaagtggcgacaccggctacagtcgtgcccactggccctgagctgcctgtttcccccgtcactgacctccaggccaccgaactccctggtcaacgcgttagagtttcttggagtccagtccctggtgcaactcagtaccgcatcattgtaagatccacacaaggcgtggaacgcacattggtactccctggaagccaaactgcctttgacctggatgacgtgcaagcaggactctcttacacagtaagagtgtctgctagagttggtccccgcgaaggcagtgccagtgtgctgactgtgaggagagaacccgagacccctctcgccgtccccggcctgagagtcgtcgtctcagacgccactcgcgtgagggttgcatggggaccagtgccaggcgcctctggattcaggatatcctggagtactggctcaggccctgagagctcccagaccctgccccccgattctaccgctactgacattaccggtctgcagcccggaacaacataccaggtggccgtgtccgtgcttagaggtagggaggagggacctgcagctgtcatcgtggctaggacggatccccttggccccgtgcgcaccgtacacgtgacacaagcatccagcagcagtgtaacaatcacatggacgcgcgttcctggcgcaacaggttacagggtgagttggcactctgcccatggccctgagaaaagtcagttggtatccggagaagccaccgtcgctgaactggacggtcttgaacccgatacagagtacacggttcacgtaagggcccacgtcgccggtgtggacggtcctccagctagtgtagtggtgaggaccgcgccagagcctgtgggacgcgtgtctaggcttcagattttgaatgcttcttctgatgtcctcaggatcacctgggtgggagtgactggtgccactgcttatcgcctggcttggggcagatcagagggtggcccaatgagacaccagattctgccaggcaacaccgactccgcagaaatccgcggtttggaaggaggtgtgagctatagtgttagggttactgcgctcgtgggtgatagagagggaacacccgtcagtatagttgtaacaactcccccagaagctcctcctgcgctcggtaccctccatgtggtgcagcgcggagagcatagcttgagattgagatgggagcctgttccccgcgcccaaggattcttgttgcactggcagccggaaggtggccaggaacaaagtcgcgtcctgggtccggagctgagctcttaccatttggacggtctggagcctgccacacagtatagggttaggctgtcagtcctgggccctgctggcgaaggaccgtctgcagaggttacagctagaaccgagagtcctagagtaccatctattgaacttcgcgtcgtagatacctctattgattcagtcaccctggcgtggactcctgtctcacgcgcctcttcatacatccttagctggaggcccctgaggggaccaggtcaggaggtgcccggttctccccaaaccctcccaggcattagtagttctcagagagtcaccggcttggaaccaggtgtctcctatatttttagcctcactccagtgctggatggagtacgcggtccagaagcgagcgtgacacagacacctgtgtgtcctaggggactggccgatgtcgtgttcctcccccacgccactcaggacaacgcacatagggctgaagcgacccgcagagtccttgagaggctggtgctcgccctcggtcctctgggaccgcaagccgtccaagtgggccttcttagttattcccataggccctccccattgttcccactcaacggctctcatgacctcggaatcatcctccagaggataagggatatgccttacatggatcccagcggtaacaacctcggcacggccgtcgtgacagcccacagatacatgttggcccctgatgcccccggccgccgccagcatgtcccaggtgtgatggtgttgctcgtagatgagcctcttcgcggtgacatcttctcaccaattagagaggcgcaagcctccggcctgaatgtggtgatgctcggaatggccggcgcagaccccgaacaattgaggagactggcacctggcatggactctgtgcagactttcttcgcagtggacgatggcccttctctcgaccaggcagtgagtggcctcgccaccgccctttgccaagcttctttcaccacacagccacgcccagagccgtgcccagtgtactgtccaaagggacagaaaggcgagcctggcgaaatgggtctcagaggccaggtgggtccccccggagacccgggactcccaggcaggacgggtgcccctggtccacagggccctcctggatctgcgaccgcaaagggtgaacgcggattcccaggcgctgacggtagaccaggatcccctggaagagcgggaaatcctggcacgcctggagcgcctggtctgaagggcagtccaggactgccgggcccacgcggtgacccgggcgaaagaggaccaagaggacccaaaggcgaacccggagctccaggacaggtgatcggaggagagggacctggcctgcctggaaggaagggcgacccaggtccatctggcccaccgggacctaggggtcctttgggtgaccccggtcctcgcggacccccaggccttccaggaactgctatgaagggtgacaaaggagacaggggcgaaaggggccccccaggccccggtgaaggaggaattgctcctggagagccaggattgcctggactcccaggatctcccggaccccagggacctgtaggcccacccggtaaaaaaggtgagaagggtgacagcgaggacggagcccccggcctcccaggacagcccggtagccctggagagcaaggtccccgcggaccaccaggcgccattggacctaagggcgataggggctttcctggaccccttggcgaagcaggagagaagggcgagagaggtcctcctggccctgccggctccaggggtttgccgggcgtggctggtagacccggcgctaaaggccctgagggacctcctggtcccaccggaagacagggagagaaaggtgaaccgggtagaccaggagaccccgcggttgtcggtccggcggtcgctggaccaaagggtgagaagggagacgtgggcccagctggaccacgcggcgcgactggagtgcaaggtgaaagaggcccacctggattggtgctgccaggagaccctggtcccaaaggtgacccaggcgataggggtcccatcggactgactggtagagcaggcccacctggtgactccggaccgccaggagagaaaggcgatcctggccgcccgggaccccccggaccagtcggacctcgcggcagggacggtgaagtcggcgaaaaaggagacgagggtcctcctggagaccctggcctcccaggtaaagcaggcgaacgcggactcaggggtgctccaggcgttagaggacccgtcggcgagaagggtgatcagggcgatcccggtgaggacggtcgcaacggcagcccgggctcctcaggcccaaagggcgatcgcggagagcctggacccccaggccccccgggacgcctcgtggacactggccctggcgctagagaaaagggtgaacctggtgacaggggccaggagggaccccgcggtcccaagggagacccaggcctcccgggtgctcccggcgagcgcggaattgagggcttccgcggaccaccaggaccccagggagatccaggtgtacgcggccccgcgggcgagaagggagacagaggaccacccggcttggacggaagaagcggtctcgacggaaagcctggagctgctggtccttcaggtcccaacggtgctgcaggcaaagccggagaccccggaagagatggacttcctggacttcgcggtgagcaaggactgccaggtccatccggtccacccggactccctggtaagccgggagaggatggtaagccgggtctgaacggaaaaaatggcgagcctggagatcctggagaggacggcagaaagggcgagaagggtgacagtggcgcgagtggcagggagggtagggacggccctaaaggcgaaagaggtgctcctggaatcctgggcccacagggaccacccggactcccgggcccagttggaccccccggccagggctttcctggcgtaccaggcggcacaggcccaaagggagacaggggtgagactggttccaaaggcgaacagggcctgcccggtgaaagaggtctgaggggagagccgggctccgtaccgaacgtggaccgcctgcttgagacagcgggtataaaagccagcgctctgcgcgaaatcgtcgagacctgggatgagtcatctggctccttcctgcctgtgcctgagaggaggaggggcccaaagggcgactccggcgagcagggaccccccggcaaggaaggaccgattggttttcctggcgaaaggggcttgaaaggcgacaggggcgaccctggaccccaaggcccacccggtctggctttgggtgagagaggaccgccaggtccctccggtctggcaggagaaccgggtaagccgggcatccctggcttgccaggccgcgccggtggtgtcggagaggccggaaggcccggagaacgcggagagaggggtgagaaaggtgagcgcggcgagcagggcagggacggacctccaggcctgccaggcacaccaggtcctcccggtccacctggcccgaaggtgtcagtcgacgaacccggtccgggtttgtccggtgaacagggcccccccggcctgaaaggcgccaagggtgagccaggctctaacggtgaccagggccccaagggtgatagaggagtccccggaatcaaaggtgatagaggcgagcctggcccacgcggtcaagacggcaatcccggcctgccgggagaaaggggaatggctggcccggaaggtaagcccggcctccagggtccaaggggaccacctggtcctgtgggcggtcacggagatcctggcccgccaggcgctcctggtttggccggaccagcaggtccacagggtcccagtggactgaagggagagccaggcgagacaggcccgcctggcaggggtcttacgggtccgacgggcgcagttggtctccctggtcccccaggcccctccggcctggtcggtccccagggtagtcctggacttcctggtcaggtgggtgagactggcaagcctggagcacccggtagggacggagcgtcaggaaaggacggcgataggggtagccccggagtccctggctcccccggcctgcctggtcccgtgggaccaaagggagagcctggccctacaggagccccgggtcaagccgttgtaggtttgcccggagccaagggcgagaagggtgctcctggcggactcgccggagacctggtgggcgaacccggcgctaagggcgatagaggcctgccgggcccaaggggtgagaagggagaggcaggccgcgctggtgaaccgggagaccccggcgaagacggtcagaagggagcccccggccctaagggtttcaaaggtgaccctggagtgggagtacctggcagtcccggtccccccggccctcctggcgtcaaaggagatctgggtctgcctggtctgcccggcgcccccggcgtggtgggattcccaggacagacaggtcctcgcggagaaatgggtcaacccggaccgagtggtgagaggggccttgctggccccccaggcagggagggaatacctggtcctctgggtccgcccggtccccctggaagtgtcggaccgcccggcgctagcggactgaagggtgataagggagatccaggagtgggactccccggtccccgcggcgaaaggggagaacctggcatacgcggagaagacggtaggcctggacaggagggccctcgcggcttgaccggtccccccggatccagaggcgagaggggcgagaaaggcgacgtgggcagcgcaggcctgaaaggtgacaagggtgactctgctgtgatcctgggaccgccaggtcctcgcggtgccaagggcgacatgggagaaagaggtccgagaggactcgacggtgacaaaggtcctagaggtgacaatggcgaccccggagacaagggcagtaagggcgaacccggtgacaagggtagcgctggtttgcccggactgaggggactgttgggtcctcaaggtcagccaggtgcagccggaatacccggtgatcccggatcacccggtaaggacggagtgcctggaatccgcggtgaaaagggcgacgtcggattcatgggtccccgcggattgaaaggagagagaggcgtgaagggtgcttgtggactggacggcgaaaagggcgacaagggtgaagccggtccgccaggtagacctggtctggccggccataagggagaaatgggcgaacccggagttccaggccaatccggagcccctggcaaagaaggtttgattggccctaagggcgatcgcggtttcgacggtcaaccaggccctaagggagatcagggcgaaaagggcgagaggggcacaccgggtattggaggatttcccggaccctccggtaacgatggctctgcgggaccccctggtccgcctggctccgttggccctagaggcccagagggtctccagggtcagaagggtgaacgcggtcctcccggagaaagagtggtcggagcacccggtgtccccggtgcgccaggcgagcgcggcgagcagggcaggcctggacctgcaggtccaaggggtgaaaagggcgaagcggccctgactgaagacgacattagaggattcgtcagacaagaaatgagccagcactgcgcctgccagggtcagttcatagcaagtggttcccgccccttgccaagctacgccgcagacactgcaggatctcagctccacgcagttcccgtgctcagagtgtcccacgccgaggaggaagagagagtacctcccgaggatgatgagtacagcgagtactcagagtactcagttgaagagtatcaggacccggaggccccttgggacagtgacgacccctgcagtctgcccctggacgagggttcctgcactgcgtatacactgcgctggtatcacagggccgtaaccggatctaccgaagcctgtcaccctttcgtttatggaggttgcggcggcaacgctaatagatttggtacgagagaggcttgtgagagaaggtgtcctccccgcgtggtacaatctcagggcacgggaactgcgcaggat

SEQ ID NO: 9601 - DNA, 8832 bp, synthetic construct
  misc_feature 1..8832: note = source = /note="Description of Artificial Sequence: Synthetic coding sequence"
  source 1..8832: mol_type = other DNA
atgactcttcggctgctggtggcagcactctgtgcaggaatactcgctgaggcacctcgtgtgcgagctcaacacagggaaagagtcacgtgtaccagactctacgccgcagatattgttttccttcttgatggctcctcaagcattgggcgaagcaactttcgtgaagtgaggtcgtttcttgaaggtttggtgctgccattcagcggggcggcatcggcacagggggtgcgcttcgcaactgtgcagtacagcgacgacccccggaccgaatttggacttgacgcacttggtagcggtggagatgtgattagagcaattagagagcttagctacaagggtggcaacacccggactggtgcggccatacttcatgtggccgaccacgtgttcctgcctcaactcgcaaggccaggtgtgcctaaggtttgcattctgattactgacggaaagtcccaggacctggtcgacacggctgcccaacggctgaagggacagggggtcaagctcttcgcagtcgggataaagaacgcagatcccgaagaactgaagagagtggcatcccagcctacctcagatttcttcttttttgtcaatgatttttctatacttcgaactcttctccctctcgtgagcagacgcgtctgtactaccgcaggaggagtgcctgtgaccaggcctccagacgattcgacgagcgctccccgcgaccttgtgctttcggaaccttcctcacaatcgctgcgcgtgcagtggactgccgcgtccggacccgtgaccggatacaaagtgcaatacactcctcttaccggccttggacagccacttccatcagaaaggcaggaagtgaatgtgcctgcaggagaaacctcagtccgtctgaggggactgcgtccgctgaccgaataccaagtcactgtcattgccctgtacgcaaacagcataggcgaagcagtctccggaaccgcaagaaccactgcactggaagggcctgaactgactatccaaaataccaccgcgcatagcctgcttgttgcttggcgatcggtgcccggagccaccggttaccgtgtgacttggagagtcctgtccggaggaccgacccaacagcaagagcttggacccggtcaaggttcggtcctgcttagagatcttgaaccaggaaccgattatgaggtcaccgtttcgaccctttttggccgatcggtcggccccgcaacttcgcttatggctcgtactgatgcatccgtggagcagacccttcgacctgtgatcctcggtcctacctcaatccttctgtcatggaatcttgtgcctgaagcgagaggataccggctggaatggaggagagaaaccgggctggagccaccccagaaggtcgtgctgcctagcgatgtgacgagataccaattggatgggcttcaaccgggaactgaataccgtctgactttgtacactctgcttgagggtcatgaagtggccactccggctactgtggtgccaactgggccagaattgccagtgagccctgtgaccgacttgcaggccaccgaacttcctggccaacgcgtccgcgtctcttggagcccagtgcccggggcaactcagtataggataatcgtcagatcgactcagggggtcgaaaggacgctggtgcttccagggagccaaactgcatttgacctggatgatgtgcaagcggggctgtcctacactgtgagagtgtccgcgagagtcggtcccagggaaggttcagcctcggtcctgactgtgaggagggaacctgagactcctctggcagtcccagggctccgcgtggtcgtatccgatgcaactagagtcagagtggcctggggaccagtgcctggcgccagcggattccgcatttcatggagcacgggtagcggaccagaatcgtctcaaaccctcccacccgattcgactgcgactgatatcactggcctgcagcccggcactacttaccaagtggccgtgtccgtactccggggacgcgaggagggacctgcagccgtgattgtcgccagaaccgaccctctgggtccagtcaggactgtgcatgtgactcaggcatcgtcatcgtcggtgaccattacctggactagagtaccaggtgctactgggtacagagtgtcatggcattcagcacatggcccagaaaagagccaactcgtgtcgggagaagcgaccgtggcggaattggacgggcttgaaccagataccgagtacaccgtgcacgtgagagcccatgtcgccggagtggacggcccaccagcaagcgtcgtggtgagaaccgcccctgagcctgtgggcagggtttccagacttcaaatcctgaacgcctcttccgatgtgctccgcattacttgggtgggggtgactggcgcgactgcttaccgtctggcatggggtcgttcagagggtggacctatgaggcaccaaattcttccaggcaataccgattccgcagaaattagaggcctggaaggaggggtcagctactccgtgcgggtcacggccctggtgggagacagggaagggactcccgtgtccattgtggtgaccacccctcctgaggcgccacctgctttgggtactttgcacgtggtccaacggggagaacattcccttcgcctgagatgggaacctgtgccgcgcgcgcagggattcctgcttcattggcaaccagaaggagggcaggagcaatcgcgcgtgctgggacccgaactgtcgagctatcacctggacggcctggagccagctactcagtacagggtgcggctttcagtgctgggccctgcaggggaggggccctcggccgaggtcactgcccggaccgagtcgcctcgcgttccctcgatcgaacttcgggtggtggatactagcatcgattccgtgacgctcgcttggacccctgtgtcgcgtgcttcatcgtacattctgtcatggcgccctcttagaggccccggtcaagaggtcccagggagccctcaaaccctgcccggaatttcgtcctcacaaagggtgaccggattggagcccggcgtgtcctacatcttttcgcttactccggtgcttgacggagttaggggaccagaagcatcagtgacccaaacgcctgtgtgtcccaggggactggcggatgtggtctttctcccgcatgcaactcaggataacgcccacagagcagaggctaccagaagggtgcttgaaagattggtgctcgccctgggccccctgggcccgcaggctgtgcaagtcggacttctgtcctactcccacaggccctcccctctgtttccgcttaatggtagccatgatctcggcataatcctgcagcggattagagacatgccatacatggacccatcgggaaacaatcttgggaccgcggtcgtcaccgcacatcgatacatgctcgctccagacgccccgggtcgtagacaacacgtgcctggcgtgatggtgctccttgtggacgaaccactgcggggtgacatctttagtcctatcagggaagcgcaggcctcaggacttaacgtggtgatgctgggcatggctggtgctgatcccgagcaactcagacgtctggcaccaggtatggattcggtgcaaacgttctttgcggtcgatgacggaccatccctggatcaagccgtatccggcctcgcaaccgcactttgccaagcgagcttcaccacccaaccgcgcccagagccttgtcccgtgtactgcccaaagggacagaaaggagagccgggagaaatgggacttcgcggacaggtgggaccaccgggcgacccaggtttgccaggtcggaccggtgcacccggaccacaggggcctccaggtagcgcgactgcaaaaggagagagagggtttcctggcgctgatgggcgcccaggttccccaggtagagctgggaacccgggaactcccggtgcaccaggcctcaagggttcgccagggctgccaggaccacgcggggatcctggtgagagggggccgcgtgggcctaagggtgaacccggagcacctgggcaggtgatcggaggagaagggccggggcttcctggtcgtaagggtgatccaggaccgtcaggtccaccgggcccacgaggaccactgggggatccagggcctcgcggaccaccaggactcccaggtactgcgatgaagggcgataagggtgataggggcgaaagagggcctccaggtccgggagaaggcggtatcgctcccggtgagccaggattgccagggctgcctgggtcacctgggccacaaggacctgtgggtcctcctggtaagaagggagagaaaggagattcggaggatggggcgcctggcctcccggggcagcctggatctccaggagaacaaggcccacgcggtccacccggtgcaatcgggcctaagggcgatcgcggcttccctggtcctctcggagaggcgggagaaaagggtgagcgagggcctcctggaccagctggtagcagagggttgccaggagtcgcaggtcgtccgggtgcgaaaggtcctgagggaccgcctggtccaaccggaaggcagggcgagaagggagagccaggacggcctggcgatcctgcagtggtgggtcctgcagtggcgggtccaaagggggaaaagggcgacgtgggccctgccgggcctaggggggcaaccggtgtccaaggcgagcgtggcccacctgggctcgtgctgcccggtgaccctggacccaaaggcgaccccggcgatcgagggcctattggacttaccgggagagcgggaccgccaggagacagcggaccacctggggagaagggagatcctggacgtccaggaccgcctggtccagtgggtcctaggggccgggatggggaagtcggagaaaagggagacgagggacccccaggagatcccggtttgcctggaaaagcaggagaacgtggactccggggcgcccctggggttcggggaccagtcggtgaaaagggagatcaaggagatcccggagaggacggtcgcaacggttcgcctggttcgagtggccctaagggtgacaggggagaaccaggaccaccggggccgcctggccgccttgtcgacaccggtcccggagccagagagaagggggagcctggagatcggggtcaggagggaccacggggaccaaaaggtgaccctggactgcctggcgcgcctggagaacgaggtatcgaaggttttaggggaccacctggacctcaaggtgaccctggtgtgcggggtccagcgggtgaaaagggggaccgtggaccaccaggactcgatggcagatcgggactcgatggcaaaccaggagccgcaggaccttcgggaccgaacggtgcagcggggaaggccggagatcccggacgcgatggcctcccaggcctgcgaggagaacaaggactgccaggcccgtcgggaccccctggcctcccaggcaagccaggcgaagatggcaagccaggactgaacgggaaaaacggagagccgggcgatccaggcgaagatggacggaagggcgaaaagggagattcaggagcatcgggacgggagggacgggacgggcccaaaggtgaaagaggggctcctggcatccttggccctcagggtccaccaggccttcctggcccggtcggccccccaggtcaaggctttcctggagtccctgggggtactggacctaagggggaccgaggcgaaactggatcaaagggggaacaaggattgcctggagaacgggggcttagaggagaacctgggtccgtccctaatgtcgaccgtctgctcgaaaccgcgggtattaaggccagcgcacttcgtgaaatcgtcgaaacctgggatgagagctccggctcatttctccctgtgccagagcggcggcgcggtccaaaaggggattccggggagcaaggtcctcctggaaaagaaggccctattggatttccaggggaacgcggccttaagggagatcgaggcgatccaggacctcaaggacctccaggactggcgctgggcgagaggggtccacccggaccgtccggacttgcaggagagccaggcaaacccgggattcctggactgccaggacgagcaggcggagtcggagaggcaggacgccctggcgagcgcggggagcgcggggaaaagggcgaacgcggggagcagggtcgagatggtcctccaggccttcctggtactcccggcccacctggaccgcctggacccaaggtgtctgtggacgaaccgggacctggtctttcgggcgaacaaggtcctcccggccttaaaggagcaaaaggagaacctggctccaacggagatcaggggcccaagggtgataggggggtgccaggtatcaaaggagacaggggtgaaccgggtcctcgtggacaagacggtaatcccgggctgcccggggaacggggcatggcaggtccagagggaaagccagggttgcagggacccaggggacccccagggccggtggggggccacggcgatccgggcccacctggagccccgggactggcaggccctgctggccctcagggtccttcgggacttaagggtgaacctggtgaaaccggcccacctgggcggggactcaccggtccaaccggagcggtggggttgccaggacccccaggaccatctggccttgttggtcctcagggaagcccaggactgcctggccaagtgggcgagactgggaaacccggtgcacctggtcgcgatggagcaagcggaaaagatggagatcggggctcacctggggttcccgggtcaccgggcctccccggtccagtggggcctaagggagaacctggaccaactggcgccccaggacaagcagtggtcggccttcctggggcaaagggagagaaaggcgccccaggtggactggcaggagatctggtcggcgagccaggggccaagggtgatcgtgggctgccaggccctaggggggagaagggagaggctggccgcgcaggagaaccaggagatcccggagaagatggtcagaagggtgcccctggcccaaaaggattcaaaggagatcctggtgtcggtgtccccggctctcctgggcccccaggaccccctggtgtgaaaggagatctgggccttcccggattgccaggtgcacctggcgtggtgggattcccaggacagactggaccgagaggggagatgggtcagcctggaccgagcggcgaacgcggactggcgggaccccctggacgtgagggtatccctgggccacttggccccccaggacctccagggtcggtgggaccaccaggagcatcgggacttaagggtgacaagggagatcccggcgtgggactgcctggacctcggggagaacgaggagaaccgggtatccggggagaagatggcagacccggacaggaaggaccgagggggcttacggggcctcccggcagccgaggagaacggggtgagaagggagatgtgggatccgccgggctcaagggagataaaggggattccgccgtgattctcgggccacctggacctagaggagccaagggagatatgggggaacgcggccctcggggacttgacggagataagggtccgcggggagataacggtgatcccggtgataagggatcgaaaggagagcctggtgataagggaagcgcaggactcccaggactgcgaggattgcttggccctcaaggtcagcccggagcagcgggaatcccaggagatcctggttcgcctggcaaggatggagtgccgggaattcgcggtgaaaagggtgacgtcggatttatgggacctcgcgggctgaagggtgagcgcggagtgaaaggcgcttgtgggcttgacggagagaagggagacaagggagaagcagggcctcctggacggcctgggctcgccggacataaaggagaaatgggggaacctggggttcctggacaatcgggggcacctggaaaggaaggactcataggaccgaagggggaccgtggatttgatggtcagcccggtccaaaaggggatcaaggagagaaaggagaacgtggcacgcccgggataggaggttttcctggacccagcggaaatgacggttccgctggacctcctggacctcctggttcagtgggacctcgcggacctgagggattgcagggccagaaaggtgagagggggcctccaggggagagagtggtcggtgcacctggcgtgccaggagcacctggtgaacgcggcgaacagggccgaccaggtccagcgggccctagaggtgagaagggtgaggcagcccttacggaggatgacatcagaggatttgtccgccaagaaatgtcccagcactgcgcatgccagggtcagttcattgcaagcggttcccgccccctgccatcatacgcggcagacaccgcaggttcccaacttcatgcagtccctgtgctccgagtgagccatgcggaagaggaggagcgggtgcctccagaagatgatgagtactccgaatactccgagtactccgtcgaggaataccaagaccccgaagcaccttgggattcggacgatccttgttcgctccctcttgacgagggtagctgtactgcatacacccttcggtggtaccatcgtgcggtcacgggttctactgaggcatgccacccctttgtttacgggggttgtggcggcaatgcaaacagatttggcactcgagaggcatgcgaacggcggtgcccaccacgggtggtccagagccaaggtactggaactgcacaagat

SEQ ID NO: 9602 - DNA, 8832 bp, synthetic construct
  misc_feature 1..8832: note = source = /note="Description of Artificial Sequence: Synthetic coding sequence"
  source 1..8832: mol_type = other DNA
atgacccttagactgctggtggccgccctttgtgccggaatcctcgcggaggcgccgagggtccgggcacagcatagggaacgggtgacgtgtacccggttgtacgcggcagacatcgtgttcctcctcgacggctcgtcgtccatcggtagatcaaacttcagggaagtgaggtccttcctggaagggctcgtgctgccgttcagcggagccgcatcagctcagggagtgaggttcgcgactgtccaatacagcgacgatccgcgcaccgaattcggactggacgccttgggatcgggtggagacgtgatccgcgcgatcagagaactgagctacaagggagggaatactagaactggagccgcaatcctgcacgtggcggaccacgtctttctcccgcagcttgcacggcccggcgtgcctaaggtgtgcatcctcatcactgacggcaaatcgcaggacctcgtcgacactgccgcccagcggcttaagggccagggagtcaaactgttcgcggtgggtatcaagaatgcggatccggaggagctgaagagggtggcatcccagccgacctcagacttcttctttttcgtgaacgatttcagcatcttgcggaccctcttgccgctggtgtccagaagggtgtgcaccactgcggggggagtcccagtgactcggcccccagatgactccacctccgccccacgggatctggtgctttccgagccctcgagccagtccctgcgggtgcagtggaccgccgcatcaggtccagtgactggatacaaagtgcaatatacgcccctgaccggcctcggacaaccactgccgagcgaacggcaggaagtgaatgtgccggcgggagagactagcgttaggctgcgcggtctgcgcccactcactgaataccaggtcactgtgattgccctgtacgcgaattcgatcggagaggccgtgtcgggcactgccagaactaccgctctggagggcccggaactgaccatccagaataccaccgcccattcgctgctggtcgcctggcggtcggtgccaggagccactggataccgcgtgacctggcgcgtactgtcgggaggacccacgcagcagcaggagctgggcccgggccagggaagcgtcttgttgcgcgacctcgaacctggcactgactacgaggtcactgtgtccaccctgttcggccggtccgtggggccggccaccagcttgatggcccgcactgacgcctcggtggaacagaccctcagaccagtgatcctgggaccaaccagcatccttctctcgtggaacttggtgcccgaggcgcgcggataccgcctcgagtggcgcagagaaactggactcgaacccccacagaaggtggtcttgccgtccgacgtgaccagataccaactggatggcctccagcccggaactgagtaccgcctgactctctacaccctgctggagggacacgaagtggcaaccccggcgactgtggttccgactgggcctgagctgccggtgagcccggttacggacttgcaggctaccgagctcccgggacagcgcgtgcgtgtctcctggagccccgtgcctggggcaactcagtaccggattatcgtgaggtcgacccagggcgtggagcggaccctggtgctgcccggctcacaaaccgctttcgatcttgacgacgtgcaagcaggtctttcatatactgtgagggtgtctgccagagtggggcctcgggaaggatcggcgtcggttctgactgtcagaagagagccggagacgcccttggcggtgcccgggctgagagtggtcgtgagcgatgctaccagagtccgagtggcatggggcccagtcccgggcgcctcgggattccgcatctcatggtcaacgggctctgggccggagtcgtcacaaactctgccgccggactccaccgctactgacatcactgggctgcagcctgggaccacctaccaagtggcagtctccgtgctgcgggggcgcgaggaggggcctgcggccgtgatcgtcgcgagaactgatccactgggtccggtgcgcactgtgcacgtcactcaagccagttcgtcctccgtcactatcacctggaccagggtcccgggcgcgactgggtaccgggtgtcgtggcattcagcgcacggcccagaaaaatcccaattggtttcaggcgaagccactgtggcggaactggatggtctggagccggacaccgagtacaccgtgcacgtgagggcgcatgtcgcgggcgtggacgggccgcctgcctcggtggtggtgcggaccgccccggaaccggtgggacgcgtgagccggctccagatcctcaacgcttcgtcagacgttcttcgcatcacctgggtgggagtgaccggagccaccgcttaccggctggcgtgggggcgctccgaagggggtccgatgaggcatcagatcctccctggaaacaccgactcagcagagataagaggcctggagggaggagtgtcgtacagcgtgcgggtgaccgcgctggtgggagatcgcgaggggacgccggtgagcatcgtggtgaccaccccgccagaagcaccgcctgccctgggaactttgcatgtcgtccagcgaggtgagcattcgcttcggctccgctgggaaccggtgcctagagcgcagggattcctgctccattggcagcctgaaggaggccaggagcagtcgcgtgtcctcggacctgagttgagctcataccatctggatggacttgaacctgcgacccagtatcgcgtcaggttgagcgtgctcgggcctgccggggagggaccatcggcggaagttaccgctcggaccgagtccccgagagtccctagcatcgaactcagggtggtggacaccagcatcgactcagtcaccctggcatggactccagtcagcagagcctccagctacattctgtcctggaggcctcttcgcggcccaggccaggaggtgccgggaagccctcaaaccctgccaggaatatcatcaagccaacgcgtgaccggcctggaaccgggtgtctcgtacatcttttctctgaccccagtcctggacggcgtgagaggtcccgaagcctcggttacccaaaccccagtgtgcccgagaggactcgctgacgtggtgttcctgccgcacgcgactcaggacaatgcccacagggcagaggccacccgacgagtgctggagcggctcgtcctggcgctgggcccccttggtccacaggccgtccaggtcgggctgctgagctacagccatcgcccgtcgccactgttcccgcttaacgggagccatgaccttggaatcatcctccaacgaatcagagatatgccgtacatggatccgtctggaaacaacctcggaactgcggtggttactgcgcaccgctacatgctcgctccggacgcgcctggacggcgccaacacgtgcctggcgtgatggtcctcctggtggacgaacccctgcggggagatatcttctcgccgatccgcgaggcccaggccagtggactgaacgtggtgatgctgggcatggccggcgcagatccagaacaattgcggcggctcgccccaggaatggactctgtgcagactttcttcgccgtggacgacggaccctcgctcgaccaggcagtgagcggcttggccacggcgctctgccaggcatctttcactacccaacctcgcccagagccatgcccggtctactgcccaaaaggacagaaaggcgagccgggagaaatgggactgcgcggccaggtgggaccgcctggagatcccgggctcccgggtcgcaccggcgcccctgggccgcaaggaccaccgggcagcgccaccgccaagggagaacgcggttttccgggagctgacggacgcccgggaagccccggccgggccggaaacccggggacccctggcgctcccgggctcaagggatccccgggactgcctgggccgcgcggtgaccccggtgagcggggaccccgcgggccaaaaggagaacccggggcccccggacaagtgatcggaggcgagggtcccggactgccggggcggaaaggtgacccgggaccatcagggcctcccgggccaaggggccctctcggcgacccgggaccgcgcggcccacccggcctgcctggaacggctatgaagggagataagggcgacagaggtgagcggggtcctcctggacctggagaaggaggaatcgccccgggagaacctggactgccgggtctgccgggatccccgggcccgcaaggaccggtgggcccgccaggaaagaaaggtgaaaagggagattcggaagatggtgcccccggactgccagggcagccaggatccccgggggaacaggggccgagaggacccccaggagctatcggacctaagggggaccgcggattcccgggaccgctgggggaagccggagaaaagggagaaagaggcccaccgggaccggctggatccagagggctgccgggcgtcgccggacgaccgggtgcgaagggaccagaaggcccgcccggccctaccggccggcagggtgagaaaggagagccgggtcggcccggcgatccagccgtggtcggacctgctgtggcaggtccgaagggtgaaaagggggacgtgggacctgcgggaccacggggagctaccggcgtgcagggtgaacggggccccccggggttggtgctcccaggcgacccgggcccaaaaggagatcctggggatcgcggaccaatcgggctgactggacgcgccggtccgccaggcgactcaggacctccaggagagaagggtgacccgggacgtccggggccgccagggcctgtgggaccacgaggcagggacggggaggtcggggagaagggagatgaaggaccgccaggggacccaggcctccctggcaaagctggtgagagaggactgcgcggagctccgggcgtgagaggaccggtaggtgagaagggcgaccagggggacccaggagaggacggtcggaacggctcgcctggatcctcgggacctaagggagacagaggcgaaccaggacctcctgggccgccgggccgcctggtggacactggacctggagcaagggaaaaaggggagcccggcgaccggggccaagaagggccacggggacctaagggggaccccggactcccgggagcgccgggagaaagagggatcgagggtttcagaggcccacctggcccgcaaggcgacccgggcgtccggggaccggccggcgagaaaggcgaccgcggaccgccgggactggacggacggtccggcctcgacggcaaaccaggcgcggccggaccttcgggacccaatggagcggccggaaaagccggagatcctgggcgcgacggactgccgggattgcgcggcgagcagggtctgccgggaccgtccgggccgcctggcctgccgggaaagccaggcgaggatggcaagccgggactgaatggaaaaaacggtgagcctggagatcctggagaagatggacgcaagggagaaaagggtgattcaggagccagcggccgcgagggacgcgacggaccaaaaggagaaagaggcgcgccgggaatccttggcccgcagggcccgccagggcttccgggaccagtgggtcccccgggacaaggatttccgggggttccggggggcaccggcccgaagggggaccgcggcgaaactggatcgaaaggtgaacagggcctgccgggtgaaagaggtctgcgcggagagcctggatcagtgccaaatgtggacaggctcttggaaactgctggaatcaaggcctccgccctgagagaaatcgtggaaacttgggacgaaagctcgggatcgtttctgccagtgcccgagaggcgccgcggaccaaaaggggactcaggcgagcaaggaccaccgggcaaggaggggccgatcggattcccaggcgagagaggtctgaagggcgaccgtggggatccgggaccgcagggcccaccagggctcgccctgggagaacggggtcctcctggcccgtcaggcctggccggcgagcccggaaagccaggtatccccggactgccggggcgcgcgggaggcgtcggagaagcgggacggcctggagaacgaggcgagcggggcgaaaaaggcgagcggggagagcagggtagggacgggccaccaggactgccggggacgccaggacctccgggacccccaggaccgaaggtcagcgtggacgagccaggaccgggcctgtcgggagagcagggaccaccaggcctgaagggagcaaaaggcgaaccaggatcaaacggggaccaggggccgaagggagatcgaggtgtgccgggcatcaagggcgaccgcggcgagcctggacctcgcggacaggacgggaaccctgggctgcctggagagcggggtatggctgggccggagggcaagcctggactgcaaggcccacgcggcccgccaggcccagtggggggacatggggaccccggcccacctggtgccccaggccttgcaggcccggctgggccacaaggaccaagcggattgaaaggagaacctggggagacgggaccgccaggaagaggcctcactggtcccaccggagcggtgggactgccgggccctcctggcccttcgggactcgtgggaccgcaggggtccccaggcctgccgggacaggtgggtgaaacgggtaaacccggcgccccgggtagagatggagcatccggaaaggacggcgacagaggctcaccgggagtgccgggctcgccgggactgcctggcccggttggcccgaaaggagagccggggccgactggagccccaggacaagcggtcgtgggcctgccaggggccaagggggaaaagggcgcaccgggtggactggcgggcgacctcgtgggagagccgggagccaagggggataggggactgcctggcccaagaggagaaaagggagaagccggaagagcgggagagccgggtgaccccggagaggacggccagaagggggccccggggccgaaaggcttcaagggggacccaggggtgggcgtgccgggtagcccgggaccgcccgggccgccgggggtgaaaggcgatttgggactcccgggactgcccggcgcgccaggagtagtgggattcccgggacagaccgggccgagaggcgagatgggacagccgggcccgtcaggcgaacggggcttggcaggacctcccggtagagaaggaatcccgggcccactcggaccgccaggaccgccaggatcggtcggaccgccgggagcatccggcctgaagggcgataaaggtgacccgggtgttggattgccgggacctagaggggaaagaggagagcctggcatccgcggagaagatggacgcccggggcaggaaggcccgcggggactcaccggtccgccagggtccagaggcgaacggggagagaagggagacgtggggtccgcgggcctcaagggagataagggggattctgccgtcattttggggcctccgggacctcgcggagccaaaggtgacatgggagaacgtggaccaaggggactggatggagacaaggggccccgcggggataacggggacccaggcgacaagggaagcaagggcgagccaggagacaagggatcggctggacttccgggccttcgcggcctgctgggaccacagggtcagccgggagcggcgggcattccgggagatccgggctcccctggaaaagacggagtccctggcattcgcggcgaaaaaggggatgtgggatttatgggcccacgcggactgaaaggggaacgcggggtgaaaggagcatgcggactggatggagagaaaggtgataaaggggaggctgggccgccgggaaggccaggactggcaggacacaagggagagatgggcgagcccggagtgcccggacaaagcggagccccgggtaaggaaggcctgatcggaccgaaaggcgatcgcggattcgacggccaaccaggaccaaaaggcgaccaaggggaaaagggtgaacgcggaacccccggaatcggcggcttccccggacctagcggaaacgacggatcggcggggccgccgggaccaccgggcagcgtcggaccgagggggcccgaaggactgcagggacagaagggcgaacgcggacccccgggcgaacgcgttgtgggtgcacctggcgtgccaggggcgccaggagaacggggggaacaaggaaggcccggacctgccggaccccggggagaaaaaggtgaggcagcgctcactgaggacgacattcgcggctttgtccggcaagagatgtcccagcactgcgcgtgccaaggacagttcatcgcgtccggatccaggccgttgccgtcctacgcagcagataccgcagggtcgcagctgcatgctgtgccggtcctcagagttagtcacgccgaagaggaagagcgcgtcccgccagaggacgacgaatactccgagtattccgagtactctgttgaggaataccaagacccggaggcaccgtgggattcagacgatccctgcagcctgcctctcgatgaaggttcttgtaccgcctacaccttgaggtggtaccaccgcgccgtgaccgggtccaccgaagcatgtcatccgttcgtatacggaggatgcggagggaatgctaaccgcttcggcacccgcgaagcgtgtgagagaaggtgcccgccgagagtggtccagtcgcagggcaccggaaccgcgcaagac

SEQ ID NO: 9603 - DNA, 8832 bp, synthetic construct
  misc_feature 1..8832: note = source = /note="Description of Artificial Sequence: Synthetic coding sequence"
  source 1..8832: mol_type = other DNA
atgaccctgaggctgctggtggcagcgctctgtgcaggcatcctggccgaagcgccgcgggtccgtgcgcagcatcgggagcgcgtgacttgcacccgcctgtacgccgcagacatcgtgttcttgctggacggatcttcatcgatcggacggagcaacttccgcgaagtgcgctccttcttggagggcctcgtgctgccattcagcggtgcagccagcgctcagggagtccggttcgccacggtgcagtactcagatgacccgcggactgagtttggtctggacgcccttggcagcggaggggacgtgatcagggccatccgggagttgtcctacaagggaggaaacacccgcactggcgctgcaatactgcacgttgccgaccacgtgttcttgccccagctcgcccggccgggggtccctaaggtctgcatcctcatcaccgatggaaaatcacaagatctcgtcgacaccgcggcccagcgcctgaagggtcaaggagtgaagctgtttgcagtgggcatcaagaacgctgaccctgaagagctgaagcgcgtggccagccagccgaccagcgatttcttcttcttcgtcaatgatttcagcatccttcggaccctgctgccacttgtgtcccggagagtgtgtacgaccgccggcggagtaccggttactcggccgcccgatgactcaacctcggcaccgcgcgacctggtgttgagcgagcccagctcacagtcgttgcgcgtgcagtggaccgcagcctcagggccggtgactggttacaaggtgcaatacacccctctcaccgggctgggccagccactgccatcagaacgccaggaagtgaacgtgccggcaggagaaactagcgtcagactccgcggactccgccccctcaccgaataccaggtgactgtgatcgctttgtacgcgaactcaatcggagaggcggtgtcgggaactgcaagaaccaccgcgctggaaggaccggaactgaccatccaaaacaccaccgcgcatagcctgttggtggcctggcggtcggtcccgggcgctaccggatatcgagtgacctggcgagtcctttcgggcggtcccacgcagcaacaggaactcggacctggacagggatcggtattgctccgcgaccttgagccgggtacggactacgaagtgaccgtgagcaccctgttcggtcggtccgtgggcccggccacgtcgctcatggccaggacggacgcaagcgtcgaacaaaccctgcggccggtgattctgggaccgacctcgatcctgctttcgtggaacctggtgcccgaagcgagaggatacagactcgaatggagacgggaaacgggcctggaaccgccgcaaaaggtggtgctgccgtcggacgtgaccagataccagctggatggactgcaacctggaactgagtacagactcacgctgtacactttgttggaagggcatgaggtcgctacccccgccaccgtcgtccccaccggaccggaactccctgtgtcaccggtgacggacctgcaggccactgaactccccggacaacgcgtcagagtctcgtggagccctgtcccgggagccacccaataccggatcatcgtgcggagcactcagggagtggaacggacgctcgtgctccccggatcccaaactgcctttgacctggatgacgtgcaagctggcctgtcgtacactgtccgcgtgtcggcgcgtgtgggacctcgggaaggttcggcgtctgtgctgacggtcagaagggaaccggagactccactggcagtcccgggcctccgcgtcgtggtgtcggacgcaacccgcgtccgagtggcctggggaccagttccaggcgcctcaggtttccggatcagctggtcaactgggtccggaccagaatcgtctcaaaccctgccgccggacagcaccgccaccgatatcacgggactgcagcctgggaccacttatcaggtcgcggtgtcagtgcttagaggacgcgaagaaggcccagctgctgtcatcgtggcgcggactgatccactcggaccggtcaggactgtgcatgtcacccaggcttcatcgagctcggtcaccatcacctggactcgggttccaggtgccactggatacagggtcagctggcactccgcgcacggacccgaaaagtcccaactcgtgtccggagaggccaccgtggcagaactggacgggctggagccggacaccgagtacactgtgcacgttagagcacatgtcgccggagttgacggcccccctgcatctgttgtcgtacgcactgcaccggaacccgtgggacgagtgtcaagactgcaaatcctcaacgcgtcgtccgacgtcctcagaatcacttgggtgggcgtcacgggagcaaccgcttaccggctcgcatgggggcgctcagaaggtggccccatgcgtcaccagattttgcctggtaatacggattcggcagagatccgtggtctggagggaggggtgtcttactctgttcgcgtgactgcgttggtcggggacagggaaggaactcccgtctcgatcgtggtgactacccctcccgaggcccctccggccctgggcactctgcatgtcgtccagaggggagagcactcgctgcggctgcggtgggaaccggtgccgagagctcagggctttcttctgcattggcagccggagggcgggcaggaacagtcccgggtgcttggcccagaactcagcagctaccacctcgatggcctcgagcccgccactcaataccgggtgcggctgtccgtgctcggacccgccggagaaggaccgtccgcagaggtgaccgcacgcaccgagtcaccgcgggtgccgtcaatcgaattgcgggtggtcgacacctcgatcgattcagtgaccctggcctggactcctgtgtcgcgggcctcctcatacattcttagctggcgcccgctgcgggggccaggacaagaggtgccgggatcaccacagactcttcccgggatctcgtcgtcccagcgcgtgaccggtctggagccgggcgtgtcctacatcttctctctgactcctgtgctcgatggagtgcggggtccagaagcatccgtgactcagacgcctgtgtgcccgcgcggactggcggatgtggttttcctgcctcacgctactcaggataatgcgcatagggcagaggcgacgcgccgcgtgctggagagactggtgctggcactgggacctctgggaccacaagccgtgcaggtgggactgctgagctacagccaccgcccttcgccgctgtttccgctgaatggctcccacgatctcggcattatccttcaaagaatccgggacatgccatacatggacccttccggtaataaccttggaactgccgtggtgactgcacaccgctacatgctcgcccctgacgcgcctggtagacgccaacatgtgccgggcgtgatggtcctcttggtcgacgagccgctgaggggggacatcttcagccctatccgggaagcgcaggcttcagggctgaacgtggtaatgctcggcatggcaggagccgacccggagcaactgcgacgtctcgctccgggaatggattcagtgcaaactttcttcgcagtagacgacggaccttctctggaccaagcggtgagcggactggctactgctttgtgtcaggcttccttcaccacccagccaagaccagagccctgcccagtatattgtcccaaaggacagaagggagaaccaggcgagatgggtctgaggggccaggtgggaccgccgggtgacccggggctcccgggcaggactggtgccccgggacctcaaggacccccaggttccgcgactgccaagggtgaacgcggattcccaggagcggatggccgcccgggatcgccgggtagagcaggaaacccgggcactcctggcgcaccgggacttaaaggatcgccaggactgccgggccctagaggcgacccgggcgagcgaggaccacggggaccgaagggtgaacctggagcgcccggacaggtgatcggcggtgaaggacctggcctgcccggacggaagggcgacccgggcccgtcgggacccccgggtccgcgcggaccactgggggacccaggaccacgcggaccgccaggactgcctggaactgcgatgaaaggagataaaggagatagaggcgagcgcgggcccccagggcccggagagggcggaattgccccaggagaaccgggacttccagggcttccgggctcgccgggacctcagggtccggtggggcctcccgggaagaagggagaaaagggagactcggaggacggtgcgccgggactgccggggcaaccaggatcgcctggagagcaggggccccgggggccaccgggagcaatcggcccgaaaggagatcgaggattcccgggcccgttgggtgaagcgggtgaaaaaggagagcgcgggccgccgggccccgccggttcgcggggcctcccaggagttgccggaaggccaggagccaaaggtcccgagggcccgccaggtccgactggacggcagggagagaaaggagaaccgggccggccgggagatccggccgtggtcggtccggccgtggcgggccctaagggagaaaaaggcgacgtcggtcctgccggccccagaggggctactggagtgcagggagaacgcggcccgccgggactcgtgttgccgggggacccgggaccgaagggcgatccaggagatagaggcccgatcggacttaccggcagggcaggaccccctggagactcaggcccgccaggagaaaagggagatccgggcagaccaggccctccaggacctgtgggaccgcggggacgggatggtgaggtgggggaaaaaggcgacgaaggcccgccaggcgatcctggcctgccgggtaaagccggcgaacgggggttgcggggtgcaccaggcgtccgcgggccagtcggcgaaaagggagatcagggtgaccctggagaggacggaagaaacggatcgccaggatcgagcggaccaaagggggatagaggtgaaccaggaccaccgggcccaccgggacgcctggtcgatactggacctggagctcgcgaaaagggagaaccgggcgaccggggacaggaaggtccgcgcggaccaaagggtgacccaggccttccaggggccccgggcgaacgcggtattgagggatttcggggaccgccaggaccgcagggagatccgggcgtgaggggaccggccggtgagaaaggtgacagaggcccaccggggcttgatggcagatcaggcctggatggaaagccgggcgcggccggcccgtcgggcccgaacggagcggcgggaaaggccggcgatcctggcagggacggactgccaggactgcggggagaacaaggcttgccgggaccatccggcccaccaggactcccaggcaagccgggggaggacgggaagccgggactgaatggtaagaatggagagccgggagatccaggcgaggacggaaggaagggcgagaaaggcgatagcggagccagcggaagggagggccgcgatggcccgaagggagagcgcggcgcaccgggtatcctcggaccacagggcccgcctggattgccaggacccgtggggcccccaggtcagggtttcccgggggtcccaggaggcaccggtccgaagggcgaccggggagaaactggctcgaagggagaacaagggctcccgggggagagagggctgagaggtgaacccgggtcagtcccgaacgttgaccgcctgctggagacggccggcattaaagcgtcggccctgcgggagatcgtggaaacctgggatgagtcctcgggatcgttcttgcctgtgccagaaagacgcaggggacctaaaggagactcgggagaacaaggtccgccgggaaaggaaggacctataggttttccaggagaacggggactcaagggtgatcggggagatccgggacctcagggacctccgggtttggccctcggagaaaggggaccgccaggtccaagcggactggctggagagccaggtaaaccgggcatcccaggattgccgggacgggcgggcggagtgggtgaggccggacgcccgggagaaaggggagaaaggggagaaaagggagaacgtggcgaacagggacgcgacgggccgccgggactcccgggtaccccgggtccgcctggaccgccaggcccgaaggtgtcggtggatgaaccagggcctggattgagcggggaacagggaccgccgggcctgaagggcgcgaagggtgagcctggaagcaatggtgatcaaggcccgaagggggaccggggtgtgcctggaatcaaaggcgataggggcgaaccggggcctagaggacaagacggcaacccgggactgcccggtgagcgggggatggctggtccggaggggaagcccggactgcaaggaccgcgcggtccgccgggtccagtgggtgggcatggtgacccgggacctccaggggctcccggacttgcaggcccggccgggccgcagggaccatcagggctcaaaggggagccgggtgaaaccggtccgccgggacgcggtttgactggaccaactggcgcggtgggtctgccgggacctccaggaccgtcgggactggtggggccacagggctcccctgggctgccgggccaagtgggtgaaaccggaaaaccgggggcacctggacgggatggagcgtccggcaaggacggagatcgagggtcccctggcgtgccggggtccccgggactgccgggaccggtcggcccaaaaggagagccgggccctaccggagccccgggccaagcggtggtgggactcccaggcgccaagggagaaaaaggagcccctggaggactggccggtgacctggtcggggaaccgggcgctaagggagacaggggattgccggggccacgcggagagaagggagaagccggaagagcaggcgagccgggcgacccgggagaggacggacagaagggcgcaccgggacctaagggattcaagggggaccccggagtcggagtgcctggctcaccgggaccgccaggccctcccggagtgaagggagatctggggttgccgggactgccgggggcgcccggggttgtcgggttcccaggacagaccgggccacgaggggaaatgggccagccagggccctcgggagaacgcggcctggctggtccgccgggcagggaggggatccctggcccactcggacctcctggtcctcctggcagtgtggggccaccgggcgcatccgggctgaagggagacaaaggcgacccgggagtgggccttccaggaccaaggggagagaggggagagccaggaatcagaggcgaagatggacgccctggacaggagggtcctcggggtctgactggccctcccggatcgagaggtgaacgtggagagaagggagacgtcggaagcgcgggtttgaagggagataagggggactcagccgtgatcctgggtccgccagggccccgcggagcaaaaggagacatgggtgagcgcgggccacgcggacttgacggagataagggaccacggggagataatggggacccgggcgataaggggtccaagggggaacccggagacaaaggatcggctggcctgccagggctccgcggccttctgggaccgcagggacaaccgggcgcagccggaatcccaggcgacccgggtagtccggggaaggacggtgtgcctggtatcagaggtgaaaagggagatgtcgggttcatgggcccacggggcctgaaaggtgaacggggagtgaagggggcctgcggactggacggtgaaaagggagacaagggagaagccggaccgccgggcagacccggactcgcaggacacaagggagagatgggcgagccgggcgtgccaggacagtcgggcgctcctggaaaggaaggacttatcggcccaaagggagatcgcggattcgatggacaaccaggacccaagggagatcagggcgagaagggcgagagagggaccccgggcatcggcggcttcccgggaccatcggggaacgacggatcagccgggccgcctgggccgccgggatctgtcggaccaagaggtccagaagggttgcaaggccagaagggtgagagaggaccgccaggagaacgcgtggtgggcgccccgggagtgcctggcgcccccggagaaagaggcgagcaaggacggccaggtcctgcggggccacgcggagaaaaaggggaagccgcattgacggaagatgacataagaggatttgttaggcaagagatgtcccaacactgcgcctgtcagggacagtttatcgcgagcggtagccgtccgttgccatcgtacgccgcggataccgcaggctcccagctgcacgccgtgcctgtgctgcgcgtgtcccacgcagaggaagaagagagggtgcccccggaagatgacgagtactcagagtattcggaatactccgttgaggaataccaggacccggaagcaccttgggacagcgacgacccgtgctcactcccgcttgacgagggaagttgcactgcttataccctgaggtggtaccatagagcagtgacgggatccaccgaagcgtgccacccttttgtgtacggaggttgcggaggaaatgccaaccggtttggaaccagggaagcatgcgagcgcagatgcccgcctcgcgtggtccagtcccaggggactggaaccgcgcaggat

SEQ ID NO: 9604 - DNA, 8832 bp, synthetic construct
  misc_feature 1..8832: note = source = /note="Description of Artificial Sequence: Synthetic coding sequence"
  source 1..8832: mol_type = other DNA
atgaccctgaggctgttggtggcagctctttgcgcaggaatcttggcggaagcgcccagagtgcgcgcccaacatcgcgagagagtcacctgcacccggctctacgcggccgatattgtgttcttgctggatggatcgtcatcgatcggaagatcgaatttcagggaagtgaggagcttcctcgaaggtctggtgctccctttcagcggagcggcctccgcgcaaggtgtccgattcgcaaccgtgcaatactcggacgatccgcggactgaattcggactggacgccctgggttcgggtggggacgtgatacgggccatccgggaactctcgtacaagggcggaaatacccggactggagcggcgatcctgcacgttgcggaccacgtctttctgccccaactggctcggcctggagtgccgaaggtgtgcatcctgattaccgatgggaagtcccaggacctcgtggacaccgcggcgcaacggctgaagggacagggagtgaagctcttcgctgtcggcatcaaaaatgccgacccggaggaactgaaacgcgtggcatctcaacctacttctgatttcttcttcttcgtcaacgatttctccatcctccgcaccctcctccctctggtgagcaggagagtctgcacgactgccggaggcgtccctgtcactcgcccgcccgacgactccacctcggcaccccgggacctcgtcctttcggaaccttcatcccaatcactgcgggtgcagtggactgccgcctccggaccggtgaccgggtacaaagtccagtacaccccgctgactggattgggtcagccactcccctccgaaagacaagaagtcaatgtgccagccggggaaacctcggtgcgccttagaggactccggccgcttaccgagtaccaggtgactgtgattgcactctacgcaaactcgatcggggaggctgtgagcggaacggctcgcaccaccgcactggaaggcccggagcttacgatccaaaatactactgcccactcgctccttgtggcttggcggtccgtgccgggagccactggataccgcgtgacctggcgggtgctgtcaggcggcccaactcagcagcaggagctgggaccagggcaggggtcagtgctcctgagggatttggagccagggacggattacgaggtgactgtctctactctgttcggacgctccgtggggccggccacttctcttatggcccggacggatgcatccgtggagcaaactctgcgaccggttatcctggggccaaccagcatcctgctgtcgtggaacctcgtgccggaagcacgggggtaccggctggagtggcgcagagaaaccggactggaaccccctcagaaggtggtgttgccctcggatgtgacccgataccaactcgacgggctgcaaccgggaactgaataccgactgacgctgtacactcttctggaaggccatgaagtggccacgccagctactgtggtgccgactggcccggaacttccagtgtccccggtcacggaccttcaggctactgagctcccgggacagcgggtgcgggtgtcctggagcccagtgccgggtgccactcagtacaggatcatcgtccgcagcactcagggagtcgaaagaaccctggtgctgcctggatcgcaaaccgccttcgacctggatgacgtccaggcaggcctcagctacactgtgcgcgtgtcagccagggtgggtccgcgagagggatcggcttcagtgcttacggtaagacgagaacctgagacgccgttggcggtcccgggactgagagtcgtcgtgtctgacgcaactcgggtgagagtcgcatggggacctgtccccggggcctccggatttcgcatctcatggagcaccgggagcggacctgaatcgtcacaaactcttccaccggatagcaccgccactgacatcactggactgcagcctggaactacctaccaggttgctgtgtcggtgctcagaggacgtgaggaaggaccggcggccgtgatcgtcgcaagaactgacccactcggaccagtgcggactgtgcacgtcacgcaggcctcatcgtcatccgtcaccatcacctggacccgcgttccgggagcgaccggataccgcgtatcgtggcatagcgcccatggaccagaaaagtcccagcttgtcagcggagaagccaccgtggcggaactggacgggctggaacccgatactgaatacaccgtccacgtcagagctcacgtcgcgggagtggacggcccacctgcttccgtcgtggtgagaaccgccccagaacccgtggggagggtgagccgcctccaaatccttaacgcgagctccgatgtcctccggattacttgggtgggggtgaccggagctactgcctaccgccttgcctggggacgatcggaaggtggaccgatgcggcatcaaatcctgccgggcaacaccgattcggcagaaatcaggggactggaagggggagtttcatactcagtccgtgtcactgctctggtgggcgaccgggagggaacgcctgtgtctatcgtggtcactaccccgcccgaggcccctccggcactcggaacgctccacgtggtgcaacgcggagaacactcactgcgcctgcggtgggagcccgtgccgcgcgcccagggtttccttctgcattggcaacccgaaggaggccaagaacagtcccgggtgctgggaccggagttgtcaagctatcatctcgatggacttgaacccgcaacccagtacagagtccggctttccgtgttgggccctgcgggagagggcccgagcgccgaagtgaccgctcggaccgagtcccctcgcgttccgtccatcgagctcagagtggtggatacctcgattgactcggtgaccctggcctggaccccggtgagccgcgcttcctcgtacatcctgtcgtggaggccgctgagaggcccaggacaggaagtgccaggctcgccgcagactctgccgggtatttcaagctcgcagcgcgtcactggtctggaaccgggagtgtcatacatcttcagcctcaccccggtgttggatggtgtccgcggacccgaggcttccgtgactcaaacgccggtgtgcccgcgcggactcgccgacgtcgtctttctgccacatgcgacccaagataacgcccaccgcgccgaggcaacgcggcgcgtgcttgagcgcttggtcctcgccctgggaccactgggaccgcaggcagtgcaagtcggactgctgtcctactctcaccggccctcccctctcttcccactgaacggctcccatgacctgggaatcatcctgcagcggatccgagacatgccgtatatggatccatcaggaaataacttggggaccgccgtcgtgactgcccaccgctacatgctcgcgccggatgccccagggcggcgtcagcatgtcccgggagtgatggtcctgctcgtggacgagcctctccggggtgacatcttctcgccaatcagagaggcgcaggccagcggtttgaacgtggtgatgctcgggatggctggcgccgacccggagcaactgaggcggctcgcgccgggaatggactcagtgcaaacctttttcgccgttgacgacgggccgtcattggatcaggcagtctccggcctggccactgcgctgtgccaagctagcttcaccacccagcctagaccagagccgtgcccggtgtactgccccaaggggcagaagggcgagccaggagaaatgggactgagagggcaggtcggtcctccgggcgaccctggcctgcctggcagaaccggagcccctggccctcaggggcctccggggtcggctactgcgaaaggagaacgcgggtttcccggtgccgacggacggccgggcagccccggaagagctggtaacccgggaacccctggggcaccaggactcaagggcagcccaggactgcccggtccgagaggtgatcccggagagaggggcccgcgcgggccgaaaggagagcctggcgccccgggacaggtgatcgggggtgaaggcccgggtttgccgggacggaagggcgatcctggcccgtctggaccgccgggaccgcgcggaccgctgggagatccgggacctagaggaccgccaggactgcctggaactgccatgaagggagacaagggtgacagaggcgaaagaggcccgccagggccgggcgaaggaggtattgcgcccggagagccgggactcccaggactgccaggaagcccagggccccaaggacctgtcgggccaccggggaaaaagggagaaaagggagactccgaggacggggctccgggactcccaggacagccaggatcgccaggagaacagggcccgagaggccccccgggagccatcggtccgaaaggagacagggggttccctggcccgctgggcgaggccggcgaaaagggagagcgtggaccgcctggcccggcgggatcaagaggactcccgggggttgcggggcgcccgggtgcgaaggggccggagggcccacccggacccaccggacggcagggagaaaagggtgaacctgggcggccaggagatccggcggtggtggggccagccgtggcgggccctaagggagagaaaggggatgtcgggccggctggaccacggggcgccactggagtccaaggtgagcggggaccacctggactcgtgctgccgggagatcctggacccaagggggacccgggtgaccggggacccatcggactcactggccgcgcaggaccaccaggagattcggggccgcctggggagaagggagatcccgggcgccctgggccacctggaccagtcggaccacgcggccgggacggagaagtgggagaaaagggagacgaaggacccccgggggatccgggactcccaggaaaagctggagagcgcggactgagaggagctccaggcgtgcgcgggccggtcggagaaaagggggatcagggcgaccccggtgaagatggacggaacggttccccaggatctagcggtccaaagggagatcgcggagagcctggccccccaggcccgccaggccgcctggtcgataccggtccaggagccagggagaagggagagccgggagatcgcggtcaggaaggtcctagaggcccgaagggcgatcctggactgccaggagccccaggagaacggggaatcgagggctttagaggaccgccaggtccccagggggatccaggagtgcgggggccggccggtgagaagggggaccggggaccaccggggctggatggacggagcggactcgacggaaagccgggagccgccggcccgtccggaccaaatggagcggccgggaaggccggggatccaggtcgggatgggctgcctggactgagaggagaacaggggctcccagggccatccggacctcctggcctcccgggaaagcctggcgaagatggaaagccgggactcaacggcaaaaacggcgagccgggtgacccaggagaggacggcaggaaaggtgaaaaaggagattcgggagcgagcggacgtgagggtcgcgatggcccgaagggcgagcggggagcgcctggaatcctgggtccgcagggaccaccaggactgccggggcctgtcggaccacctgggcagggcttcccgggtgtgccgggaggaactggcccaaagggagataggggagaaaccggaagcaagggcgaacagggccttccgggagaacgcgggctgcgcggagagccgggatcagtgcccaatgtggacagactgctggaaaccgccgggattaaggcctctgccctccgcgaaatcgtggaaacttgggatgagtccagcggttcgtttctgccagttccagaacgtcggagaggccctaagggtgattctggcgagcaggggccaccgggtaaagagggaccgattgggttcccgggagaaaggggcctcaagggagatcggggcgatcctggaccccagggaccgccgggactggcgctcggcgagcgcggccctcccggaccgagcgggcttgcaggggaaccgggaaagccaggaatcccgggacttcctggcagagccggcggtgtgggagaagctggacggcctggcgaacgcggcgagagaggtgaaaagggggagagaggagagcagggccgcgatggaccaccagggctgccggggacccctgggccgccgggaccgccagggccaaaggtgtcggtcgacgagccggggccaggactgtcgggggagcaaggaccccccggactgaagggagcaaagggagagccgggtagcaacggtgatcaaggaccaaagggggaccgcggggtgccgggaatcaagggagataggggcgaaccgggaccgagaggccaggatggcaatccgggacttccaggagaacgcggcatggcaggccctgaaggaaaacctggactgcagggccccaggggaccaccggggcccgtgggcggacacggcgatccaggcccaccgggagccccaggactggcgggaccggcgggcccacagggcccgagcggactgaagggggagccgggcgagactggcccgccggggcggggcctgacgggaccaactggagccgtgggactgccaggccctccgggtccgagcggactggtgggaccacaggggtccccgggactcccaggacaggtcggtgagactggcaagccaggagcgcccggacgcgatggcgcatcgggcaaggacggcgatcggggatcgcccggcgttcccggttccccaggactcccggggcccgtgggcccgaaaggggagccaggtccgactggagcgcccggacaggcggttgtgggcctgccaggcgccaaaggagaaaaaggggcacctggcggactcgccggtgacctcgtgggcgaacccggagcaaagggggaccggggactgcccggtccacggggagagaagggagaggcagggagggcgggagaaccaggagatcccggcgaggacggacagaaaggcgcgccaggccccaagggattcaagggggacccgggggttggagtcccgggatcaccggggccgccgggcccgccgggggtgaaaggagatctgggtttgccggggctcccgggtgcccccggagtggtgggattcccaggacagaccggaccacgcggagaaatgggacaaccaggtccttcaggggagagaggactggcaggtccgccaggaagagaaggcattcctggtccgttgggccccccaggacctcccggttcggtgggaccaccaggagcctcgggcctcaagggggataaaggagatccgggagtgggactgccgggacctcggggagagagaggcgagccgggcatccggggcgaagatggccgccctggccaagaaggaccacgcggactgacgggaccgcctggttcacgcggagaacggggagaaaaaggagatgtggggtccgctggactgaagggggacaagggggactccgccgtgatcctcggaccgcctggcccgcggggtgctaaaggagatatgggggagcgcggaccacggggactcgacggagataaaggcccaagaggcgacaacggggaccccggagataagggctcgaaaggggaacctggtgataaaggatccgccggcctgcccggactgcgcggactgctgggaccgcagggacagcctggggcagccggcatccctggagatccaggaagcccaggcaaggacggtgtccctggaatccgcggagaaaaaggtgatgtgggcttcatgggcccgagggggctgaaaggggaacggggcgtgaagggcgcctgcgggctggatggtgaaaaaggagacaagggagaagctggaccgccaggacgaccgggattggcgggacacaaaggcgagatgggcgaaccgggagtgccgggccagtccggagctccgggaaaggaaggactgatcggaccgaagggggaccgcggcttcgatggacaaccgggcccgaaaggagatcaaggagaaaaaggcgaacgcggcaccccgggcatcggaggatttccgggcccctcgggtaatgacggatcggccgggccgccaggaccgccgggatcggtgggtccacggggcccagagggattgcagggacaaaaaggagagcggggccctccgggtgaacgcgtggttggtgccccgggagtgccaggagcgccgggagaacgcggagagcagggccggccgggtccagccggcccgcggggggaaaagggagaggcggccctgactgaggacgacatccggggttttgtccggcaggagatgtcacaacattgcgcatgccaaggacagttcatcgcgtcgggatcgcgcccgcttccgtcttacgccgcggacactgctggaagccaactccacgccgtgccggtgctgcgcgtgtcgcacgcggaggaagaagagcgggtgcctccagaggatgacgagtacagcgaatactctgagtactcggtggaggagtatcaagatccggaagcaccgtgggattcggacgatccgtgcagcctcccactggacgaggggtcatgcactgcatacactcttcgctggtaccatcgggctgtcactgggtcaactgaggcctgccatccgtttgtgtatggaggctgtggaggaaacgcgaaccgcttcggaacgagagaggcctgtgagcggcgctgtcccccgcgcgtggtgcaatcgcaaggaaccgggacggcgcaagat

SEQ ID NO: 9605 - DNA, 8832 bp, synthetic construct
  misc_feature 1..8832: note = source = /note="Description of Artificial Sequence: Synthetic coding sequence"
  source 1..8832: mol_type = other DNA
atgacattgcgcctattagtcgctgcgctgtgtgctggaatcctggccgaagccccgagagtaagagcccagcatcgggagcgtgtgacctgcacgagactgtatgcggctgatattgtctttttattagatggaagttcatcaattggcagatctaatttccgggaagtgcgttcctttttagaagggttagttttgccgttttccggggcagcatctgcgcagggggttagatttgccacggttcagtattcagatgatccgcgcacggagtttggtcttgatgccctaggcagcggcggcgacgtgatcagagcaatcagggagctctcgtataaaggcggaaacacacgcacaggtgcagccatacttcatgtcgcggatcacgtttttttacctcaactagcacgtcctggagtccctaaagtatgcattctcattacagatgggaaaagccaggatttagttgatactgctgcacagcgattgaaaggacagggagtcaaactgttcgccgtgggtattaaaaatgcggatcctgaagaattaaaaagagtcgcctctcagccgacatccgactttttcttttttgtcaacgacttttcgattcttcggactctattgccactggtttccagacgtgtatgtaccacggcaggaggcgttcccgtgacacggccgccggatgattccacatccgcaccaagagacttggtgttaagtgagccttcatctcaatcactccgcgtgcagtggacggctgcgtcgggaccggttacgggttacaaagttcagtacactccattaacaggtctcgggcaacctctcccgtcagagcgccaggaggtaaatgtgcccgctggagaaacatcggtgcgtctgcgtggcttgagaccgttgacagaatatcaggtaacggtcatcgccctttatgctaattccattggcgaagcagtgtcaggaacagctcggacaacggcgctggaaggaccggaacttactatccagaatacaacggctcattcccttttagttgcctggcgcagtgtacctggtgctacgggatatcgcgttacgtggcgcgtgctctcgggggggccaacacagcaacaggaattaggtccggggcaaggcagcgttttgttacgcgatttggaaccgggcacagattacgaagtgacggtttcaacactttttggtagaagtgtaggcccggcaacctctctgatggcgcgtacagatgcgtctgtggaacaaaccttacgtcctgtaattctaggcccgacttcgattttgctttcttggaatttggtcccagaagcccgtggctatagattggaatggagacgcgaaacaggcctcgaacctccgcaaaaagtggtacttccgagtgatgtgacacggtaccaacttgacggactgcaacctggtactgagtatcgcctgacgttgtacacgttgttggaaggacacgaggttgctacgcccgccaccgtagtgccgacgggcccggaattacctgttagccctgtgaccgatcttcaagctacagaattgccgggtcaaagggtgcgtgtatcttggagccctgtgccgggcgctacacaatatcgcatcatcgtaagaagtacacagggggttgagcggacgttagttcttccgggatcacagacggcctttgatcttgacgatgtccaagcggggttgagctatacagtgagagtttccgcccgagtgggtccgcgtgaaggcagcgcgtcggttttaacagtccgtagggagcccgaaacaccgttagctgtccccggtttgagagtcgttgtttcggatgcaacacgggtgagagtcgcgtggggcccggtgcctggtgctagcggtttcagaatttcttggtctaccggctctggccctgaatcttctcaaacgctgccgcctgattccactgcgacagatataaccggtctgcaaccggggactacatatcaagtagccgtgtctgtccttcgaggacgggaagaaggtccagctgcagtgattgtcgccagaactgaccccttaggacccgttcgtactgtacacgtaacacaggcatcgtcaagctcagtaacaattacgtggactcgggtgcctggcgcaacgggttatcgagtttcgtggcactcagcacatggcccggagaagtcgcagttggtatcgggtgaagcaacagtggcagaattggatggcctcgaaccggacactgagtacaccgtgcatgttcgagcacatgttgcgggcgtggacggtccgccagcctcagtcgtggttcggacggcaccggaacctgtgggacgagtatcacgactgcaaattttaaatgcatcctccgatgttttgcgcattacttgggtgggagttactggtgcgaccgcctatagacttgcgtgggggagatccgaaggggggcctatgcgccaccagattttaccggggaatacagattcggccgaaattcgtggcttagagggaggggtctcctatagcgtaagagtgaccgccttggtgggtgatcgagaaggcactcctgtctcaatcgttgtaacaaccccccctgaggcgccgcctgctttgggaacacttcatgtagtgcaacggggcgaacattcattacggttgcggtgggaacctgtcccgcgtgcacaaggttttctactgcactggcagccagaaggaggccaggaacagtctagggtcctagggcctgaattatcatcataccatttggatggactagaaccggctacacagtaccgggtgagacttagcgtgcttggaccagccggtgagggccccagtgccgaagtcaccgctcgcacggagagccctcgtgttccatcgattgagctacgggttgtggatacgagcattgactctgtaacgcttgcgtggacaccggttagcagagctagcagttatatcttaagttggagaccgttgcgcggacctggccaggaagtgccgggctcaccacagacgcttccaggcatctccagttctcagagagttacaggactggaaccaggagtgagctatattttctcgttaacccctgtgctggatggcgttcgcggccctgaggcgagcgtaacacaaacgccggtatgcccaagaggtcttgcggatgtggtgtttctgccgcatgcgacccaagataacgcacatcgcgcggaagccacacggcgagtccttgaacggttagtcctggcacttggccctctgggaccgcaggctgttcaagtcggccttctttcatatagccatcgcccgtctccgctgtttccattaaatggatcacacgatttaggcatcattttgcaaagaatccgggatatgccgtatatggatccatccggcaataacctggggactgcggttgtgactgcgcatcgctatatgctagctccggacgcgcctggacgccgccagcatgtgccgggtgttatggtcctccttgtggatgaacctctacggggggatatcttctccccgattcgtgaggcgcaggcttctggcctgaacgtcgtaatgttaggaatggccggagcggacccagaacaactgagacgtcttgcgcctggaatggattcagtgcaaacgttcttcgcagtggatgacggcccgtctttggaccaagctgtaagcggacttgcgacagcattatgccaagcgagcttcacaacgcaacctagacccgaaccgtgccctgtctattgtcctaaaggacagaaaggagaacctggagagatgggactccgcggccaagtcggtccgccgggagatccagggttacccgggcgcacaggagcacctggcccgcagggcccgccgggctcagctactgctaaaggtgaacggggcttccctggagctgatggccgacccggctcccccgggagagccgggaaccccggaactccgggggcccctggactgaaaggttctccgggtttaccggggccccgaggagaccctggagagagaggcccgagaggtccgaaaggcgagccaggagcaccgggacaagtcattggtggagaggggcccggtcttcctggccgaaagggggatccgggcccatcaggaccaccgggtccacgcgggcctctgggtgacccgggaccacgtgggcccccaggacttcctggaaccgctatgaaaggtgataaaggtgatcgcggtgaacgtggtccgccgggtccgggtgaaggcggcatcgctccgggagaaccgggactccctgggctgccgggatcccctggacctcaaggccctgttggcccaccgggtaaaaaaggtgaaaaaggtgattcagaggacggagccccaggtctcccgggacaaccgggctctccgggcgaacaaggaccgcggggacctccaggcgccatcggccctaaaggggaccgtggatttccgggcccccttggagaggctggcgagaagggagaaagaggccctccgggtcccgcgggcagtcgtggtctcccgggcgttgccggtcgcccaggcgccaagggccccgaaggcccgcctgggccgacgggtcgtcaaggtgaaaagggagaaccggggcgtcctggggaccctgcggtggtcggccctgccgtggccggaccgaagggagaaaaaggagatgtagggccagctggaccccgtggcgcgaccggggtccaaggcgagcgtggccctccgggactcgtgctacctggcgatccgggacccaaaggagacccaggggatagaggacctattggtttaacgggcagagcgggaccacctggcgattcgggaccgcctggggaaaaaggcgatccgggcagacctgggccaccgggaccagttggtccgagaggtagggatggagaagtaggagagaaaggggatgaaggtcctccgggagatcctggtttgccgggcaaagcaggggaacgcgggcttcgcggagctccaggcgtgcggggcccggtcggagaaaaaggagaccaaggggatccaggagaggatggccggaacggcagtccaggatcctcagggcctaaaggtgatcgcggcgaacctggcccgcccgggcctccaggccggttagtagatacaggacccggcgctcgggaaaaaggagaaccgggtgatcgggggcaagaagggcctcgggggcctaaaggtgatccggggctgcctggtgctccgggagaacgtggcatagaaggatttcgcggacctccgggtccgcaaggggatccgggagtccgtgggccggcaggagaaaaaggcgatagaggccccccaggactggatggcagatcaggccttgatggaaaaccgggcgccgctggacctagcggaccgaacggagcggctggtaaagcgggagacccgggcagggatgggcttccgggcctccggggcgagcaaggcttgcctggcccatctggcccgcctgggttgccgggcaaacctggcgaggacggcaaaccagggctgaacgggaaaaatggggaaccgggagatccgggtgaggatggacgcaagggagagaagggagactctggcgcaagcggccgtgaaggtcgagatggcccgaagggtgagaggggtgctcctggcatcttaggtccgcagggaccaccgggacttccgggtccggttggaccgccgggccaaggatttccgggcgtgccgggcggaacaggccccaaaggcgatagaggcgagacaggcagcaagggagagcaaggactgcctggggaaagaggtctgcgcggtgaaccgggttctgtgccaaatgtggaccgccttttggaaaccgcgggcattaaagcgtcagcattgagagaaatagttgaaacttgggatgaatcatcagggtcttttttacctgttcctgaaagacgacgcggccctaaaggagattctggagaacaaggaccgccaggaaaagaaggccccattggctttcctggggaacgcggccttaagggcgatagaggagatccggggccgcagggcccgccgggactggcgttaggagaacgaggtccaccaggaccgagcggattggcgggtgagcctggcaaaccgggaattcctggacttcccggaagggctggtggtgtgggggaagctggtagaccaggagagcggggagagaggggagagaaaggggaacggggggaacaaggtcgggacggtccgccgggccttcctggaaccccgggacctcctggtccgccgggccctaaagtgtctgttgacgaaccaggaccaggcctgtctggagaacagggtccgccgggactgaaaggcgcgaaaggagagccgggtagcaatggcgatcagggtccgaaaggggatcgcggcgttcctggtattaagggggatagaggtgagccgggaccgcgtggacaggatgggaatccgggattgccgggtgaacgggggatggcaggaccagaaggaaagcctgggctacaagggccgcgaggtccaccaggaccagttggcggacatggcgaccctgggccgccgggtgccccgggattggctggacctgctggccctcagggtccttcgggactgaaaggagaacctggcgaaacaggtccgcctggcagaggtttaacgggccctacgggagcagtcggacttcctgggcctcctggtccgtcgggactagtcggaccacaagggagcccgggattaccgggacaggtcggggagacaggtaaacctggagcccccggacgggatggtgcgtcaggaaaagatggcgatagaggctcaccaggagttcctggttctccagggctacccggacctgttggaccgaaaggagaaccggggcctacgggtgccccggggcaagcagtagtcggcctaccaggagcgaaaggagaaaaaggagcccctgggggtctggccggagacctagtcggagaacctggcgcaaagggagatcgcggcttaccgggaccgcgcggagaaaaaggggaggctggtcgtgcgggtgaaccgggtgatccgggagaggatgggcaaaaaggggctccaggcccgaaagggtttaaaggcgatccgggcgtcggcgtgcctggatcaccggggccacctgggccgcctggagtcaaaggtgatttggggttaccggggctgccgggagcccctggagtggtaggctttccgggccaaacgggcccgcgcggagaaatgggacagccgggccctagcggtgaaaggggactggctggtccgcctggcagggaaggcatcccgggaccgttggggcccccgggccctccggggtccgtaggaccccctggggcatctgggttaaagggcgacaaaggggaccctggcgttggactgcctggtccacgcggagaaagaggtgaaccgggaatccgtggggaagatggaagaccaggtcaggaaggtccgcgaggcctcactggcccgccaggaagccgtggggaacggggggaaaaaggtgacgtaggctccgctgggcttaagggagataaaggggactcagctgttattttgggcccccctgggcctcgaggggcaaaaggagatatgggcgagcgtggaccgcgagggttggatggagacaaaggacctagaggtgataacggggatcccggcgataaaggatctaagggcgaacctggagataaaggtagcgctggtctgccggggttgcggggtttattaggcccacaagggcaacctggggctgccggaataccgggggatccggggtctccgggcaaggacggtgtccctggcattagaggagagaagggggacgtcggttttatgggacctcgtggccttaaaggggaacggggagtgaagggcgcatgtggtctagatggagaaaaaggcgacaagggcgaagccggcccgccggggaggcccggcttggcagggcataaaggagagatgggagaacccggcgtacctgggcaatcaggcgcgcccggaaaggaagggttgattggtcctaaaggagatagaggctttgatggacagcctggcccgaaaggggaccagggggaaaaaggggaaagaggtaccccagggattgggggctttcctggcccttctggaaatgatggcagcgcaggaccgccgggaccgccagggtcagttggacctaggggaccggaaggcttacaaggccagaagggagaacgggggccgcctggcgaaagagtcgttggagcgccgggagttcctggtgcgcccggagagcgtggggaacaggggcgcccaggaccggcgggaccgcgtggagaaaaaggtgaggcagctcttaccgaggatgatattcgtggcttcgtccgccaagaaatgagccagcattgcgcttgccaagggcagtttattgcatccggctctagacctttaccgtcttatgcagccgatactgcgggaagccagctccatgcggttccagttttgcgtgtcagccatgccgaagaagaagaacgagtgcctccagaggacgacgaatattccgagtattcggagtactcagtcgaagagtatcaggatcccgaggctccgtgggattctgatgatccctgttctctccctcttgatgaaggatcatgtacggcgtataccttaagatggtaccatagagcagttacaggttccacagaggcttgccatccgtttgtttatggaggatgcggaggcaatgctaaccgttttggaacacgcgaagcgtgcgagcggagatgtccgccacgtgtggtgcaatcacaaggaacaggcactgcgcaggac

SEQ ID NO: 9606 - DNA, 8832 bp, synthetic construct
  misc_feature 1..8832: note = source = /note="Description of Artificial Sequence: Synthetic coding sequence"
  source 1..8832: mol_type = other DNA
atgacattgaggctcctcgtggctgctctttgcgctggaatcctcgctgaggcacctcgcgtgagagcacagcatagggagagggtgacctgtactcggctctatgctgccgatatcgttttcctcttagatgggtcatcatccattggaagatctaattttcgtgaagtccgttctttcctcgaggggctcgttctgccgttctcgggtgctgcttctgctcagggtgttcggttcgctacggttcaatactctgatgacccccggacagaatttggacttgacgctcttggatcaggtggagacgttatacgtgctattcgtgaactatcatataaagggggaaacaccaggacaggagcagcaattctgcatgttgccgaccatgtttttttacctcaattggccaggcccggtgtccctaaggtctgtatcttaatcaccgatggaaaatcgcaagatctggttgacacagcagcgcagcgtcttaaaggtcagggagtcaaattgtttgcagttggaattaagaacgcagatcctgaagagttgaaaagggttgcaagccaacccactagcgattttttttttttcgttaatgatttcagcattcttcgaactctcctccccctggtttcaaggcgtgtgtgcactacagctgggggagttcctgtgacaaggccaccagatgattcaacctccgcaccacgagaccttgttttgtcagagccatcatctcagtctctaagggtgcagtggaccgccgcgtctgggccggttacaggttataaagtccaatacactccactgacgggattgggtcagccacttccctccgaacggcaggaggttaacgtgcccgctggagaaacgtccgtgaggttgcgaggactaagaccactaaccgagtatcaggtgaccgtgattgctctttacgctaattcaataggggaagctgtttcggggacggctaggactactgctttggagggtccagagctgaccatacagaacactactgcgcactcgcttctagtagcttggcgctctgtaccaggggcaacagggtatcgtgttacttggagagttttgagcggtggaccaacacaacaacaggaacttggaccaggtcaaggttccgttcttttgcgtgatcttgagccaggtaccgattacgaagtgaccgtaagcacattattcggtagaagcgttggccctgctacctctttgatggcacgaacagatgctagcgtcgagcagactcttcggcctgtgatcctcggaccgaccagcattcttctgagctggaaccttgttccagaagcgagaggttatcggcttgaatggcggcgtgagaccggacttgagcctcctcaaaaggtggttctcccatctgacgtaactcgttatcaactcgatggactacaacctgggacggaatatcggttgaccttgtatacattattggaggggcatgaagttgctacgcctgctactgttgtccctaccggtcctgaattaccagttagtccagtcaccgatctccaggcaacagaattgcctggtcaaagggttcgtgtttcatggtcacctgtgcctggcgctactcagtatagaattatcgttcgtagcacacagggcgttgaaaggaccttggtgctcccaggatcccagacagcttttgaccttgatgatgtccaagctggtctgtcgtacacagtacgtgtctcagctagggtgggtcctagggaaggttccgcctcagtgttaacagtgcgtagggagccagagactccactagccgtgcctggacttcgagtggtcgtttctgatgcaacgcgagttagggtggcttggggacctgtgcccggcgcatcaggatttcgaatctcttggtcaactggatctggacctgaaagttcgcagacactcccccccgactcaacagcaactgacatcacggggcttcagccaggtacgacctaccaagtagcggtgtccgtgcttagaggccgcgaagaagggcccgcagctgtcatagtggctcgcactgatccactggggcctgtccgcactgtgcatgttacacaagcctcaagctcctccgttacgataacttggacgagggtgcctggggctaccggttatagggtgtcttggcattcggctcacggacccgaaaagtctcagctagtcagcggcgaggctaccgtggctgaactcgatggactggagcccgatactgagtacaccgtgcatgtgcgtgctcatgtcgctggtgtggatggtccaccggcctcagttgtggttcgcacggctcccgagccagttggtcgagtatctaggcttcaaatcctgaatgcgagcagtgatgttttaaggattacctgggtcggtgtgaccggagctactgcttaccgcttggcatggggacgatcagagggtggccctatgagacaccaaattcttcctggcaatactgattctgcagagataagaggtttagaaggaggggtttcctatagcgttagagtgacggcattagtgggtgaccgagagggaacccccgtgtcaattgtcgtgactactccaccggaagctccacctgctttgggcaccctgcatgtcgttcagaggggagagcatagtcttaggcttaggtgggaaccagttccaagggcgcagggatttctgttacactggcagcccgagggagggcaggagcaatcgagggttcttggtccagaactttcttcctaccatcttgacggattagaacctgcgacgcagtatcgtgtaagactctccgtcctggggcctgccggtgaaggaccatcagcagaagtaaccgcgaggaccgagagcccgagggttccttctatcgaattaagagtcgtggacacaagtattgactcagtgactctagcctggactcctgtttctagagctagttcatatatactcagttggaggcccttgaggggacctggacaggaagtgccaggaagtccacaaacactaccaggcatctcatcttcgcagcgtgttactggactggagccaggtgtctcttatatattctcacttactcctgtgctagatggagtgaggggtcctgaagcatcagtgacccagactcctgtttgccctaggggactcgcagatgttgtgttcttaccgcatgcaacccaagataatgcccatagagccgaggctacaagaagagttttagaaagactcgttctggcacttggaccactcggacctcaagctgtgcaagtggggcttctgtcttacagccataggccttcaccattgtttccattaaatggaagccatgacttgggaattattcttcagcgtatccgggatatgccatatatggatccgtcaggtaacaacttgggtaccgctgtggtgacggctcatcgttacatgcttgcaccagatgctccaggaaggagacagcacgttcctggagtcatggtacttctcgtcgatgagcctctgaggggagacatcttttctcccattcgggaagctcaagccagtggtttgaacgttgtcatgttgggtatggcgggcgcagacccagagcaacttaggcggcttgcgccagggatggactccgttcaaacgttttttgccgtcgacgacggtccttcacttgatcaagcagtatctggtttagcaactgctttgtgtcaggcttccttcaccactcaacccaggcccgagccatgcccggtgtactgtcccaagggccaaaaaggagaacctggagagatgggtctcaggggtcaagttggcccaccgggagatccgggactaccaggtcggaccggtgcacctggtccccaaggacctccaggatctgcaaccgcaaagggcgaaaggggcttccctggtgcagacggtcgccctgggtcgccaggacgggctggtaatcctggaactcctggggcacctgggctcaagggttcaccaggcttgcctggacctcgcggagaccctggagaaagaggccctcgggggcctaaaggtgagccaggcgccccgggacaagtaattggtggtgaaggaccagggctgcctggtcgtaagggagatccaggtccttctggaccccccggtcctcggggacctttgggagatccggggcccaggggaccaccaggtttgcctgggactgcgatgaaaggcgataagggggatagaggggaaaggggcccgcctggtccaggggaaggtgggattgcccctggagagcccggactccctgggttaccaggatcaccagggccgcaaggaccagtaggaccccctggtaagaagggagagaaaggtgattcagaggacggggctccgggtctacccggacaaccaggctctccgggggaacagggacccagaggtccacctggtgctattggtcccaaaggggacaggggattcccaggcccccttggtgaggcaggtgagaaaggggagaggggcccacctggtccagctggaagcaggggtcttccaggcgtcgctggacgacccggcgctaagggacctgagggcccaccgggccctactggtagacagggcgagaagggtgaaccaggaagacccggtgatcctgcagtggtgggaccagctgttgcggggcccaaaggagagaaaggcgatgtgggccccgctgggcctaggggggctacaggagtacagggggaacgtggacccccgggccttgttctgccaggtgatcccggtccaaagggtgacccaggggaccgtggtccaatcggtctcacaggtcgtgcgggtcctccgggagactccggtccgccaggcgagaagggtgatccggggcgccccggtcctcccggaccagtcggcccgcgtggacgtgatggtgaggttggtgaaaaaggtgatgagggccccccaggagatcccggtcttcctggaaaggccggtgaaagggggttgaggggcgcacctggcgtgagaggaccagtgggtgagaagggcgatcaaggagatccaggagaggatggtaggaacgggtcccctggtagctccgggccgaagggtgacagaggtgaacctggtccacctggcccgcctggtcgtcttgttgacacaggtcctggcgcacgtgagaaaggcgagccaggagatcggggtcaagagggtcctcgcggacctaaaggtgacccagggcttcctggcgcgccgggagagaggggcatcgaaggtttcagagggccacctggtcctcaaggagaccctggagtgcggggtccagcgggggagaagggagatcggggacctccaggcctcgatggccgatcaggtttggatggtaaacccggtgcagctggtccctcgggcccaaacggagctgccggtaaagctggtgatcctggccgagacggcctgcctggcctcaggggagaacagggattgccaggaccctccggccctccgggtctgccagggaagccaggtgaggatggaaaaccggggttaaacgggaagaacggcgagcctggagacccgggggaagacggaagaaagggagaaaaaggtgactccggagcaagcggccgtgaaggtagggatggccctaagggagaacgtggtgcgcccgggatcttaggaccacaaggcccaccaggccttccagggccagtcggcccgccgggtcaaggattccctggtgttccaggggggactgggccaaaaggtgatcgtggggaaaccgggtccaagggcgagcagggtttaccgggagagcggggtcttaggggtgaacctggctcagttcccaatgttgatcgtcttttggagactgccggcattaaagcatctgcactccgtgagatcgtagaaacttgggatgagtcgtcaggttcctttttgccagtgccagaaaggaggagaggaccaaagggtgattctggggaacaaggtccaccaggcaaggaaggacccattgggttccctggcgaacggggattaaaaggtgatcgaggtgatccaggtccacagggtcctcctggtctggctcttggggagcgtggccctccagggccttcggggctcgcgggcgagcccggtaagcccggaattcctgggcttcctggtcgtgctgggggggttggtgaggctgggcgtcctggcgagcggggagagagaggcgaaaagggcgagagaggtgaacaaggacgtgatgggccaccagggctccccggaactcccggcccacctggtccgcctggccctaaggtctctgtcgatgaacctggtcccggtttgtctggggaacaggggcctcctggtcttaagggtgctaaaggcgaacctggtagcaacggggatcagggacccaaaggggaccgtggtgttcctggaattaaaggtgacagaggtgaaccgggcccaagaggccaggatggcaatcccggtctcccaggtgagcgtggaatggcaggtccggaggggaagcctggcctccagggtcctagggggccgccaggccctgttggtggacatggtgatcctggacctccaggcgctcctgggttggctggaccagccggaccccagggaccaagcggattgaaaggggaacctggcgagactgggccccctggtcggggcttgaccgggcctacaggcgccgttggacttccaggtcctcctggacctagtgggttggttggacctcagggatctccggggctcccgggacaagtaggagagactggtaaaccgggagctccagggcgagatggtgctagcggaaaggatggagatcgagggagtcctggagtccctggaagccctggacttcccggaccggtgggtcctaagggagaaccaggccctactggagcgcctggacaggctgtagtggggctacctggtgcgaagggtgaaaagggcgctcctgggggattggcaggagatctggtcggggagccaggggcgaaaggtgatagagggcttcctgggccgcgaggtgagaaaggggaagccggacgagcgggcgaaccaggagaccccggggaggatggacagaagggagcacctggaccgaagggattcaagggtgatcctggggttggtgttccaggctcacctggtcctccagggccacctggtgtaaagggagacttggggcttcctgggctcccaggcgctcctggggttgtcggtttcccaggccaaacaggtccgagaggtgaaatgggtcagccagggccctcaggtgagagaggtctcgctggaccgcctggccgtgaaggtattcctggacccttgggtcctccaggaccacctggttctgtgggtccaccaggtgcatccgggttaaaaggggataaaggagacccaggagtcggccttccgggtccaagaggagagagaggtgaaccgggcatcaggggtgaggatggtcgaccagggcaagaaggaccccgtggtttgacgggtcctcctgggagtaggggggagaggggtgagaagggtgacgttggaagcgcagggcttaaaggtgataagggtgattctgctgtgatcctgggtccacctgggccccgtggggctaaaggagatatgggcgaacgtgggcctcgtgggcttgatggagataagggacctcgaggggataacggagatcccggggataagggttcaaaaggtgaaccaggtgataaaggttccgcaggactgccaggacttcgcggtctattggggcctcaaggtcaacctggagcagctggaattcctggtgatcctggaagccccggtaaggacggagttccaggaattcgaggagaaaaaggtgatgttggtttcatggggcctcggggtttgaaaggtgaaaggggtgtgaaaggtgcatgtggtttggatggagagaaaggagacaagggcgaagctggtccgccggggcgaccaggacttgcaggtcacaagggcgagatgggcgaaccaggcgtcccagggcagagtggtgcccctggtaaggaaggccttataggaccaaaaggggatcgcggcttcgacggccaacctggccctaagggagatcagggggaaaaaggagagcgagggacaccgggaattggtggttttccaggcccttcgggtaacgacgggtctgcgggaccacctggtcctccaggaagtgtgggacctagggggcccgaaggattgcagggccaaaaaggagagcgaggtccgcctggggaacgggttgttggcgctcccggtgttcctggtgctccaggggagagaggcgagcaaggccgtccaggtcccgccggacccagaggagagaagggtgaagcagcccttacagaagatgatataagaggattcgtgagacaagaaatgtcccagcactgtgcatgtcaaggacaatttattgcttctggttctaggcccctgcctagttacgcggcggacactgctgggtcacaactacatgctgtgccagttctccgtgtttcacatgccgaggaggaagagcgcgttccgccagaggatgatgaatactccgagtattcagagtacagcgtggaggaataccaggaccccgaagcaccatgggattcagacgatccttgttccctgccattggatgaaggatcgtgtaccgcctatactctgaggtggtatcaccgcgctgttacagggtctacagaagcttgtcatccttttgtgtacggaggttgtgggggtaatgccaaccgcttcggtactagagaggcttgtgagagaagatgcccccctcgcgttgttcaaagccagggaaccggcacggctcaggat

SEQ ID NO: 9607 - DNA, 8832 bp, synthetic construct
  misc_feature 1..8832: note = source = /note="Description of Artificial Sequence: Synthetic coding sequence"
  source 1..8832: mol_type = other DNA
atgactctgagactgctggtcgcagccctatgcgctggaattttagccgaagccccccgagtgagggcacaacatagagaacgcgtaacttgcactcggctctatgccgccgatatagtcttcctcctcgatggaagtagttcaataggaaggtcgaactttcgggaagtgaggtcatttctggaggggctggttctaccattctcaggggcagcctctgcccagggggtccgcttcgccacagtgcagtattctgatgatccaaggactgaattcggactagacgccctcgggtctgggggggatgttatccgcgctatacgggaactgtcttataaaggagggaatactaggactggagccgccatactccacgtcgcagatcatgtttttctcccccagctcgcaaggcctggagttcctaaagtgtgtatccttataactgatggaaaatcacaagacctagtggacacagccgctcagcggctgaaagggcagggagtgaagctatttgcagtcgggataaaaaacgcagaccccgaagagctgaaacgcgtcgcgtctcagcctacatccgatttttttttctttgtgaacgatttttctatactacggacgctactgccactcgtctctaggcgcgtgtgtactacagctgggggagtgccagtgacgagacctccagacgattctacaagtgccccaagagatctggtgctctccgaaccttcatcacagtctttgcgggtgcagtggactgctgctagtgggcctgttacaggatacaaagtgcaatatacaccactcactggactcggacagccacttccttcggaaagacaggaagtgaacgttcccgctggggagacttccgttcggctcagggggctccgccctctaactgaataccaggtcactgtcattgccttgtacgcaaactcaataggagaagctgtttctggaacagctcggactactgccttagaaggacctgaacttactatacagaacacaacagctcatagtctccttgtggcatggagatctgtgcctggggcaacagggtatcgggtgacttggagagtgctaagtggggggcccacacagcagcaggaacttgggcctggacagggatctgtactccttcgggatttggaacctgggactgattacgaagttactgtaagtacattatttgggcgctctgtagggcctgctacatcactgatggcacgtacagatgcgtctgtagaacagacattaagacccgtgatattggggcctacttcaattctcctttcctggaatctcgtgcctgaggctcgcggatacagactagaatggcgacgggaaacaggactagagccccctcagaaagtggtcctcccttcggatgtaacacgataccagttagacggactgcagccagggacagaataccggctgacattatatacactactagaaggacatgaagtggccacgcccgctacagtggtgcctactgggcccgaactacctgtgtctccagtaactgacctgcaggctactgaactaccagggcagagggtgagagtgagttggtcccccgtacccggagctactcagtatcgaatcattgtgcggtccactcagggagtggaaaggacactggtacttcccggatcccaaacagcctttgatctagatgatgttcaggccggacttagttacactgtccgcgtctcagcccgcgtggggcccagagagggatccgcttccgtgttgacagtgaggagggaacccgagacacctttagctgtccctggactcagggtagtggtgtcagatgctacgcgagtaagagtcgcatggggacctgtacccggagcctccgggttcaggatctcctggagtacaggaagtgggcccgaatcttcacagacattaccccccgacagtactgctacagatattactgggctccagcccgggactacataccaggtggctgtgtctgtgctgaggggaagagaggaagggcctgcagctgttatagtggctcgaactgatcctctggggccagtgcgcacagtgcatgtgacacaggcaagttcgtcctctgtaacaataacatggacgagggtgcccggggccacaggatatcgggtctcatggcatagtgcgcacggacctgaaaaatctcagctcgtgagtggggaagctactgtggctgaattagatgggttggaacctgatactgaatacacagtacacgtaagggcgcacgttgccggggtagacgggccccccgcgtctgtagtcgtacgaactgctcctgaacctgttgggcgggtatctaggctgcagatcctcaacgctagttctgatgtactcaggattacatgggtgggggtcactggagctacagcataccgccttgcttggggaagatccgaaggagggccaatgaggcatcagatcctgcccgggaacactgattcagctgaaattcgcgggctggaagggggggtgtcgtacagtgtgcgggtgactgcgctggtcggagatagggaagggacacccgtgtctatcgtcgtgacaacaccccccgaagcgcctccagcgctggggacattacacgtagtgcagcggggagaacattctctcaggctcaggtgggagcctgtcccacgcgctcagggatttcttctgcactggcagccagaagggggacaggaacagtcacgagtgcttgggcctgaactctcatcttatcatttagatggactcgaacccgctactcagtatcgggtgagattatcagttctggggcccgcaggagaaggaccttccgcagaagtgacagctaggactgaatctccaagggtcccatcgatcgaattacgcgtggtagatacatcgatagactctgtgacactggcatggacacctgtctctcgggccagttcttatatcctttcttggaggcctttaagaggaccagggcaggaagtgcctggatccccacagactctaccaggaatctcttcctctcagagagtcacagggctggaacctggggtgtcctatatcttttctctgacacctgtccttgatggagtgagagggcctgaagcatctgtcacgcagactccagtttgtccacgggggctggccgatgtcgtgtttctgcctcacgccacacaggataatgcccatcgagcagaggccacacggagggttctggagcgcttggttctagcgctggggccactagggcctcaggctgtccaggttgggcttctctcttattcccacagaccatcacccctttttcctctgaatgggagtcatgatctagggataatactccagaggattagagatatgccatatatggatccatccgggaataacctggggactgcagtagtgactgctcataggtatatgcttgcccctgatgctcccggacggcggcagcatgtccccggagttatggtgctgttagtggatgaacctcttcgcggagatatcttttctcccatcagggaagctcaggcctcaggactcaacgtggtcatgctgggaatggctggggccgatccagagcagcttcggcgattagctcctggaatggattctgtgcagacgttcttcgccgtagacgatggaccctctctggatcaagctgtgtcagggcttgcaacagccctttgtcaagcctccttcacaacacagcctagacctgaaccttgtcccgtttattgtcccaaaggacagaagggggagccaggagagatggggcttaggggacaggtggggccaccaggggatcctggactcccaggacggactggagcccctgggccacaggggcctcccgggagtgctactgccaaaggggaacgcgggtttcctggggctgatggacggcccgggtcccccgggagggctgggaatcccgggacaccaggggctccggggctgaaaggatcccctggactgcccgggcccagaggggatccaggggaaagaggacctagagggcccaaaggggaacccggagctcctgggcaggttatagggggggagggacctgggctgcccggacgcaagggagatcctgggccatctgggccaccaggaccaaggggacccctcggagatccaggacctcgggggccacccggacttcccggaactgctatgaaaggagataaaggagatagaggagaacggggaccacccggaccaggggaaggggggattgcacccggagaaccagggcttccaggacttcctggatctcctggacctcaaggacctgtcgggcctcccgggaaaaaaggggaaaaaggggattcagaggatggagctcctggactgcctggacagccaggatcacccggggaacaagggccaagaggaccccctggagcaatagggcccaaaggggatagggggtttcccggacctctaggagaagcgggagagaaaggggaacgggggccccctgggccagccgggagtcgggggctgcctggagtcgctgggaggccaggagccaagggaccagaagggcctcccggacccactgggaggcagggagagaaaggggaacccggaaggcccggagatccagctgttgtgggacccgctgtagctgggccaaaaggggaaaaaggagatgtcggacctgccgggcctcgaggagccactggggttcagggagaacggggaccccctgggcttgtgctccccggagaccctggaccaaaaggggatccaggggataggggacccatcgggctgactggacgcgctggacctccaggagattccggacccccaggagaaaaaggagatcccgggaggcctggacccccagggccagtagggcccaggggacgggatggggaggtgggggaaaagggggatgaagggccacccggggatcccggattacccggaaaggcgggagaacgtgggctccggggggcccccggggttagagggcctgtgggagaaaagggagatcagggagatcccggggaagatgggcgcaatgggagtcccggatctagtggacccaagggagataggggagaaccaggaccacccgggccccctggaaggcttgttgatactgggcctggggctcgggaaaaaggagaaccaggggatagggggcaggaagggcctcgaggacccaaaggggatccaggattgcccggggccccaggagagcgcgggatcgaaggattcagggggcctcccggaccacagggggatccaggagtgagggggccagctggggaaaaaggggaccgaggaccacctgggcttgatggacgatctgggcttgatgggaaacccggggccgccgggccttctgggcccaacggagctgccgggaaagctggggatcccgggcgcgacggactccccggattacgaggagaacaggggctcccaggaccttcaggacccccaggactccccggaaagccgggagaagacggaaaacctgggctgaatggaaaaaatggagaacctggagatccaggggaggatgggcgaaaaggggagaaaggagatagtggggccagtgggagagagggacgggatggacccaaaggagaacggggggcccccggaatacttggaccccagggaccccccgggcttcccggaccagtggggccccccggacaggggtttcctggagtgccaggggggactgggccgaagggagataggggggaaacggggtccaaaggagagcaggggctgcctggggaaagggggctgcggggagagcccgggtccgtgcctaacgttgatagattgctggaaacagcaggaataaaggcctccgccctgagggaaattgtggaaacatgggatgaatcttccggatcgtttctgccagtacccgaacgacgccgggggcccaaaggagattccggggaacagggaccccccggaaaagaaggacctatcggattccccggggagcgcggactcaaaggggatcggggggacccggggccacaagggccaccagggctggcattaggagaacgcggaccacctgggccttctgggctggccggggagcctggaaaacccggaattcccgggctccccggacgggccggaggggtaggagaagcggggcggcccggggagaggggagaaaggggggaaaagggggaacgcggagaacaggggcgagatggaccccccggactgcccggaactccagggcccccgggaccaccaggacctaaagtaagtgtggatgaacccggacctggactgtctggggaacagggacctcctggactgaaaggggccaaaggagaacccggatccaacggggaccaggggcctaaaggagatcggggggtgcctgggataaaaggagatcggggggaacccggacctagggggcaagacgggaaccctgggttacccggggagagaggaatggctgggcctgagggaaaacctggactccaggggcccagagggcctcccggacctgtggggggacacggagatcccgggcctcctggggccccagggctcgcagggcccgccggaccccaaggaccaagtgggctcaagggagaacccggagaaactggaccccctggacggggattaactgggcctactggagccgtcgggcttcctggacctcccggaccttccggactcgtcggaccccagggatcacccgggcttccaggacaggtgggagagactgggaaacctggggctccagggagggatggagcatcagggaaagacggggatagaggatcgcctggggttcctggatccccagggctgcctggaccagttggaccaaaaggagaaccaggaccaactggggccccaggacaggccgtggtggggctccccggggccaaaggggaaaaaggggccccaggggggctggctggagatctcgtgggagaaccgggggccaagggagataggggactgcccgggccacggggagaaaaaggggaagcgggaagggccggagaacccggggatcctggagaagatggacaaaaaggggctcccggacctaaaggattcaaaggagatcccggagtgggagtccctggatctccagggcccccggggcctcccggagttaaaggggacctggggctgcccgggcttcccggggctcctggggtggtgggatttcctggacagacaggacctagaggggaaatgggacagcctgggccctcaggggagaggggattagcagggccccccgggagagagggaatccctgggcctctcggaccaccagggccccccggatcagttggacctccaggagcatccggattaaaaggagataaaggagatccaggggtcggactgccgggaccccgaggagaacgcggagaaccagggataaggggagaagatgggagacccgggcaagaggggcctcggggacttactgggccacccggatcacgtggagagagaggagaaaaaggggatgtagggtcagccggactgaaaggagataaaggggattccgctgttatcctcgggcctccaggaccacgaggggcaaaaggagatatgggagagagagggccaagaggattagatggggataaaggaccaagaggagataacggggatccaggagataaggggtcaaagggagaacccggggataaagggtccgccgggctgccagggctgaggggactcctcggaccacagggacagcccggagctgctgggataccaggagatcctgggagtcctggaaaagatggggtccctgggatccgcggagagaaaggagacgtcgggtttatggggcctcgggggctaaaaggagaaagaggggtgaaaggagcatgcgggcttgacggggaaaaaggagataaaggagaagctggaccacctgggcggcctgggttagccggacacaaaggggaaatgggagaacccggggtccctgggcagtctggagctcccggaaaagaggggctaatagggccaaagggagacagagggtttgatgggcagccaggacctaaaggagatcagggggaaaaaggagaacgggggacacccggaatcggggggtttcctgggcccagtgggaatgatgggtctgctgggccacctgggccccctggatcagtcgggcccagaggacccgaaggacttcaggggcagaaaggagagagggggccccctggagaaagagtggtaggagcgccaggagtccccggagccccaggggaaaggggggaacagggacgacccggaccagctggaccacggggggagaaaggagaagcagcgctcactgaagacgatatccgagggtttgttcgtcaggagatgtcacagcactgtgcgtgccaggggcagttcatcgcttctggatcgaggcctctcccttcctatgcagccgatactgctggatctcagttgcacgctgtccccgtgctgcgggtcagtcatgccgaagaagaagagcgagtgcctcccgaggatgacgaatattccgaatactctgagtactccgttgaagaatatcaggatcctgaagcaccttgggattcggatgatccctgctctctgcccctagacgagggatcttgtacagcctatacactccggtggtatcatcgagccgtgactgggagtacagaagcctgccaccccttcgtatatggggggtgtggagggaatgctaatagatttgggactagggaagcttgcgaacggcggtgccctcctcgagtggtacagagtcagggaactggaactgctcaggac

SEQ ID NO: 9608 - DNA, 8832 bp, synthetic construct
  misc_feature 1..8832: note = source = /note="Description of Artificial Sequence: Synthetic coding sequence"
  source 1..8832: mol_type = other DNA
atgaccctccgccttctggtagctgctctgtgcgcagggatactggccgaggctcctagggtccgcgcacagcacagggagcgggtgacctgcacaaggttgtacgcggccgatatcgtcttcctgctggacggtagcagctccattgggaggagcaacttccgggaagtgcggtcttttctcgagggactggtgctgccgttctctggtgctgccagcgcccagggcgtgcgattcgccactgtacagtacagcgatgatccccggacggagtttggactcgacgctctcggttccggtggggatgtgattcgcgccattagggagctgagctacaaagggggaaatacccggactggtgcggcaatcctgcacgttgccgaccatgtgtttctgccgcagctcgctagaccaggcgtgcctaaagtgtgtatcctgatcactgatggcaaaagccaagatttggtagatactgctgctcagcgccttaaggggcagggcgtcaaactgtttgctgtcgggataaagaatgctgaccccgaggagttgaagagggtcgcctcacagccgacttcagacttttttttttttgtaaacgacttttcaatcctgaggaccctgcttccattggtgtctcgccgggtgtgcacaacggccgggggggtgccggtaaccagacctcctgacgattcaaccagtgccccgagagatcttgtgctgagtgagcccagcagccagtcactgcgcgtgcaatggaccgccgcaagcggacctgtgactggttacaaagtgcagtatacgcccctgaccggtcttggacagcccctcccaagcgagaggcaagaagtgaatgtgccggccggagaaacctccgtcagacttaggggcctccgacctctcaccgagtatcaggtcaccgttattgctctgtacgccaacagtattggggaggcagtgagcgggacagcaaggacaactgcccttgagggtcctgagttgacaatccagaacacaactgcccactcactgcttgtcgcctggcggagcgtacctggtgcaactggctacagagtgacatggagagtcttgagcggagggccaacgcaacagcaggaactcggccctggccaggggagcgtattgctgcgggatctggaaccgggcacggactatgaggttacagtgtcaacactgtttggtcgcagcgtgggcccggcgactagccttatggccagaactgacgctagcgtcgagcagacccttaggcctgtgatcctggggccaacctctattctgctctcttggaatcttgtgcccgaagctcgaggctatcggctggaatggaggcgggagaccggattggaacccccccaaaaggtggtgctgccatctgatgtgacaaggtatcagctggatggactgcagcccggaaccgagtatcgattgaccctctacacattgttggaggggcatgaggtcgccacaccagctacagtggttccaacagggccagagctccccgtgtcaccagtgactgatctccaggcgaccgaactgcccggtcagagagtccgagtcagctggtccccggtccccggggccacccagtaccgcatcattgtgcggtccacccagggagtggaacgcaccctggttctccccggaagccagaccgcgtttgatctcgacgatgtccaggccggtctgtcctacaccgtgagagtgagtgcccgggtgggaccacgagaagggtcagccagcgtgctgacggtcagacgggaacctgaaacgcctctggccgtgcctggtctgagggtcgtggtgtccgacgccactagagtgcgggtagcatgggggcccgtcccaggtgcgtccggtttcaggataagctggagcacgggcagcggcccagaatcctcccagacgctcccgcccgacagcaccgcaacagatattaccggcctgcaacctggaactacatatcaggtcgccgtgagcgtgttgagaggtagggaagaagggcctgctgcagtgatcgtggcaagaacagacccactggggcctgttcgcacagtgcacgttactcaggcatcaagttcctccgtcaccattacgtggacacgggtgccaggggcgacaggctacagggtctcatggcattccgctcacgggcctgagaaaagccagctggttagtggggaggcaacagtcgcagagctcgacggactggaaccagacactgagtacaccgtgcatgtgcgggcccacgtggctggcgtggacggcccccccgcttccgtcgtagtgagaaccgcaccagagcctgtgggtagagtgtctaggctgcagatcctcaatgccagttcagatgtactgcggatcacgtgggtcggggtaacaggcgctactgcgtataggttggcctggggcaggtctgagggtggaccaatgaggcatcagatcttgcctggtaacacggactccgcagagatcagaggcctggagggaggtgtcagctatagcgtacgagtgacagcactcgtgggcgatcgcgagggcactccggttagcattgtggtgaccaccccccctgaggccccccctgccctcggtacgctgcacgtggtccaacggggcgaacatagccttaggctgcgatgggagccagtcccacgagcccaaggattcttgctccactggcagcccgagggtggacaggagcagtcacgagttctggggcccgagctgagcagctaccatctcgatggcttggagccagccactcagtaccgagtgagactttccgtgctgggcccggcgggcgaagggccttctgctgaggtgacagctcggactgaatctccgcgcgtgcccagcatcgaattgcgggtggtggacaccagcatcgattccgtgacactggcgtggaccccagtctccagagcctctagttatatcctgtcttggaggccgctgagaggacctggacaggaagtccctggatcaccacagaccctgccaggaatctcttcttcccagagagtcacaggcctggagcccggagtgtcctacatcttcagcctgactccagtgctcgacggcgtcagagggcccgaagcctcagtcacgcagacaccagtatgccctaggggcctcgccgacgtggtgttcctgccccatgcaacccaggataatgctcacagggcggaagctactcgaagggtactggaacgcctcgtgctcgctctggggccacttggccctcaggctgtgcaggtggggctgctttcttattcacacaggcctagccctctcttccccttgaacgggagccacgacttgggcatcatactgcagagaattagagatatgccttatatggaccctagtggcaataaccttggcacagcggtagtcaccgcacatcggtacatgctggcccccgacgcaccaggccggcgccagcacgtcccgggagtcatggtgctgctggttgatgaacccctccgaggagatattttttctcccattcgcgaggcccaggcctccggcctcaacgtcgttatgctgggcatggccggtgctgatcccgagcagttgagaaggctggccccgggcatggatagcgttcagaccttctttgccgtggatgacggtccctcactggaccaggcggtgagcggcctcgccacagccctgtgtcaggcctcctttactacgcagcctaggcctgaaccctgtcccgtttattgtccaaagggccagaagggcgagcccggagaaatgggccttcgaggacaggtagggcctcctggcgaccctggacttcctggaagaacaggtgcgccaggaccacagggccctcccggaagcgcgactgctaagggcgaacggggatttcctggggcagatgggaggcccggaagccctggacgcgctggaaatccagggacccccggcgcgccaggcctgaagggcagccctggccttcctgggccccgcggggaccccggcgagcgggggccaaggggccctaagggagagcctggcgctcctggccaggttatcggtggcgaagggccaggcctgccaggaagaaaaggggaccccggtccttccggaccaccgggcccacggggccctctgggcgatcctggccctaggggtccgcccggattgcccgggaccgctatgaagggggacaaaggcgaccggggcgagagagggccccctggaccaggagagggcggtatcgcgcctggcgaaccgggactccctggactcccaggtagtccgggccctcagggtcccgttggacctccgggcaagaaaggcgagaagggcgatagtgaagacggagcccccgggctcccagggcagcccgggtctccaggggaacaggggccccggggcccgcccggtgccatcggaccaaagggagaccggggattcccaggccctttgggtgaagcgggcgaaaagggtgagcgggggccccccggtcccgccggctccagaggactgccaggagtggcggggagaccaggagccaagggtccagagggaccaccgggaccaaccggcagacaaggcgagaagggcgaacctgggcgcccgggtgacccagcagtcgttgggccagccgtcgccggcccaaagggggagaaaggcgacgtgggaccagcgggcccccggggagcaacaggcgttcagggcgagcggggaccacctggtctggtcctgcctggagatcccgggccaaagggtgacccaggcgacagagggcctattgggctgactgggcgggccggacctcctggcgattccggtccgccgggagagaaaggagatccagggaggcccggcccgcctggacctgtgggtcccagaggccgggacggcgaagtcggcgagaaaggggatgagggacctccaggagaccccggacttcctgggaaagcaggtgagcgcgggttgcgcggagctcctggcgtcaggggccctgtcggtgagaaaggggatcagggggatccaggggaggacggtaggaatggctctccagggagttccggaccgaaaggcgatagaggcgagcccggtcccccaggccctccaggccggctggtggataccggtccgggagcacgcgagaagggagagcccggtgatcgcggtcaggaggggcctagagggccaaaaggcgaccctggactgcctggcgcacccggagaaagaggtattgagggtttcagggggcctccaggaccccagggagaccccggtgtccgggggccagctggcgaaaagggcgaccggggaccgcccggcctggacggacggtccgggctcgatggtaagccaggggctgccggcccctctgggccgaatggcgccgcgggtaaggcaggagacccgggccgcgacggactgcccggtttgcggggggagcagggcctcccggggcctagtggcccccctggcctccctggcaaaccaggcgaagatggcaaacccgggctgaatggaaaaaatggcgaaccaggagatcccggggaagatggccgaaagggagagaaaggcgattctggagcctccggccgagaggggcgagatgggcccaaaggtgaacggggtgcccccggcattctgggaccccagggaccacctgggctgccaggaccagtgggaccgccaggccagggcttccccggcgtgccaggtggaaccgggcccaaaggagacagaggagagactggatctaagggggagcagggcctgcctggtgagaggggcctgaggggcgagcctggttccgtgccaaatgtggaccggctgctggaaactgctggcattaaggcgagtgcccttcgcgagatcgtggaaacctgggacgaatcctctgggtcattcctgcctgtgccggaacggcgcagaggaccaaagggcgactctggcgaacagggtcccccaggtaaggaaggccccatcggtttcccgggagagcgaggcctgaagggcgaccggggcgatccaggcccgcaggggccgcccggtctcgcactcggagaacgaggccctccaggaccaagcgggctggccggggagcctgggaagcctgggattccaggactgcctggaagagctggaggagtcggcgaagcggggcgacctggagagcgaggcgagcgcggtgaaaagggggaacgaggcgagcagggacgagacgggcccccaggcctgcccggaacacctggacctccgggcccccccggccccaaggtcagtgtcgacgagcccggcccgggattgagcggggagcaggggccaccagggctgaaaggggcaaagggagagccaggctcaaacggggatcaaggcccaaagggggacaggggtgtacctgggatcaagggggacaggggcgaacccgggcctagaggccaagacggcaatccagggctgcctggggagagagggatggctggtcctgagggtaagccagggctccagggacctcggggtcctcccgggcctgttggaggtcacggagatccaggacctccgggggccccagggttggccggccctgcagggccacagggaccgagtgggctgaagggggagccaggcgagacagggcccccaggcaggggtctgactgggcccacaggagccgttggtctgcctggcccccccggaccatcagggttggtaggaccgcaaggatcccctggcttgcccggacaggttggcgagactggcaagcctggggccccgggacgggatggcgcctccggcaaagacggggatcgcggcagcccaggggtgccgggaagtccaggtctgcctgggcccgtgggcccaaagggagaaccgggacccaccggagcccctggtcaggccgtggtagggcttcctggggcaaaaggcgaaaagggggccccaggtggcttggcaggcgatctggtgggggagcccggtgctaagggcgacaggggattgcccgggccccgaggggagaagggggaggccggccgagcaggagagcctggcgatccgggggaggatggacagaagggagctcccgggcctaaaggattcaaaggagacccaggagtgggtgtgccaggaagtcctggcccccccgggccccccggcgtaaagggggaccttggactgcccgggctccctggggccccaggcgtagtagggttccccggtcaaacaggtcccaggggggagatggggcagcctgggccctccggagaaagaggcctggccggcccacctggcagggaaggcatacccgggcccctggggccaccagggccgccagggtccgttggcccgccaggcgcaagtgggctgaagggcgataagggagacccgggcgtcggcctgccagggcctagaggggaaaggggggagccgggaatcaggggggaagatggccggccgggccaagaagggccgaggggtcttactgggcccccagggtctcgcggagagcgcggggagaagggggacgttgggagcgcaggcttgaaaggggacaaaggggactcagcggtgatcctgggtcccccaggtccccgaggagccaaaggagatatgggcgaacgggggcccagggggctggacggtgacaagggcccccggggggataatggcgacccaggagacaaaggttccaaaggcgaacccggggataagggttccgccgggctcccgggcttgaggggcctgctcggaccgcaaggccagccgggcgctgcaggcattcccggcgacccgggatcaccggggaaggacggagtcccggggataaggggtgagaaaggagatgtcgggtttatgggacctcggggattgaaaggtgaaagaggcgtgaagggagcttgtggtctggacggggaaaaaggcgataaaggcgaggccggaccacccggccggcccgggctggcaggacacaaaggcgaaatgggggagcccggtgttcctggccaatctggcgctcctggaaaggagggactgattgggcctaaaggtgatcgcgggtttgacggtcagcctggcccaaaaggggatcagggtgaaaaaggcgagagggggacccccggcatcggtgggttccctggccccagtgggaacgacgggagcgctggcccccccggcccgcccggaagcgtgggccctagaggtccagaggggctgcagggacagaagggtgagagaggtcctccgggggagagggtggtgggagccccaggggtgccaggagccccaggcgaaaggggggagcaaggcagaccaggtcccgctggacccagaggggagaagggtgaagcggccttgacagaggacgacatacgggggttcgtccggcaagaaatgtcacaacattgtgcctgccaaggacagttcattgcctcaggctctcggccactgccgagctacgccgctgatacagccggttctcagctgcacgcagttcctgtcctgcgcgtcagtcatgcggaggaagaggagcgggttccaccagaagacgacgaatactccgagtattctgagtactcagtagaagaataccaggacccggaagctccttgggatagcgatgatccttgttccctgcccttggacgaggggagctgcaccgcctatactttgagatggtatcaccgagcagttacaggctctacggaggcatgtcaccccttcgtgtacgggggatgcggcggtaatgccaacagatttgggaccagggaagcttgcgagcggcgatgccctccacgagtcgttcagtcccaggggacaggcaccgcacaagac

SEQ ID NO: 9609 - DNA, 8832 bp, synthetic construct
  misc_feature 1..8832: note = source = /note="Description of Artificial Sequence: Synthetic coding sequence"
  source 1..8832: mol_type = other DNA
atgactttgcgcctccttgtcgcggcactttgtgcgggaatcttggccgaggcccctagagtcagggcccagcatagggagcgtgttacttgcacgcgcctttatgcagcggatattgtcttcttgttggatggtagttccagcatcggccgatcaaacttcagggaggttcgttccttccttgaaggccttgtcctacccttctcgggagcagcgtctgcacaaggtgtgcgcttcgctaccgtccaatattccgatgatcctagaaccgagttcggtcttgatgctctggggtccgggggcgacgtcatccgtgctatccgagagttgtcctacaagggaggcaatacaagaacaggcgcagcgattctacacgttgcagatcatgttttccttccccaactggcgcgtcctggagtcccgaaggtctgcatcctgatcacagacggaaagagtcaggacctcgtagatacggcggcccagcgcctgaaaggacaaggagttaaactattcgctgtgggtattaaaaacgctgatccggaggaattaaagagggttgcttcgcagccgacatcggatttcttcttttttgttaatgacttttcgatcctacgaacgttgttgcctttggtctcgcgccgtgtctgcactacagctgggggagtccccgtcacccggccgcctgatgattctacgagtgccccgagagatcttgttctttcggaaccgtcatcgcaatcccttagggtccaatggacagcagctagcggaccggtcactgggtacaaggtccaatacaccccacttacggggttaggtcagcccttaccatcggagaggcaggaggtgaatgtccccgctggcgaaaccagtgtgcgtttgcggggactacgaccgcttaccgaataccaggtcaccgttattgcgctgtacgcgaactcaattggcgaggcagttagcggcacagcaagaacaaccgctctagaaggacccgagttgactattcaaaacacgacagcacattccctactagtagcatggcggtctgtacctggtgccactgggtaccgggttacctggcgcgtgctctccggcggtcccactcagcagcaggagctgggcccgggtcagggcagcgtcctcttaagggatttggagccaggaacggactacgaagtcacggtatcgacattgtttggtcggtctgtaggcccagcaaccagcctcatggctcggactgacgcgagtgttgagcagactcttaggccggttattcttgggccgacatcaatcttgctgtcgtggaatctggtaccagaggccaggggctaccgcctagagtggcggcgagagactgggcttgaaccccctcagaaggtcgtcctcccttcggatgtgacgcgctatcaacttgacggtctacaaccggggacagagtacaggctcaccttgtataccctgctcgaaggccatgaggtggcaacgcccgccaccgtggtgcctaccggccccgaattgcctgtgagccctgtgaccgacttacaggccacggaattgccgggtcagcgcgtccgcgtcagctggagccccgttccaggggcaacgcagtatcgtataattgtgcgctccacccagggtgttgagcggaccctcgtcctgccaggctctcagacggcatttgatctcgatgatgtacaagcagggctgtcctatacggtgagggtctctgcgcgggttggtccacgcgaaggatccgctagtgtattgacagtccgccgggagccagaaacaccacttgccgtaccaggccttcgcgtcgttgtttctgacgctaccagagtccgtgtcgcttggggacctgttcccggtgcgtctggatttcgaatatcctggtccaccggctccggtcctgaatcttcgcagaccttgccacctgattctacggccacggatataacaggtttgcagccagggaccacttatcaggtcgccgtctcggtccttcgcggccgtgaagagggccctgcggcggttatcgtcgcgcgtactgatcccctaggtccagtccgaaccgttcacgttacccaagcgagctcatcctctgtgacaattacctggaccagggtcccaggcgcaacggggtatcgagtatcgtggcactctgcccatggcccagagaagagccagttggtttcaggagaggccaccgtcgccgagctggatggattggaaccagacacagaatacaccgtgcacgtccgcgctcatgtcgccggcgtagacgggccaccggcttccgtcgttgtgcgcacggcgccagagccagttggtcgtgtctctcgtctccaaatcctaaacgcttcaagtgacgttctccgcattacatgggtcggtgttaccggagcgaccgcctatcgtttggcgtgggggcgatctgagggtgggccaatgcgacaccaaattctaccaggaaacactgattctgcggagatccgaggtttggaagggggagtcagttatagcgttcgtgtgacggccttggtgggcgatcgcgagggaacaccagtgtcgatcgtggtcaccactccccccgaggctccaccggctttgggcacccttcatgtcgttcagcgtggtgagcactctcttaggcttcgatgggaaccagtacctcgagcccaagggttcctcttacattggcagccagaaggcggccaagagcaatcgcgcgtacttggccccgaactttcgtcataccaccttgatggtttggagcctgcaacccagtacagagtcaggctcagcgttctcggaccggcgggcgagggcccgagcgcggaagttactgctcgcaccgagtctcctcgcgttccatccatcgagttgcgtgttgtggacacttcgattgactcggttacgctggcctggacccctgtttctcgtgcgagtagttatattctctcatggcggccacttcggggcccagggcaggaagtgccaggttcaccgcaaacgcttcccggaattagttcatcacaacgagttacaggtttggaaccgggggtcagttatattttctcactcacaccagtccttgatggcgtgcgaggccctgaagcttcggtaacacagacacccgtctgcccaaggggcttagcggatgtcgtcttcctacctcacgcgacccaggataacgctcatcgtgctgaggcaactcggcgtgtgctggagagactggtgctggcgctcggaccgctaggcccgcaagctgtgcaggtcggtttactgtcctacagccataggccttccccactctttcctctgaacggatctcatgatctaggtatcattttgcaacgcattcgtgacatgccatacatggacccctccggtaacaatcttgggacagctgtagtaacggcacatcggtacatgttggctccagatgctccagggcgccgccaacatgttcccggggtgatggtgctgctcgtcgacgagccgctccgaggtgatatctttagtcctattcgcgaagcccaggcctctggcctcaacgttgtgatgctgggaatggccggcgcggacccagagcaactacgcaggcttgcacctggcatggattccgttcagaccttctttgctgttgatgatggtccatccctcgaccaagccgttagcgggctggccaccgctctctgccaagcgtcatttaccacacaacctagacccgagccttgtcctgtgtactgcccgaaaggtcaaaagggcgagccaggtgagatgggcctaagaggccaagttggcccacccggagaccccgggctgccaggaagaaccggagctcccggtcctcagggtccaccaggctccgctacagccaaaggtgagagagggttccctggtgcagacgggcgccctgggtccccaggtagggctggcaatcctggaacgcccggagcccctgggcttaaaggttcccctggtctcccgggtcctcgtggcgatcctggtgagcggggccctcgcggtccaaagggtgaacccggtgctcctggacaagtcatcggaggcgaaggtcccggcctaccaggtagaaagggagatcctgggccgtcaggtcctccgggccctaggggcccgctcggggacccgggacctcgtggacctcccgggcttccaggaaccgctatgaagggggacaagggggaccgtggggagcggggtcctccgggtccgggcgaggggggcatcgcgcccggtgagccaggacttccaggactgccgggttcccctggccctcagggacccgtcggcccccctggaaagaaaggagaaaaaggtgattctgaggacggtgcccccggattgcccggacaacccggatcgcccggtgagcaaggtccgcgcggaccgcctggggccatcggcccaaaaggagaccgaggttttcctggaccccttggagaagcaggcgagaagggcgagcgcggtcccccggggcctgcggggtcacgtgggctccctggggtggcagggaggcccggtgcgaagggtcctgaggggccacccggcccaactgggcgtcagggtgagaagggcgaaccgggccggccaggtgatccagccgttgttggccctgcagtcgcagggcctaagggcgagaagggtgacgtcggacctgcaggtccacgaggcgcaactggtgtccaaggtgaacgaggaccacctggattggttttgccgggtgatcctgggcctaaaggtgaccctggggataggggtcctatcggcctaactggtcgcgcggggcccccgggtgattctggtccaccaggtgaaaaaggcgacccgggccgtccgggccctccggggcctgtaggtccccgaggtcgcgatggggaggtaggtgagaaaggagatgagggaccacccggagacccaggactgcctggaaaagcaggcgaaagaggcttacgcggggctccaggcgtgcggggacctgtcggcgaaaaaggcgaccagggtgaccctggcgaagacgggagaaatggttcgccaggatccagtggcccgaaaggcgatcgcggcgagccaggtcctccgggcccacctggccgtctggtcgacactgggcccggtgcccgggaaaagggagaacctggggaccggggacaagaagggccaaggggacctaaaggtgacccggggcttcccggggcgccaggcgagagaggcattgagggtttcagagggccccctggtccacagggtgacccaggagtacgcggcccagctggtgaaaagggtgacagggggcctccggggctggacggccgatccggtcttgatggtaagccaggagcggccgggccgtcgggccccaacggtgctgccgggaaggctggcgaccctggacgggacgggctccctggactacgcggagagcagggtttgccggggccctccggccccccaggactccctggcaagccgggcgaggacggaaagccgggtctcaacggcaagaacggtgagcctggagatccgggtgaggacggccgaaagggcgagaaaggggactcgggagcatcagggcgggaagggagagacggccccaaaggtgagcggggagcgcctggcattttgggcccgcagggacctccgggccttcctggccctgtcggtcccccaggtcaaggtttcccaggtgttcccggaggtacaggcccaaagggcgatcgtggagagaccggatcaaaaggcgaacaaggattgcccggagaacgtggtcttcgaggtgagcctggatcggttcctaacgtggatcgcctcttggagacggccgggatcaaggctagtgccctgagagaaatcgttgagacgtgggatgagtcctctggttctttcttgcctgtgcccgagaggcgtcgcggtcctaagggagattcgggtgagcaaggacctccagggaaagagggtccaataggtttcccaggggagcgcggactgaagggagatcgtggagaccctggccctcagggtccacctggattggctttgggagagcgtggcccccctggcccttccggcttggctggcgagcctgggaagcccggtatcccgggacttccaggtagagcgggcggtgttggagaggctggtagacccggagagcgaggtgaacggggggaaaagggtgaacgaggagagcagggtcgagacgggccgcccggtctacctggcacgcctgggcctcctggcccccctgggcccaaggtctctgttgacgaacctggaccaggcctgtctggcgagcaggggccccccggcctcaagggtgcgaagggtgaaccaggcagcaacggagatcaaggacccaagggtgacaggggcgtgcccggcattaagggtgacaggggtgagcccggcccacgagggcaggatggcaacccaggcctccctggggagcgtggtatggccggtccagagggcaagcccgggttgcaaggaccgcgagggcctcccgggcccgtcggcggtcatggggaccctggcccaccaggcgcaccaggtcttgcaggcccagccggaccacaaggaccgtccgggttgaagggagagccaggtgagaccggtcctccggggaggggattgaccggtccaacaggcgccgtcggcttgccgggtcctcccggcccctcgggcctagtgggccctcaaggttcaccaggactgcctggtcaagtcggagaaaccggtaagcctggtgcgccgggccgggatggagccagcggaaaggacggggacagaggaagccccggcgtccccggaagcccgggcctgcctggtcctgtaggcccaaagggcgagccaggcccaacgggtgctccgggccaggcggtggtgggtcttcccggcgctaagggggaaaagggcgcgcccggtggcctagctggtgacctggtcggggaacccggggccaagggtgatcgtggtctccctggcccccgcggtgagaagggagaggcaggccgagcaggtgagccaggtgaccccggcgaggatggccaaaagggcgcgcccggtccgaaggggtttaaaggtgacccaggggttggtgtaccgggttcccctggccccccagggccccccggcgtgaagggcgatcttggcctaccaggcttgcccggagcccccggagtggtggggtttcccggccagaccgggcctaggggggagatgggccagcctggcccatcgggagagagaggattagctggcccgcccggtcgtgaggggatacccggaccattggggccacctggacccccaggctccgtcggtccccctggagccagtggtcttaagggagataagggtgaccctggagtaggtctcccaggcccccgtggggaacgtggcgaacccggaatacgaggtgaggacggccgcccaggacaggagggccctcgtgggcttacaggtccacctggatcccgaggcgagcggggcgaaaagggggatgttggtagtgcgggactgaagggcgacaagggtgattcagcggtcatcctaggaccgccaggaccgcgtggtgcaaagggcgacatgggagaacgaggtccgcgaggcctagatggggacaagggaccgcgcggagacaatggcgatccgggagacaagggtagtaaaggggaaccaggcgataaaggatctgctggactcccgggtctacgcggactcctggggccccaaggccaaccaggagccgccggaatccccggagacccgggtagccccgggaaggacggtgtcccgggtatcagaggggaaaagggtgatgtaggattcatgggcccccgcgggctaaaaggcgagcgaggagtaaagggtgcgtgtgggcttgatggcgaaaagggcgacaagggtgaggcagggccacccggccgtccgggccttgcagggcataagggtgaaatgggggaacccggtgtacccggccagagcggtgcacccgggaaggagggacttatcggaccaaaaggagatcggggcttcgatgggcagccaggtccgaagggtgaccaaggggagaagggagaacgtggtacaccaggtattggcggcttcccagggccttcagggaatgatggtagcgcgggacctcctgggccgcctggctccgttggcccccgagggcctgagggtctgcagggtcagaaaggcgaacgggggccccccggtgaaagggtggttggtgcccctggcgttcccggtgcacccggtgaacgaggcgagcaaggaagaccgggccctgcaggcccacggggtgagaagggagaagcagctcttaccgaggatgacattcgcggttttgtccgacaggagatgagtcaacattgtgcgtgtcaaggccagttcatcgcgagcggctctcggccccttccctcatatgccgcggatactgcaggatctcagctgcatgctgtgccagtgctccgcgtctcacatgcggaggaggaggagcgtgtccccccggaggacgatgaatatagcgagtactccgaatactcagttgaagagtatcaagaccccgaggcgccctgggattcggacgatccctgttctctaccgcttgacgaggggtcctgcacggcgtacacgctccgatggtaccatcgggccgttacaggtagtacagaggcttgccatcccttcgtttatggtgggtgcggagggaacgctaaccgctttgggacgagagaggcttgcgaaagacgctgtcctcctcgcgttgtgcaatcgcagggcactggaaccgcccaggac

SEQ ID NO: 9610 - DNA, 8832 bp, synthetic construct
  misc_feature 1..8832: note = source = /note="Description of Artificial Sequence: Synthetic coding sequence"
  source 1..8832: mol_type = other DNA
atgaccctgcgcctcctggttgccgcactctgtgccggtatcctggctgaggcccccagagtgcgagctcagcaccgagaacgggtgacctgcacccgcctttatgctgccgatattgtctttctcctcgatggctcttcaagcattgggcgatctaattttcgggaggtgaggagtttcctggaagggctcgtgctgccgttttctggcgcggccagcgcccaaggggtgaggttcgccaccgtgcagtacagtgatgatccaagaaccgagttcgggctggatgccctgggtagtgggggcgatgttatccgagcaattagggaactgtcttataaaggtggtaacactcgcacaggggccgctatactgcacgtcgccgaccatgttttcctcccacagctagcgcggccaggagttcccaaagtctgcatcttgataacggatggcaaatctcaggacctggtggacaccgccgctcagaggctgaagggtcagggggtaaagttgtttgccgtgggaatcaagaatgccgaccccgaggagcttaagcgcgtggcgagtcagcccacatcagacttcttcttctttgttaacgacttctctattctgcggactctgctgccacttgtctctcgccgggtgtgtaccacagcgggcggagtccctgtcactcgaccgcccgatgactcaacctcggcccccagggatttagttctgtctgaacccagctctcagtccctgagggtgcaatggaccgccgcatctggtccagtcaccggctacaaggtgcaatacaccccgttgaccggcttgggacaaccgctacccagtgaacggcaagaggtgaacgtgcctgctggagagacatccgttaggttacgcgggctgagaccattgaccgagtatcaggtgaccgtgatcgctctgtacgccaactccatcggcgaagcagtgtctggcacggcaagaactaccgcgttggaagggccagagctcacgattcagaacacaacggctcactccctacttgtggcctggcgatcggttccaggcgccaccggctaccgagtaacatggagggtgctctccggaggacctactcagcaacaggagctcggcccaggccaggggtccgtcctactgagggacttggaaccgggcactgattatgaagtgactgtctctacgctgttcggtagatcggtgggccctgccacttccctcatggcccggacagacgcatccgtcgagcagactctaaggccagtaatcctcgggcctacatcaatactgctgtcatggaatctggtgcctgaagccagaggctataggctcgaatggagacgcgagaccgggctagaaccacctcaaaaggtggttttgccatccgatgtgactcgctatcaattggatggcttgcagccaggaacagaataccggctgaccctgtacaccctccttgagggccacgaggtagctacccccgccacggtggtccctacgggcccagagctgccggtctctcctgttactgacctgcaggcaacagagctcccaggtcaaagagtcagggtgagctggagccctgtacccggcgccacgcaatatcgaatcatcgtccggtccacacagggcgtggaacgcaccctcgtgctgccaggtagtcagaccgctttcgatctggatgatgtgcaggctggcctgtcctatacggtgagagtttcggcaagggtgggaccgcgggaggggtctgcaagtgtcctaactgtgcgtagagaaccggagactccactagcggtgcccggtcttcgcgtggtagtatccgacgccacccgagtgagggtggcgtggggtcccgtgccaggcgcgagtggatttcggatctcttggtccacaggaagtggccctgagtcttctcagactcttccccccgactctacagcaactgatataactgggctgcagccaggtacaacataccaggtggccgtcagtgtgctccgcggtagggaagagggacctgctgccgtcatcgtcgcccggactgaccccctgggtcctgtaaggaccgtgcacgtaacccaggccagctcttcatccgtcaccatcacgtggacgagggttcctggtgcaaccggctatcgggtgtcatggcatagtgcccatgggccggaaaagtcacagctggttagcggtgaggccacagtcgcagagcttgacggactggaacccgacacagagtacactgtgcacgtgagagcccacgtcgccggagtggatggaccccctgcctcggtggtagtgcgcacagcccccgagccggttgggcgcgtgagcagacttcagattctcaatgcctcatcagacgtgctgcggataacctgggtcggggtgacaggagcaacagcatataggctggcctggggcaggtctgaagggggtcccatgcgccatcagatcctgcctggaaataccgactccgctgagataaggggcctcgagggtggggtcagctactctgtgcgagtcaccgccttggtgggcgacagagagggcacaccggtttccattgtggtgacaacacctcctgaggcacctccagccctaggtactttgcacgtggtgcagaggggtgaacattccctgagacttagatgggaaccagtgccaagggcgcagggcttcctcttacactggcagcccgaaggcgggcaggagcaatcgagagttctagggcctgaactttctagctaccatctcgatgggttagagccggcaactcagtatcgcgttaggctttcagtgctgggtcctgccggggaaggcccctcagctgaggttaccgctcggaccgagtctccccgagtccctagcatcgagctccgggtagtcgatacgtccatcgattctgtcacgcttgcttggacaccggtttccagggcctcgagttatattctgtcatggcggcccctgcggggacctggccaggaagtgcctgggtccccccagaccttaccagggatcagctcttcgcagcgggtgaccggattggaacccggagtcagttacatctttagcttgacacccgtgctggacggtgtgcgaggtccagaagcctctgtcacacagacaccagtctgcccccgtgggctcgcggacgtagttttcctacctcatgctacccaggacaacgcccatagggcggaagccacccgcagagtcctggaaaggctcgtactcgcgcttggccccctcgggccgcaggctgttcaagtcggtctgctgtcgtacagccatcgaccttcccctctgttccctctgaacgggtcccatgacctaggaatcatcctgcagaggattcgggacatgccctacatggatccttctggtaataatctgggcacagctgtagttacagcacataggtacatgctggctcccgatgccccaggccgccggcagcacgtgccgggcgttatggtgttgctggtggatgagcccctgcgtggagacatctttagcccgatccgggaggcacaggccagtggccttaacgtggtgatgttaggtatggctggtgccgatccggagcaactgagacgccttgcaccaggaatggatagcgtgcaaacatttttcgctgtagatgatggccctagcttggaccaggcggtgtctggtctggcaacagccctttgtcaggcctcttttacaacgcaacctcgccctgagccctgccctgtgtattgcccgaaagggcagaagggcgagcctggagaaatgggcctgcgaggccaagtgggcccaccaggagaccctgggctgcccggcagaacaggagctcccggcccacaggggcctcccggtagtgcaactgcaaagggagagcgggggttcccgggcgccgatggtcgaccaggatctcccgggcgggcaggaaaccctggcacccccggcgcccccggccttaaaggatcccccggtctacctggtcctagaggggatccgggagagagagggcccaggggaccaaagggagagccaggcgctccgggccaggtcatcgggggcgagggcccaggactcccaggccggaaaggcgatccaggcccgtctgggcctcccgggccgcgtggccctctgggcgaccccggacctcgagggccccccggacttcctggaactgccatgaagggcgacaaaggcgacaggggagagcggggccctccagggccaggagagggaggaattgcacctggggagcctggcctgccaggactgcccgggtcacccggccctcagggtccagtaggaccaccaggcaagaagggagagaaaggagattctgaggatggggcccctggacttcctggacagcccggtagtccaggagaacaaggcccacgcggtccacctggcgcgatcggtccaaagggggatagaggttttcctggccccctcggagaagccggggaaaaaggcgagagagggcctcccgggcccgcgggctccagaggactgcctggcgtggctggacggcctggcgcgaaagggccagagggacccccaggccctaccgggcgacagggggaaaaaggggagcctggacgccctggtgaccccgccgtagtgggccctgcagtagccggtcctaaaggcgagaaaggcgacgtgggacctgccggcccaaggggagccaccggagtgcagggagaacgcggcccgccaggtttggtgctccctggagatcctgggccaaagggggatcccggcgataggggccccatcggactgacgggccgcgctggtcctccaggcgattcgggaccgcccggggaaaaaggtgaccctggtaggccaggcccacccggcccggtagggccgaggggccgcgatggagaggtaggggagaaaggagatgaaggaccacctggagacccaggactgccagggaaggccggggagcgaggccttaggggggctcccggggttcgggggcccgtcggggagaagggcgatcagggcgatccgggcgaggatggaaggaacgggagccccggttcttccgggccaaaaggtgacagaggcgagcctggccccccgggacctccaggtcggcttgtcgatacgggaccgggcgcccgtgagaagggtgaacctggcgatcggggtcaggaaggcccgagaggccccaagggggatcctgggctgccgggagctccgggagagcggggaatcgaaggtttccgcggcccgcctgggccacagggggaccccggggtgcggggccccgctggagagaaaggagacagaggcccacccggcctcgatggacggtcagggctggacggcaagcctggggctgcagggcctagcggtcccaacggggcagccggaaaggctggagatcccgggcgggatgggctgccaggcctgcggggggaacaggggctaccaggacccagcggccccccaggcctgccaggcaagccgggggaagatggaaaacccggcctaaacggcaaaaacggagagcccggcgatccgggagaggatggccgcaaaggtgagaagggcgattctggggcatcaggcagagaggggagagacggacctaaaggagagaggggggcccccgggatcctgggtcctcaaggtcccccagggctccctgggcctgtaggcccaccaggacagggcttccctggggtgccaggcgggactgggccgaagggtgataggggtgagaccgggtctaagggggaacaagggctgccaggagagagaggcttgagaggagagcctggctctgtgcccaacgtggacagactcctggagaccgcaggcataaaggcctcggcactccgggaaatcgtcgaaacctgggacgagagttcaggctcatttctgccagtgcccgagagacgccggggtccaaaaggtgatagtggcgaacaggggccacccggcaaggagggtcccattggcttcccaggggagcggggactgaaaggcgaccggggagatcctggcccacagggaccccctggtttggctttgggcgagagggggcctccaggcccgagcgggctggctggggaaccggggaagccgggtatccctgggctaccaggccgggctggaggagtgggggaggctggccggccaggagaacgcggagaacgcggcgagaagggtgagcggggggagcaaggaagggatggaccacctggcctgccaggaacacctggccccccaggacctcctgggcccaaggtgtctgtggacgagccaggacctgggctgtctggcgaacagggcccccctggcctgaagggagccaaaggcgagcctggatctaacggggatcagggccccaaaggcgacaggggcgtgccagggatcaagggggacagaggagagcccggtcctcggggtcaggacggaaatccagggttacccggcgaacgtgggatggccggacctgagggcaagcccggtcttcaggggccacgtggaccaccgggacctgttggcggccacggagaccccggtcccccaggtgctccaggcttggccggccccgctggtccccaagggccctccggactgaaaggcgagcctggcgagacgggaccaccaggccgcggcctgacaggcccgaccggcgcagtgggattgcctggtcctcctggcccctcgggcttggttggaccccagggcagtcccggtctcccaggccaggtgggcgagaccgggaagcccggtgcccctggtcgcgacggagcctcgggaaaggatggggacagagggtcaccgggcgtcccggggtcacctgggctcccaggcccagtaggccccaagggcgagccaggcccaaccggcgcccccggccaggcggtcgttggactgcctggggccaagggagaaaagggtgcccccggaggactggcgggcgacctggttggggaacccggagctaagggtgaccggggcctgccagggcccagaggagaaaaaggggaagcggggcgagccggagagcctggggatccgggggaagacggccagaaaggtgcaccagggccaaaggggtttaaaggcgatcctggagttggagtacccggcagccccggcccacccggaccacctggtgtcaaaggcgatctgggactgcccgggctgcccggtgcccctggcgtcgttggatttccggggcagactggcccgcgaggagagatgggtcagcctggcccttccggggaacgtggccttgccggacccccagggcgcgagggcataccagggcccctgggcccccctggacccccgggatcggtggggccacctggcgctagtggcttaaagggggacaaaggggaccctggagtgggtctgcctggtcccagaggggaacgaggcgagccaggaatccggggagaggacggccggcccgggcaggagggcccccgagggctcactggccctccaggatcaagaggagagcggggggagaaaggagatgtcggctcagccggacttaaaggtgataagggcgatagcgccgtgatcctgggacccccaggccccaggggcgctaaaggcgacatgggagagcgggggcctcgcgggttagatggggataagggcccacggggcgacaatggcgatcctggagataagggctcgaaaggagagccaggagataaaggtagcgcaggccttcctggcctcaggggcctgctggggccacagggccagccgggggctgcgggcatccctggcgacccagggtccccagggaaagacggagtacccggaatcaggggagagaaaggcgatgtcgggtttatggggccaagaggcctgaagggcgaaagaggagtgaagggtgcatgcggcctggacggagagaaaggtgataaaggcgaagctggaccacccggcagacccggcctggcagggcataaaggcgagatgggagaaccaggtgttcctgggcaaagtggggcacccggtaaggaggggttgatagggcccaagggggaccggggttttgacggccaaccgggaccgaagggcgatcaaggagagaagggagagagggggactccagggataggcggattcccaggaccttctggcaacgatgggtctgccgggccccccggaccaccggggtctgtcgggccaagaggaccagaggggctgcaggggcaaaagggcgagaggggtccccccggagagagggtggtaggcgccccaggcgtcccgggagctcccggggaaagaggagagcaggggagacccggtccagctggcccccggggtgagaagggtgaagccgccctgactgaagacgatattcgaggcttcgttcggcaagaaatgtcccagcactgtgcctgccagggacagtttattgcatctggctcccgcccgctgccaagctacgcagctgatacggctggatctcagctacatgctgtaccagtgttgcgggtgtcacatgcggaggaggaggagagagtgcctcccgaggacgacgaatattctgaatactctgaatattcggtggaagagtaccaggatcccgaggctccctgggactccgatgatccttgcagccttcccctggacgagggatcctgcactgcttatacattgcgatggtaccatcgggccgtgacgggctccaccgaagcctgccaccccttcgtttacggcggatgtggtggtaacgccaatcgatttggtacacgagaagcctgtgagcgtcggtgtcctccccgcgtggttcagtcacaaggcacggggactgctcaggat

SEQ ID NO: 9611 - DNA, 8832 bp, synthetic construct
  misc_feature 1..8832: note = source = /note="Description of Artificial Sequence: Synthetic coding sequence"
  source 1..8832: mol_type = other DNA
atgacccttcggcttttggtcgcagctctctgtgcggggatcctggctgaggcaccacgtgttcgcgcacagcatcgagaaagagtcacgtgcacaagactttatgcagccgacatcgtcttcctgcttgatggctctagcagcatcggtagatcaaacttccgtgaggtcaggagctttctggaggggctcgtcctgccctttagtggtgccgcctctgcccaaggcgtcagattcgctacagtgcaatactccgacgatcctaggactgagtttggtcttgacgctctgggcagcggcggcgacgtgattcgggctattcgggagttgtcatataaaggggggaacaccaggactggtgctgccatcttgcacgttgctgaccacgtcttcctcccgcagttggcacggcccggcgtgcctaaagtgtgcatactgatcaccgacggaaaatcacaagatctcgttgacacagcagctcagcggcttaaaggccagggggtcaagttgtttgcggttggaatcaagaacgccgatcccgaagagctcaaaagggttgctagccagccgacatctgactttttctttttcgtaaacgacttctctatcctaaggactttgctgcccctggtctctcgccgggtgtgcacaaccgcaggaggagtccccgtgacccggccgcctgacgactctaccagcgccccacgggaccttgttctttcagagccttcgtcacagagcctgcgggtgcagtggacagcagcgagcggtcccgtgaccggctacaaggttcagtatacacctctcacagggctgggccaaccactgccctccgaaaggcaggaagtaaatgtccctgccggggaaactagtgtgcgtctgcgcgggctgcgaccccttaccgagtatcaggtcactgtgattgccttatacgcaaactcaataggcgaggcggtgtccgggaccgcccggactacggctcttgaaggaccagaattaacaattcagaacaccacggcccactccttgttggtagcatggcgaagcgtgccaggggctaccggctacagggtgacctggcgagtcctgagcggaggcccaacccagcagcaggagctgggaccagggcaaggcagcgttctgctgagggacctggagcccggcacggactacgaagtgactgtttcaactttgtttgggagaagtgtagggcccgctacttccctcatggcaagaaccgatgcgtcagtcgagcagacactcagaccagtgattctggggcctacttccatcctgctgtcctggaacttagtccccgaagctcggggttaccgtctggaatggaggagagagactgggctcgaacctcctcagaaggtggtattgcccagcgacgtcactaggtaccagttagacggactgcagccaggaaccgagtaccgcttgactctgtatacactgctggaaggccatgaggtggccactccagctaccgtcgtgcctacaggcccagagttgcccgtgtctcccgttactgacctgcaggccacggagttgcctggacaacgggtgcgggtttcctggagccccgtcccaggagccacacagtacagaattattgtgcgaagtacacagggggttgagcggacattggttctgcccggtagccagacggcgttcgacctggacgacgtgcaggctggcttaagctacaccgtaagagttagcgctcgtgtcggcccccgtgaagggagcgcatctgtgctcactgtccggagagagccggagaccccactcgcggtgcctggcctgagagttgtcgtctcagacgccacacgagtaagagtggcctgggggccagtgccaggtgcctccggcttcaggatcagctggtctacaggtagcggacctgagtccagtcagaccctcccccccgattcaacggctactgatatcaccggactgcagcctggtaccacgtatcaggtggccgtgagtgtccttcggggcagagaagagggaccagcggccgtcatcgtcgctcggaccgaccccctcggccctgttcgaacagtgcatgtgactcaggcctcctccagctcggtgactatcacgtggacccgagtacctggggctacgggctaccgagtgtcgtggcactccgcacacggccccgagaaaagccaactcgtcagtggggaagcaaccgtggcagagctggatgggctggagccggacactgagtacactgtgcacgtcagggcacatgtggctggcgtggatggtccccccgcctcagtggtcgtgcggactgcacctgagccggtggggcgggtgagccggttgcaaatactcaatgcatcctcagacgtgttgcgaatcacttgggtgggcgtgaccggcgctactgcttatcggttggcttgggggcgctcggaaggcgggccaatgcgccaccagattctgcctggcaacacagactctgccgagattcgtggcctggaaggcggtgtgtcctattcagtgagagtgacagcactggtgggagatcgggaaggcacccccgtttcgattgtagtgactacccctcccgaggcaccccccgctctaggcaccctccatgttgtgcagcgcggcgagcactctctccggctaaggtgggagcctgtcccaagagctcagggttttctactacactggcagcccgagggcggccaagagcagagccgagtgctaggaccagaactatcttcataccacttggatggcctggagccggccacgcagtaccgggtgcgcctgagcgttttgggacccgccggcgagggccccagcgccgaggtgacagctcggactgaatctcccagagttccaagtatagaactgcgcgtagttgacacttctatagattctgtgacactggcgtggactcctgtcagccgggctagcagctatattctgagttggcggcctttgaggggccctggacaggaagtccctgggtcaccacagactctgcccgggatctcttcatcccagagagtgaccggcctggaaccgggagtctcgtatattttctcactgacccccgtcctagatggagtacgtggcccggaggcttctgtcacccagacacccgtgtgtccgagaggattggccgatgtggtgttcctgcctcacgctacccaggacaacgcccaccgagcagaggcaacccgcagggtgctcgagcggctagtcctggccctaggccctctcggcccgcaggcagttcaagtgggtcttctgtcttatagccatcgaccttctcctctgttcccattaaatggttctcacgatctgggaatcatactacagcgcattcgtgatatgccgtacatggatcccagcggaaataatttaggcacagcggtggtgaccgcacatagatacatgctggcccctgacgctccgggtcgccgccagcacgtcccaggcgtcatggtgcttctcgttgatgaacccttgcggggtgatattttcagccctatccgggaagcccaagccagcgggttgaacgtggtaatgctgggcatggcgggtgcagatcccgaacagctcaggagactcgctccgggcatggattcagttcagacattcttcgccgtcgatgatggcccgagtttggatcaggccgtgtctggcctcgccacagcactgtgtcaggcctcatttactactcaaccccggcctgagccttgcccagtttattgccccaaagggcagaagggggagcctggtgaaatgggactgcgcggccaggtgggtcctccaggcgatccgggtctgccaggaagaaccggggcccctgggccccagggccctccaggaagcgccaccgcaaagggcgaacgcgggttccctggagccgacggacggccgggatcccccgggcgagcgggaaaccctggtacccccggagctcctggtctcaagggatcccctggactacccgggcccagaggagaccccggcgagagaggacctcgaggtcccaagggggagcctggcgccccaggacaggtcatagggggcgagggacctggtctgccaggccgaaaaggcgatcccggaccctcgggtccacccggtcccaggggaccgctgggcgaccctgggccgcgggggcctcccggcttgcccggcaccgctatgaagggtgacaagggagatagaggtgagagggggccaccgggcccaggtgagggcggcattgccccaggcgaaccgggcctgcctgggctgccagggagccccggaccccagggacctgtgggcccaccagggaaaaagggggaaaaaggagacagcgaagacggggcccctggcctgcccggccagcccggatcacctggcgagcaggggcctcgagggccaccaggcgcaatcgggcctaagggggacaggggattccccgggcccctgggagaagctggagaaaagggggagagggggccgcccggccctgccggctctaggggcctgccaggagtggccggacgacccggcgctaaaggtcctgagggaccccctggacccacgggtaggcagggggagaagggagagcccggtcggcctggggatcctgcagtcgtgggcccggccgttgccggaccgaaaggagagaaaggtgacgttggccctgccgggccacgcggagctacaggggtacaaggggaaaggggaccccccggtctcgtcctgcccggcgaccctggacccaaaggggatcctggtgatcgtgggcctatcgggttgactggacgagccggcccaccgggagactctggcccccccggcgagaagggagacccaggacgtccaggccccccaggccccgttgggcctaggggaagggatggagaagtgggggaaaagggcgacgaggggccccctggcgacccgggcctccctggtaaagcaggcgagcggggactgcgcggcgcccccggagtgagagggcccgtcggagaaaagggggatcagggagaccctggagaagatgggcggaacggctcaccaggttcctctgggcctaaaggcgatcgcggggagcctggcccccccggaccaccaggacggctggtagatactggccccggggcacgggaaaagggcgagcctggcgatcggggccaggagggcccccggggccccaagggcgatcctggtttgcctggcgccccaggtgagagagggatcgaggggtttagaggcccccctggacctcagggtgatcctggcgttaggggcccagctggagaaaaaggcgatcggggcccacccggattagatgggaggagtgggttagacgggaagcctggtgccgcaggaccctctggtcctaacggtgcggcgggcaaggcaggggatcctggccgcgatggactccccggtttacggggggaacagggcttaccggggcctagcggacctcctggtttgcctggcaaacctggcgaggatggaaagccggggctgaacggcaagaacggagaacctggcgacccaggtgaagacggaaggaaaggcgaaaaaggcgattccggagcctctggcagagaaggaagggacggccctaagggggagcgaggcgcgccagggatcctgggtccccaaggccctccgggtctcccaggcccagtcggtccccctggtcaagggttcccaggggtccccggcggtactggtcctaagggcgatcggggtgaaaccggatctaaaggagagcaggggcttcccggggaaagggggctgcgcggtgagcctggctctgtgcctaacgttgataggctgctcgagacagccggcatcaaagcctctgccctccgcgaaatcgtggaaacatgggacgagtcaagcggatcattcctgccagtgccagagaggaggcggggtcctaagggggattcaggagaacagggccctccaggcaaggaaggcccaataggattcccgggggaacgcggcctgaaaggcgataggggcgaccccgggccgcagggaccccccggcttagccctcggagagagaggccctcctgggccttctggcctggcgggggaacccggcaagcccgggattcccggtctccccggtagagccggtggggtgggggaggctgggcggccgggagagaggggagaacgaggcgaaaagggggagagaggcgagcaagggagagacggtcctccaggattgccaggcactcctgggccacccggaccgccaggaccaaaagtcagcgtcgatgagcccggaccaggcctgtcaggtgaacagggcccacccggactcaagggcgcaaagggtgaacctggctcaaacggagatcaggggccaaaaggcgacagaggagtgccaggtattaaaggtgaccggggggagcctggacctcgcggtcaggatggtaatccagggctgccaggagagcgtgggatggctggccccgaaggtaagccaggcctgcaaggtcctagaggacctcctggccccgtgggcggccacggcgatccaggaccgcctggtgctcccggactcgccggacctgcaggcccccaggggcccagtggtttgaagggtgaacccggtgaaactgggccaccaggtaggggcttgactggccccacgggcgctgttggattaccaggtcctcctgggcccagtgggctggtgggcccccaggggtctcctggtctcccaggacaagtaggcgagacggggaaacccggggcgccgggcagggacggcgcgtctggcaaggatggcgacaggggatctcccggtgtcccaggcagtccaggactgcccgggccagttggccctaagggtgagcctggcccgaccggtgcacctgggcaggccgtagtcggcctcccaggagcgaagggtgagaagggggccccgggcggtctggccggagatctagtcggtgagcccggagctaaaggcgaccgtggtctccctggccctcgcggtgaaaaaggagaggccggaagggccggggagcccggcgacccaggggaagacggacaaaagggagctcccgggcccaagggtttcaagggcgatccaggagtgggggtcccaggcagtccagggccgcccggccccccgggggtgaaaggcgatcttggtctcccgggcttgcctggggctccaggtgtggtcggttttcccggccagaccgggccacgcggcgaaatgggtcagccagggccttcaggagagcgcggtcttgcaggtcccccagggagagagggtatccccggtccactgggaccaccaggcccacctggaagcgttggaccgcccggtgctagcggacttaaaggagacaaaggtgaccccggtgtcgggctccccgggccgcgtggagaaaggggtgagcctgggattcggggggaagatgggcgtcccggacaggagggcccccgtggcttgacagggccaccagggtctaggggagaacggggtgagaagggtgacgtgggatcagccggcctgaagggagataaaggcgattcggctgtgatattaggaccaccaggcccgaggggagccaaaggggatatgggagaacgtgggcctcgtggcctggacggagataaaggccctcgcggagacaacggcgaccccggcgataaaggctcaaaaggagagcccggtgacaaaggtagcgccggattgcccggcctgcgagggctgctgggaccccagggtcagcccggggcggccggcatccccggtgacccaggtagcccgggcaaagatggagtcccaggcattcgaggggagaaaggggatgtcggcttcatgggcccccggggcctgaagggagagcggggagttaagggggcctgtggactggatggagaaaagggcgataagggcgaagcgggaccgccgggccgccctgggttagctggacataagggtgagatgggggaacctggggtacccggacagtctggcgcacccggcaaggaaggactgatcggcccaaagggagacaggggattcgatggccagccaggccctaagggagatcagggcgagaagggcgaaagggggacccccggcatcggcggctttcctggcccgtcgggcaatgacggctccgcaggaccccctggcccccccggcagtgtgggccccaggggccccgagggccttcagggccagaagggggagcggggaccacccggtgaacgggtggtgggggccccaggagtcccgggcgcccccggagaacggggagagcagggcagacccggacctgccggaccccgcggcgagaaaggagaggctgcactgacagaagatgacatccggggattcgtacggcaggaaatgagccaacactgcgcatgtcagggccagttcatcgccagcggttctcggccattgccctcttatgctgctgataccgccggaagtcagctccacgcagttcccgtgttgcgagtctcgcacgctgaagaagaagagcgggtgcctccagaagacgacgagtatagcgaatattccgagtactctgtggaggagtatcaagatccagaggccccttgggactcagacgatccttgtagcttgccgttagatgagggctcctgcactgcctataccctgcgttggtatcaccgcgctgtcaccggtagtacagaagcttgtcatccattcgtttacggggggtgtggtgggaacgccaataggttcggcacacgagaggcatgcgagcgccgctgcccacctcgggtggtacagtcccaaggtactggcaccgcccaggat

SEQ ID NO: 9612 - DNA, 8832 bp, synthetic construct
  misc_feature 1..8832: note = source = /note="Description of Artificial Sequence: Synthetic coding sequence"
  source 1..8832: mol_type = other DNA
atgaccttgcgtctgctggtggcggccctctgtgcaggcatcctcgcagaagcaccgagggtgcgcgcgcagcatcgggaacgcgtgacctgtactcgactttacgcagcagacattgtgtttcttctcgacggatcatcgtcgataggtcggagcaactttagagaggtgaggagctttcttgagggtctggtgcttcccttttcaggtgcagcaagcgcacaaggcgtgaggttcgcaaccgttcagtactcagacgacccacgtaccgagtttggactggatgccttgggaagcgggggagatgtgataagagcaatacgtgaactttcgtacaaaggtgggaacactcgcactggagccgcaatcctgcatgttgctgaccacgtgtttctccctcagcttgcacgccctggcgtgccaaaagtttgcattctgattactgatggtaagtcacaagatctggtcgatacggcagcgcaaaggttgaagggccagggtgtcaaactttttgctgtcggaattaagaatgcagatcctgaagaactgaaacgagttgcatcccaacctacctcagacttctttttcttcgtgaatgatttctcgattctccgcactttgctgccgctcgtctcgaggcgagtgtgcactactgcaggtggtgtcccggtgactagacctcctgacgattcgacttcggctcccagagatctcgtgctctcagagccgtcatcgcaatcccttcgggtccaatggacggcagccagcggacctgtcactggttacaaagtccagtatactccacttaccggtcttggacaaccgctgccttcagaacgccaggaagtgaacgtgccagctggggagacttccgtccgactgcgcggactcaggccgctgaccgaataccaagtcactgtcattgcactgtacgccaacagcatcggggaagcagtctcaggtaccgcacgtaccacggcacttgaaggtccagaacttactattcagaacactacggcacactccctgttggtcgcctggagatccgtccccggtgcaactggataccgtgtgacctggcgcgtcctcagcggaggccctactcaacagcaagaacttggtcctggccaaggatcggtgctgctgcgcgaccttgagccagggaccgactacgaagtgacggtgtccaccctttttggtcgctccgtgggcccagcaactagcctgatggcacggaccgacgcaagcgtggagcagacccttcggccggtgattctgggaccgacctcaatcctcctttcttggaatctggttcccgaagcgaggggttacagattggagtggcggagggaaaccgggctggagcctccacaaaaggtggtgctcccaagcgatgtgactagataccaacttgatggacttcagcccggcaccgaataccgcctgactctgtataccctcctggaaggccatgaagtggctactccggcaaccgtggtgcccaccggtccagagctgcctgtctcacccgtgaccgatctccaagcaaccgagctgcccggccaaagagtccgcgtcagctggtcgccggtcccaggagctacccaataccggattattgtgagaagcacccagggtgtggaaaggaccctggtgcttcccggcagccagactgccttcgatctggacgacgtgcaagcgggactgtcctacacggtgcgcgtctccgcaagggtggggccgcgggaaggtagcgcatctgtgctgaccgtgagaagagagcccgagactcctcttgcagtgccgggactgagagtggtggtgtcagatgctacccgagtgcgggtggcctggggaccagtcccaggagcgtcgggattccgtatctcctggagcaccggatccggtccagaaagcagccagacccttccacccgatagcacggcaacggatattaccggactccagccaggaacgacctaccaagtggccgtctccgtcctgcggggtagggaagagggacctgcagccgtgatcgtcgcgagaacggatcctcttggacctgtgagaactgtgcatgtcacccaagcgtcgtcctcatcagtgacgattacgtggactagagttccaggagcaacgggttacagagtgagctggcattcggcacatgggcctgaaaagtcccagttggtgtcgggggaagcgactgtcgccgagttggatggacttgaaccggatactgaatatactgtgcatgtgcgcgcacatgtggcaggggtggatggacccccagcgtccgtcgtggtgagaactgcgcctgaaccggtggggcgcgtgtcaagactccagatactcaacgcatcctccgacgtgctccgcatcacctgggtgggtgtgacgggagccaccgcctacagactcgcgtggggacgctcggaggggggacccatgaggcatcaaattcttccgggtaatacggactccgcagaaattcgggggctcgaagggggagtgtcgtattcggtgcgagtcactgcgcttgtgggggatcgggagggtactcccgtctcgattgtggtgacgactccacctgaggcacctccagcactgggaacccttcacgtcgtgcagcgtggtgaacactcactccggttgcgctgggaacctgtcccacgggctcaggggtttcttctgcactggcaacctgaggggggacaagaacaaagccgggtgctgggacctgagctttcgtcttaccatcttgatggtctggaaccagcaacccaataccgggtgagactgtcggtcctgggaccggcaggtgagggaccatccgcggaagtgaccgctcgtaccgaatcgccaagagtcccctctatagaacttagggtcgtggatacttccattgattcggtgactctggcgtggactcctgtgtcccgggcctcgtcatatatcctgtcctggcgacctttgcgggggccgggtcaggaggtccctgggtcgccccagactttgcctggtatttcctctagccaaagagtgactggacttgaacccggagtctcgtatatcttctcgctcactcctgtgctggatggcgtgcgcggtcccgaggcctcggtgacccaaacccccgtgtgccctagaggcctcgcggatgtggtgtttcttccacacgcaacccaggacaacgcacatagggcagaagcaacccggcgggtgctcgaacgcctcgtgctggctctgggaccgctggggccccaggccgtgcaagtcggccttctttcctactcgcatcgccccagccctctctttccgctcaatggaagccacgatctggggatcatcctccaacggatccgcgacatgccatatatggatccgtccggtaacaacctcggaactgcagtcgtgaccgcacatcgatacatgctggcccccgatgccccggggcgaaggcaacacgtgcccggggtgatggtgctcctcgtggatgaacctcttcgaggagacatattcagtcctatccgagaagcacaggcgagcgggttgaacgtcgtcatgctgggcatggccggagcagatcctgaacagctgcggcgactggcacccgggatggactcagtgcaaaccttttttgccgtggatgatggaccctccctggatcaggcagtgagcggccttgcaactgcactgtgccaggcatcgttcactactcaaccaagaccagaaccatgtccagtctactgcccaaaaggacagaagggagagccgggagagatgggtcttagaggacaagtgggtccaccaggggaccccgggctgcctggtaggaccggtgcacctggtccccagggaccgcctggatcggccaccgcaaagggagagcgaggatttcccggtgctgacggacgtcctggttcgcccggacgggcaggtaatccgggtacgccgggtgcccctggcctcaagggttccccaggtttgcctggaccaaggggtgatccaggcgagcgcggacctaggggacccaagggggaacctggggctccaggtcaagttataggaggcgaaggacccgggctgccaggccgcaagggcgatcctggcccatccggtccccctggacctcgcggaccactgggagatcctggtccgcgcggaccaccaggactgccaggcactgcaatgaagggtgataaaggagatcggggtgagcgcggccctcctggtccaggagaaggcgggattgccccaggtgaaccgggccttcctgggctcccaggctcacctggtccacaaggtcctgtcggaccacccggcaagaaaggtgaaaagggagattccgaagatggggcccccggacttcccgggcaaccaggatccccaggagaacagggtcctagaggacctcctggagcgattggccccaagggcgatcgggggtttccaggacctctgggcgaggccggtgagaagggtgaacgtggcccacccggacctgcaggatcgagaggtctgccaggtgtggcagggcgtccaggtgcaaagggccccgaaggacctcccgggccaactggtcggcaaggtgagaagggtgagcccggtcggcccggagatcccgcagtggtgggccccgcagtggcaggtcctaaaggggagaaaggggatgtggggcctgctggacccaggggcgctactggagtgcaaggcgagcggggccctcctggcctcgtgctgccaggagatccagggccaaagggtgatcccggggatcgcggacctattggactgaccggtagagcgggaccgcctggagactcgggacctccaggggagaaaggggaccctggccgccctgggcctccgggccctgtggggccacgcggaagggatggggaagtcggagagaaaggtgatgaaggcccaccaggagatccaggcctccctggcaaagcgggagaaaggggactccgaggagctcctggtgtcagggggcctgttggcgagaaaggggaccagggtgaccctggcgaagatggaaggaacggatctccgggttcgagcggtcccaagggggatcgcggagagcctgggcctcctggtcctcctggacggctcgttgatactggcccgggtgcacgggaaaagggagaacctggggacaggggacaggagggtccgcgcggcccgaagggcgatcctggtctgccgggagcgccgggagagagaggtattgaagggtttagaggccctccaggacctcagggagatcccggcgtccgagggccagcaggcgaaaagggcgacagggggccacccggcctggacggtcgctccggacttgacggtaaacctggcgcggcaggcccttccggaccgaacggagcagccgggaaggcaggagatccgggacgcgatggcctgcctgggttgcggggcgaacaaggcctccctgggccatctggacccccaggcctgcctggtaagccaggcgaagatggaaagcctggactgaacgggaagaatggtgaaccgggagatcctggtgaggacggcagaaagggggaaaagggtgactccggtgcaagcggaagagaaggacgcgatggcccgaagggcgagagaggggcccctggcatccttggacctcaaggacctcctggacttcccgggccagtcggaccgcctggacaaggatttccaggcgtgccgggtggtaccggtcctaagggtgatcgaggagaaactgggtcgaagggcgaacaagggctgccgggagagagaggccttcgtggagagccgggatccgtgcctaacgtggatcggctgctggaaactgcgggcatcaaggccagtgcccttcgggaaattgtggaaacttgggatgaatccagcggttccttccttcccgtgcctgagcgcagacgtggaccaaagggcgattccggagagcaaggacccccaggcaaagaggggcctatcgggttcccaggtgaaaggggactgaaaggggaccggggagatcctggaccccagggaccacctgggttggcgctgggcgagagagggccgccaggaccaagcggacttgcaggcgaaccgggaaaaccaggaattcctggactgccaggtcgggctggaggtgtcggagaagcgggcagacctggggaaagaggtgaacgaggcgaaaaaggggagagaggggaacaaggtagagatggtccacctggcctgcccggaactcctggcccaccagggccacctggacccaaagtgtcggtggacgaaccaggccctggcctttcaggtgaacaggggccacctggcctgaagggagcaaaaggagaaccgggttcaaacggggaccaaggtcccaagggcgaccgaggagtcccggggattaaaggagataggggagaaccaggaccgagagggcaggatggcaatccaggactgcctggagaacgaggaatggcaggaccggagggtaagccaggattgcagggtccacggggccctccaggtccagtggggggacatggagatccggggcctccaggagcacccggccttgcgggaccggccggaccgcagggaccgagcggactcaaaggcgaacccggagaaaccggtccaccaggcagaggtcttactggcccaaccggcgcagtgggccttcctggtcccccgggaccctcgggccttgtggggccgcagggatcgccaggactgcctggccaagtcggggagactggaaagcctggagcccctggccgcgatggagcctcaggaaaagatggtgaccgcggatcacctggagtgccaggatcgccgggtctgcccgggcctgtgggaccaaagggagagccagggcccactggtgccccaggccaggcagtggttggacttccaggtgccaaaggagaaaagggagccccaggcggcttggcaggagacttggtgggcgaacccggcgcaaagggggaccgtggcctgcctgggcctcgcggtgaaaagggagaagcaggccgagcaggtgaacccggggatccgggcgaagatggacaaaagggagcacccggaccaaaaggttttaagggtgatcctggagtaggagtcccgggttcacctggaccccccggtcccccgggtgtcaaaggcgaccttggacttcctggacttcccggagcaccaggcgtggttgggtttcctggccaaaccggaccgcgcggggaaatgggtcaaccaggaccatccggagaacgcggtcttgctggtccacccgggcgggaaggtattccaggccctctgggcccacctggacctccaggatcggttggtcctcctggtgcctcaggtcttaaaggtgataagggagatccaggcgtgggacttcctgggccaagaggggagcgcggagagccagggatacgtggagaagatgggcggccgggtcaagagggcccgcgggggttgactgggcctccaggctcgaggggtgaacgaggagaaaagggtgatgtcggtagcgcggggcttaagggtgacaagggagactccgcggtgattctcgggcctccaggaccaagaggcgcgaaaggtgatatgggagaaaggggaccaagaggacttgatggagataagggtccacgcggagataacggtgatccaggtgataagggatccaagggtgagcccggagacaagggatccgccggcctgcctggtctgcggggacttctggggcctcagggacagcctggagcagcagggattcccggcgatcctggctcacctgggaaagatggcgtgcccggaattagaggagagaaaggtgatgtgggttttatggggccacggggactgaagggcgaacgaggagtgaagggtgcatgcggccttgatggcgagaagggtgataagggagaggctggtccccctggtaggccaggactggcaggtcacaagggtgaaatgggggagccaggtgtgccaggccaatcgggggcaccaggaaaggaggggcttatcggccctaagggcgaccgaggtttcgatggacaacctgggcctaaaggcgatcaaggcgagaagggcgaaagaggcacgccgggaattggagggtttccgggcccttcaggaaatgacggatccgcaggcccgccgggacctccagggtcggtgggacctcgtggcccagaaggactgcaaggtcaaaagggagagagaggtcctcctggagaacgtgtggtgggagcccctggagtgccaggcgctcctggtgagaggggagagcaaggtcggcctggaccggcaggtcctagaggggaaaagggggaagccgccctgaccgaagatgatattagaggattcgtgcgccaagaaatgtcccaacattgtgcatgtcaaggtcagttcatcgcttccgggtctaggccacttccttcatacgcagcagacactgcagggtcacaacttcacgctgtgccggtgctgagggtttcccatgcggaagaagaggaacgggtgccaccagaggacgacgaatacagtgagtactcagagtactccgtcgaggaataccaggaccccgaagcaccatgggacagcgatgacccctgtagcctgccactcgatgagggctcatgcaccgcgtacaccctccgatggtaccatcgggccgtgactggatccaccgaggcgtgccacccctttgtctacggcggatgtggaggcaacgcaaacagatttggaaccagggaagcatgtgaaagacggtgtcctcccagagtggtgcaatcccagggaactggtaccgcccaggac

SEQ ID NO: 9613 - DNA, 8832 bp, synthetic construct
  misc_feature 1..8832: note = source = /note="Description of Artificial Sequence: Synthetic coding sequence"
  source 1..8832: mol_type = other DNA
atgacattacggctcttggtggccgccctctgcgccgggatccttgctgaggctccaagagtgcgagcccagcaccgcgagagggtaacatgcactagattgtatgccgcagatatcgtgtttctcctggatggatcttcctccatcgggaggtcaaattttcgcgaagtccgttcattcctggaggggctggtactgcccttctcaggagcagcatctgcgcagggagttcggttcgcaactgtccagtacagtgatgatcctagaactgaattcggattggatgcactcgggtctgggggagatgtcatccgcgccataagagaactttcctataaagggggaaacactcggacaggagcagccatactacatgtggctgatcacgtgttccttccccaactcgcccgccccggggtgcccaaagtctgtatccttattacagatggaaagagtcaggacctcgtcgatactgctgcacagaggctcaaaggacagggagtgaaactttttgctgtgggaatcaaaaatgctgatcccgaagagttgaaaagagtagcttcccagcccacttcagacttttttttttttgtgaacgatttctccatattgagaacactattgcctctggtttctcggcgagtttgtacgactgcgggaggagtaccggtcactagacctccagatgattctacatcagctccccgggatctcgtcctttcagagccttctagtcagtctctccgggtccagtggacagcagcctctggacccgttactggatacaaagttcagtatactccactaactgggctgggacagccactccctagtgaacggcaggaagtaaatgtgcctgccggggagacatctgtcagactgcggggactccgacccctcactgagtaccaggtgacggtcatagcgctttatgcaaacagtatcggagaggctgtgtcgggaactgctcggactacagctctcgaaggacctgagttgactatacagaacactacagcccacagtctacttgttgcctggagatcggtacctggggctactgggtatagggttacttggagggttttgtctggggggccaactcaacagcaggaactggggccaggacagggatctgtcttacttcgagatttagaacccgggacagattatgaagtgactgtgtccactctattcgggaggtcagtaggacccgctacatccctcatggcacgaacagatgcctcagtcgagcagactttacgacctgtgatactggggcccactagtatcctgctaagttggaaccttgttccagaggcccgagggtatagactcgaatggaggcgagagacgggactcgaaccccctcagaaagtcgtactgccaagtgatgtcactcgataccagcttgatgggctgcagcccggaactgaataccggctaactctttatacactcctagaaggacacgaagtcgccacaccagcaactgtggtgccaacaggacccgaactccccgtgagtcctgtgactgatctccaggccacggaactcccagggcagcgggttcgggtctcgtggtcacccgtgcccggggccacacagtataggatcatcgtccgttcaacacagggagttgaacgaactctggttcttcctggatctcagacagcatttgatttagatgacgtgcaggccggactctcctacacagtccgagtttccgctcgggtgggacccagggaggggtcagcctcagtattaacagtaaggcgggagcctgaaacaccgcttgccgtcccagggctccgggttgtagtgtctgatgccacaagggtcagagtcgcatggggacccgttccaggagcgtccgggtttaggatttcctggtccacaggatctgggcccgaatcatcccagacactacctcctgatagtacagctacagatataacaggactacaacctgggacaacataccaagtcgccgtgtcagttcttcgcggacgggaggaggggcccgccgctgtgattgtagcgaggacggatcccctcgggcccgtgaggactgttcacgtaactcaggcatcatcttcctctgtgacaatcacatggacacgagtgcccggagccactgggtatcgagtatcttggcactcggctcatggaccagaaaaatcacagctggtttctggagaagcaacagtggcagagttggacggattagaaccagatacagaatatactgtccatgtgagggcacacgttgcgggagtcgatgggcctcccgcttcagtggtggtaaggactgcccccgaacctgtcggaagagtgagtagacttcaaatcctcaacgccagttcggatgttctcagaatcacatgggtcggagttactggagcgacagcataccgcttggcatggggaaggtctgaagggggaccaatgaggcaccagatattgccaggaaacactgattcagcagaaatccgggggctagaggggggggtaagttactccgtaagagtaacagctctggtgggagatcgagaaggaacacctgtctccatagtggtaacaacaccccccgaggctcctccagctcttggaactctgcatgtagtgcagcgtggggaacattcccttcgcctacgctgggagccagtgccgagggcacagggattcctacttcattggcagccagaagggggacaggagcaatcccgtgtcctggggcccgaactatcgtcttatcacttggatgggctcgaacccgccactcagtatcgcgtgcgcctgtcagttctggggccagccggagaaggaccttccgctgaagtaactgcccggactgaatcacctcgcgtgccttctatagaactcagagtagtagatacttccatcgattcagtaacacttgcgtggactccagtctcccgagccagttcttatatattgtcttggcggcctttgagagggcccggacaggaagtgccaggatccccacagacactacctggaatctcctcttctcagagagtaactgggctggaaccgggagtttcatacatctttagtctgactccagtgttagatggagtgcgggggccagaggcctccgtgactcagacaccagtttgtcccaggggacttgctgacgtggtgtttctccctcatgcaacacaggacaacgcccacagagccgaagccacacgtcgggtgcttgaaaggttagtgcttgcactgggacccctcgggccacaggcagtccaggtcgggttgctatcttattcgcacaggccttcacctctattccccctcaatggaagtcatgatctcgggatcatcttacagagaatccgtgatatgccatacatggatccttcagggaacaatctcggaacagccgtagtgactgctcataggtatatgctcgcaccagatgcccccgggaggaggcagcacgtgcctggggtgatggtgttgttggttgatgaacctcttcgaggggatatcttctcccccataagagaagctcaggcatcaggattaaatgtcgtgatgctcggaatggcaggggcagatcctgaacagcttcggcggctagcccctgggatggactccgtgcagacattcttcgctgtcgatgatgggccgtcccttgatcaggctgtgtcagggcttgcaactgccctctgtcaggcttcctttacaacacaacccaggcctgagccctgtcccgtgtattgcccaaaaggacagaaaggggagcccggggaaatgggattgagggggcaggtgggaccccctggggatccagggctccccgggaggacaggagccccagggccacagggacccccaggatcagcgactgcaaaaggagaaaggggattccctggggctgatggaaggccagggtctcctgggagggcggggaaccccgggacgccaggggcaccaggactaaagggaagtcctggacttcctggaccacggggagatccaggggaacgagggccaaggggacctaaaggagaaccaggggccccaggacaggtgatagggggagaaggaccaggactaccagggagaaagggagatcctggaccttcagggccccctgggccaagaggacccctcggggacccagggccacgggggccccctggactccccggaactgccatgaaaggggataaaggggatagaggggagcgggggcccccagggccaggggaggggggaatcgccccaggggaacccggattacccgggctccccggatcacctgggccacagggacccgtcggacccccaggaaaaaaaggagagaaaggggattctgaagacggggcgcccgggctacccggacagcccggatctccaggggaacagggacccagagggcccccaggggcaatagggcctaaaggagatcgagggtttcccggacccctcggggaagccggagaaaaaggggagagggggccacctgggccagcaggatcgaggggattaccaggggtcgctggaagaccaggggccaaagggcccgaggggcctcctgggccaactggacgacaaggggaaaagggagagcctgggaggcctggagatcccgccgttgtaggacctgccgtggcaggacctaaaggagaaaagggagatgttgggcctgccgggccccgaggggccacaggggtacagggagaacgggggcctcccggactggtcctgcctggggatccaggaccaaaaggagatcccggggatcgggggccaatcgggcttactggaagagctgggccacccggagattctgggccccccggagaaaaaggggatccaggaaggccagggccccccggacccgtagggccaagagggagggatggagaagtaggggaaaagggagatgaggggcctcctggggatccaggattgcctgggaaagccggagaaagagggcttaggggagcaccaggggtccgcgggcctgtaggggaaaaaggagatcagggagatccaggagaagatggaaggaacggatctcctggaagttcaggacccaaaggggatcggggggaaccagggccacctgggcccccagggcggctcgtagacacagggccaggagcaagggaaaagggggaacccggagatagagggcaggaaggaccccggggaccaaaaggggatcccggattaccaggagcaccaggagaacgagggatagaggggttcaggggaccccctgggccacagggggatcccggggtcaggggacctgctggggaaaaaggggacaggggaccacccggactagacgggcgatccggactggatggaaaacccggggcggcagggccttccggacccaatggagcagccgggaaagccggggaccccggaagagatggacttcccggattacggggagaacagggactaccagggccttcagggcctcccggactccctggaaagccgggggaagatggaaaacctggacttaatggaaaaaatggggaacctggggatccaggggaagatggaaggaaaggagaaaagggagattctggggcctctgggcgggaagggcgagacggacctaaaggagaacgcggggcacctgggatactcggaccccaagggcctcctggactgcctggacctgtgggaccaccagggcaggggttcccaggagtccccggaggaacaggacccaagggggataggggagagactgggtcgaaaggagagcagggattaccaggagaacggggactaaggggagagcctgggtctgtgcccaatgtagatagacttctggagactgcggggatcaaagcttccgccctgagagaaatagttgaaacatgggatgaatcttcggggtctttcctgcccgtcccagaaaggcggcgaggacctaaaggggattcgggagaacaaggaccacctggaaaagaagggccaatcgggtttcccggagaacgtgggctgaaaggagataggggagatcccggacctcaggggccaccagggctggccctcggggagagagggccccctggaccatccggactcgccggggaacctgggaaacccgggattccagggctcccagggagagcagggggggttggggaagcgggaaggccaggagaacgcggagaaagaggggaaaaaggagaaagaggagaacaggggagggatgggcctccagggttgcctggaacacccggacctcctggaccaccaggacctaaagtgtccgtggatgaaccagggcctggattgagtggagagcaggggccaccaggactaaaaggagccaaaggagaaccaggatctaacggagatcaggggcctaaaggagaccggggggtgcctggaattaaaggggatcgcggggagcctggaccccgagggcaggatgggaaccccgggctacccggggaacgcgggatggcaggacctgaaggaaaaccagggctccaggggccccgggggccccccgggccagtgggggggcatggggatcctgggccacccggagctcctgggctcgcagggcccgccgggccacagggaccctcggggttaaagggggagccaggagagactggaccccccgggagggggcttactggaccaacaggggccgtggggttgcccgggccccccggaccatccgggctggtaggacctcagggatccccaggacttcccggacaggtcggggaaacagggaagcccggggccccaggacgggacggggctagtggaaaagatggggacaggggatcgccaggagtacctgggagtcccgggttgcctgggcccgtagggcccaaaggagagccaggacccactggagcaccggggcaggctgtcgtagggctcccaggagccaagggagagaaaggagctcccggaggacttgccggggatctagtgggagaaccaggagcaaaaggggatcgggggcttcccgggcccagaggagagaaaggggaggctggacgggcaggggaacctggagatccaggggaagatgggcagaaaggagcacctgggcccaaagggttcaaaggagatcctggggtcggagtgcctggatcacccggaccccctgggcctcccggagtgaaaggggatctcgggctgcccgggctccccggggctcctggggtagttgggttcccaggacagacagggccccgcggagaaatggggcagcccgggccctctggggaaaggggactcgctggaccccctggaagggaaggaattccagggcctttagggccccccggacccccaggatccgtcgggcctcccggggcctctgggcttaaaggggataaaggagatcctggggttgggcttcccggaccccggggagaaaggggagaacccgggatacgaggggaagatgggcggcctgggcaggaaggacccagagggcttacagggcctcctgggtctcgcggggaacgcggagaaaaaggagatgttgggtctgcagggctcaaaggagataaaggagactcagccgtgattctggggccccctgggccacggggggccaaaggagatatgggggaacgggggccgcgaggactggatggagataaggggccacggggggataatggagatcccggagataaaggatccaaaggagaacccggggataaagggtcagccggactacctggattgcgggggttgctgggaccccaggggcagccaggagccgctggaattcctggagatcccggatcacctgggaaggatggagtacccgggatcagaggagaaaaaggggatgttgggtttatggggccaagaggattaaagggagaacgcggagtcaagggggcctgtgggttggatggggagaaaggggacaaaggggaagcagggcctcctgggcggcccgggttagctggacacaaaggagaaatgggggaacccggagtccctggacagtccggggctccagggaaagaagggctgatcggaccaaaaggagatcgcggattcgatggacagccaggacctaaaggagatcagggagagaaaggagaaagaggaactcctggaattgggggattcccaggaccttcaggaaatgatggatctgcaggacctcctggaccccccgggagtgttggaccacgcgggccagaaggactgcaggggcagaagggggaaagggggccacccggggaacgagttgttggagcccctggagtgccaggagctccaggagaacgcggggagcaaggaagacccgggcccgcaggacctcggggggaaaagggagaggcagctctcacggaagatgatattaggggatttgtgcggcaggaaatgtctcagcattgcgcttgtcagggacagttcatcgcttccgggtcccggcccctcccttcctatgccgctgacacggcggggtcccagctgcacgccgtacccgtcttaagggtgtcccacgccgaagaggaagaacgggtacccccagaagatgatgaatattccgaatattctgagtattctgtggaagaatatcaggatcccgaagccccatgggattccgacgatccctgttccctccccctcgatgaagggtcctgcacagcttacactctaaggtggtatcatagagccgtcacaggatctacagaagcgtgtcatccttttgtgtacggggggtgtggaggaaatgccaacaggtttgggacacgggaggcctgtgagagacgttgcccccccagggtggtgcagtctcaggggacagggacagctcaggat

SEQ ID NO: 9614 - DNA, 8832 bp, synthetic construct
  misc_feature 1..8832: note = source = /note="Description of Artificial Sequence: Synthetic coding sequence"
  source 1..8832: mol_type = other DNA
atgactctgcggctcctcgtggcagcgctctgtgctggcattctcgctgaggctccacgagtcagagctcagcatcgagagagagtgacttgcacacgattgtacgctgctgatatcgtgtttctgctcgatggaagtagctctatcgggagaagcaacttcagagaggtccgttccttcctggaggggctggtcttgccgttcagcggggccgctagtgctcagggggtgaggtttgctacagtgcaatacagcgatgaccctcggacggaatttggcctggatgccctgggcagtggcggtgacgtaatccgcgccatcagagaactatcttataagggtgggaacacgcggaccggagctgctattcttcacgtagcagaccacgtattcttgccacagctcgcacgtccaggcgtccccaaagtgtgtatcttgataacagatgggaagtcacaggatctggtggacacagctgctcagagactcaagggtcagggggtcaagctcttcgccgtgggaatcaagaacgctgatccggaggaactcaagcgcgtggcatcccagcctactagcgatttcttcttctttgtgaatgactttagtatactcagaactttactgccgctggttagccggagggtgtgcaccaccgccggaggcgtgcccgtcacccgtcctccagatgacagtacaagcgcccctagagacctcgtgttatcagaaccatccagccagagcctaagagttcagtggactgctgcctcaggaccagtgaccggctataaagtccagtacacacccctcactggtctaggacaaccattgccaagtgaacgacaggaagtcaacgtgcctgcaggcgaaacctccgtccgactaagggggcttagaccactgacagaatatcaggtcaccgtcatagcgctgtatgctaattcaatcggagaggcagtctcaggcaccgctcggaccactgctttggaaggaccggagctcacaatccagaatacaaccgcacattcactactggttgcttggcgttcggtccctggagcgacaggatatcgggtaacctggagagtgctgtcgggcggccctacccagcaacaagagttggggcccggacagggaagcgtgctcctgcgggacctcgaaccaggcacggactatgaggtgactgtttcgaccctctttgggagatctgtgggccccgccacctccctgatggccaggaccgacgcatccgtggagcagaccctgcgccccgtcatcctggggcccacttctattcttctctcttggaatcttgtgccagaggccagaggatacagacttgaatggagaagggaaacaggattggagccaccacaaaaagtggtattaccttcagatgtcacacgatatcagctggacggactgcaacctggtacagaatacaggctgactctctacaccttgttagaaggccatgaggtggcaacacctgccaccgtggtgccaacaggccctgagctcccagtctcacctgttacagatctgcaagccactgagctgcccggtcagagggtgcgagtgagctggtctcccgtgccaggcgcaacccagtatcggattattgtgcgcagtactcaaggagtagaacggacacttgtgctgccaggttcacagactgctttcgacctggacgacgtgcaggcaggtctgtcttacacggtccgggtgtcggcccgggtaggaccacgagaggggtcagccagtgtgctgaccgttcggcgcgagcccgaaacacctttggcggtccccggcctgagggttgtcgtgtcggatgccacccgtgtccgcgtagcctggggacccgtgccaggagcaagcggcttccgtatctcatggagtaccggtagtggtcccgagtcctcacagaccctgccacctgacagcaccgcaacagacatcaccggactacagccggggacaacctaccaggtggcggtgtcagttctgcgcggcagggaggaggggccagccgccgtgatcgttgccaggaccgatcctttgggccctgtcagaactgttcacgtcacacaggcatcttcctctagcgtcaccatcacctggacaagagtgccaggagccaccggttatagggtttcgtggcacagtgcccacggcccggagaaatcccagctcgtcagcggggaggccacagtcgcggaattggacggtttggagcccgacaccgagtatacagtgcatgtccgcgcacacgttgctggtgttgacggccccccggcgtctgttgtagtgagaacagcacccgagccggtgggccgcgtgtccaggctacagattctgaatgcaagttcggatgtgttacgcatcacctgggtgggcgtgacaggcgctaccgcctatcgtctcgcttggggacggtcggaaggcggccctatgcggcaccagattttgccagggaatacagattccgcggagatacggggcttagaggggggcgtatcctactctgttcgggtgaccgccctggttggcgatcgggaaggaactcccgtgtcaattgtggtgaccacccctcctgaggccccacccgctctggggaccctacacgtcgtccaacgcggtgaacactccctgaggctgcgttgggagcctgtgccccgggcccagggttttctactgcattggcagcccgagggagggcaggagcagagtcgcgtcctgggtccggagctgtccagctaccatcttgatggactggaaccggctacccagtatcgggtccgactgtcagtgctggggcccgctggggaaggaccttccgcagaggtcacagctcggactgaaagcccccgggttccttctatagaactgcgggtggtggatacgtcaatcgattcagtgactcttgcgtggacacctgtctctagagcctcatcctatatactatcttggagaccgctacgcggacccggccaggaagtacctggtagccctcagaccctgcctggaatttcgtccagccagcgggtaaccggtctcgagcctggagtaagctatatcttctcattaactccagttctcgacggggtgagaggccctgaggcgtccgtcacccagacaccagtctgcccgaggggcctggctgatgtggtgttcctgccccatgcgacccaagacaacgctcacagagctgaagcaacacggcgggtcctcgagcgcctcgtactcgccctagggccgcttggcccacaggctgttcaggtgggtctgctgtcttacagccatcggccctccccattgtttccactcaacggaagccacgacctgggtatcatcttacaaagaatccgcgatatgccatatatggatcccagcggaaacaacctagggaccgccgtcgtcacagcacacaggtacatgctcgccccggatgctcctggcaggcggcagcacgtccctggcgtgatggtcctgctggtcgacgaaccgctgaggggggacatattctcacccatcagggaagcgcaggccagcggcttaaatgtggtgatgctgggaatggctggtgctgaccccgaacagctccggcgcctggcgccaggtatggacagcgttcaaaccttcttcgctgtggacgacgggccaagcctggatcaggctgttagtgggcttgccactgccctgtgtcaggcctcgtttacaacgcagccaagaccagagccgtgcccagtctactgcccaaagggtcaaaaaggggaaccaggggaaatgggcctgcggggacaagtcgggccccctggggacccgggcctaccaggccgaacgggggccccaggcccccagggaccgcccggcagcgctaccgccaaaggcgaacgcggtttccccggggcagatggacggcctggcagccctggcagggcgggaaacccgggcacacctggggcacctggcctcaagggatccccgggcctacccggacctcggggagatcccggagagcgtggacctagaggccccaaaggggagcccggggcccccgggcaagttataggtggggagggccctgggttgcctggccgaaagggtgaccctggtcctagcggcccaccagggcctcgcgggccacttggcgatccagggccccgggggccaccgggacttcccgggacggcaatgaagggagataagggcgaccgtggggaacggggacccccaggcccgggtgaagggggaatcgcacctggcgaacctggactgccaggcctgcctggctctcccgggcctcaggggcctgtgggccccccaggaaaaaagggtgaaaagggagacagcgaagacggagcgcctgggcttccaggtcagccaggatcacctggtgaacagggtccgcgaggccccccaggcgctattgggcctaaaggtgacagagggttccctggacctctaggtgaggccggagagaagggagagcgcggccccccgggccctgctgggtctaggggactacctggcgtggccggccgacctggggccaaaggccctgaaggaccccctggtcctactgggcgccaaggagagaagggcgaacccggaaggccgggggaccccgcagtcgtaggtccggctgtcgccggtcccaagggtgaaaagggagacgtggggcctgctggtcctcggggagccaccggggtccagggcgaacgggggccgcctggacttgtactcccaggcgacccaggcccgaagggggaccccggtgatcggggtccaatcggcctcacaggccgcgctggaccccccggagatagtggacccccaggtgagaaaggggaccccggccggcccggaccccctggaccggttgggccaaggggtcgggacggggaagttggagagaaaggggacgagggcccacccggtgatccagggctccctgggaaggcgggggagcgcggacttcgtggtgccccaggagtcagaggacccgtcggcgagaagggggaccagggagaccctggagaggatggaaggaatggaagccccggatccagcgggcctaagggggaccgcggagagcccgggccgcctggacctcctggaagactcgttgacactggccctggagcacgggaaaaaggggagcctggtgaccggggacaggaaggtcctaggggcccaaagggcgatcctgggctgcccggagcacctggggaaaggggcatcgagggttttcgcggtcctccaggcccgcagggtgaccctggagttcgaggccccgcgggcgaaaagggcgaccgagggccaccggggctagatggtagaagcggcctcgacggcaaacccggcgcagcaggaccaagcggccctaacggggccgccggaaaggcaggagatccggggcgagatgggttgccaggcctcagaggagaacaggggctgcccggtccctcaggccctcctggcctgccaggaaagcccggcgaggatggaaagcccggactgaatgggaaaaacggagaaccaggggaccctggtgaagacggccggaagggggaaaaaggcgacagtggggccagtggaagagaggggcgggacgggccaaagggggagcgtggcgccccaggcatcctcggccctcagggacctcctggactgcctggcccggttggccccccgggacagggatttcctggggtccctggaggtacagggcctaaaggcgatagaggggagactggatcaaaaggagaacagggattgcccggggagcggggcctgagaggtgaacctggctcagtccccaatgtggacagattgctggagactgccggaattaaagcctcagctctccgtgagattgttgaaacctgggatgagagttctggttcatttctgccagtgcccgagcgccggcgaggacccaagggtgacagcggggaacagggcccgccagggaaggaaggacccattggctttccaggggagcggggcctgaaaggcgaccggggtgatccaggcccgcagggtccccccggactcgctctaggcgagcgcggaccacccggaccctcaggactagccggagagccaggaaagcctgggatccccggtcttccaggacgcgcaggcggcgtgggcgaggccggaagacccggggaacgcggggaacgtggtgagaagggcgaacgcggcgaacagggaagggatggcccgccagggctacctggtacacccgggccccctgggccgcctgggcctaaggtgtctgtcgatgaacctggtccagggctctccggggaacaaggaccccccggcctcaaaggagccaaaggtgaacccggaagcaacggggaccaaggcccaaaaggggatcggggagtgccgggcattaagggcgatcgcggggaaccagggccaagagggcaggacggtaacccaggattaccaggagagcgcggcatggccggcccagaaggcaagcctggactgcaggggcctcgtgggcctccaggacctgtgggtgggcacggagacccgggccccccaggagcacctggactcgctggccccgcagggccacagggccccagcggactgaagggcgagcccggagagactggaccgcccggccgcggcctaactggtccaaccggtgcggttgggttgcctggtccaccaggccctagcgggctcgtgggacctcagggctctccaggcttacccgggcaggtgggggaaacaggcaaacctggcgcccccgggcgtgacggggcaagcgggaaggatggcgatcgcggctcacccggagtgcccgggagcccagggttaccaggtcccgtcggacctaaaggggagccagggcccacgggggcaccgggtcaggccgtagtgggcctgccaggagcaaagggcgagaaaggcgcacccggggggcttgccggcgatctggtgggagaacccggggcaaagggagacaggggactgcccggtccccggggcgaaaagggagaagcaggccgtgcgggggagcccggggatcctggggaagacggccagaagggagctccaggacctaagggattcaagggtgacccaggcgttggagtgccagggagcccgggacctccagggccaccgggggtgaagggcgatttaggcctccccggcctccccggagctccaggcgttgtgggtttcccagggcagaccggccctcgcggtgagatgggacagcctgggccaagtggagaacggggcctggctggtcctcccggtagagaaggaatacccgggcccctcggcccacctggtcctcccggttccgttgggcctcctggtgcgtccggattgaagggggacaagggggacccaggcgtggggttaccagggccgcggggagaacgcggcgaacccggaatccgaggagaagatggccgcccagggcaggagggcccgagagggttaacgggacctcccggctcccgaggcgagcgcggcgaaaagggtgatgtaggatccgccggtctcaagggcgacaaaggagatagcgcggtcattctgggtcctccaggtccccgcggggccaaaggggatatgggagagcggggccctcggggattagatggcgataaaggcccacgaggcgacaatggagatcccggggacaaaggatccaagggcgagccgggggataaaggaagcgctggtctgcccgggctcaggggactgctcggaccacagggccagcccggagccgcgggcattcctggagatcctgggagccccggtaaggatggcgttcccggcatccggggggagaagggcgacgtgggattcatggggccgcgggggctgaagggcgagcgcggcgtcaaaggagcgtgcggcttggatggagaaaaaggagataagggtgaggccggacccccaggaaggcccggcctggccggtcacaaaggagagatgggcgaacctggagtgcctggtcagagtggggcccccggaaaggagggcctaattggacccaaaggagatcgagggtttgacgggcagcctggacccaaaggtgaccagggagaaaagggagagaggggaaccccaggtatcggagggttcccaggtccttcaggtaacgacgggagtgctggcccccctggcccgccgggtagtgtcggccctagggggcccgaaggactccaggggcagaaaggagagcgcggcccccctggtgagcgggttgtgggcgccccgggagtacccggcgcaccaggcgagcgtggtgaacagggcagacctggacctgctggaccccgcggagaaaagggtgaggcggccctcactgaggacgacattcgcgggtttgtcagacaggaaatgtcacaacattgcgcttgccaaggacagttcattgcttccggttcaagaccacttccttcatacgccgccgacaccgcgggctctcagctgcacgctgttcccgtgctacgcgtctcacacgctgaggaagaggaaagagtcccgccggaggatgacgaatacagtgagtactctgagtactctgtcgaggagtaccaggacccggaagccccttgggattctgatgacccctgtagtcttccccttgatgagggatcctgtacagcatatacccttagatggtaccatcgcgctgtcactggaagcactgaagcgtgccatccattcgtctacggagggtgtggcggcaatgcaaatcgctttggaacacgtgaagcctgtgagcgtcggtgccctccccgtgtggtgcagtcacaaggaacgggaacggcccaagac

SEQ ID NO: 9615 - DNA, 8832 bp, synthetic construct
  misc_feature 1..8832: note = source = /note="Description of Artificial Sequence: Synthetic coding sequence"
  source 1..8832: mol_type = other DNA
atgacgttgcggttgctggtggcagccctgtgcgctggaatcttggctgaggcccctcgagtgcgggcgcaacacagggaacgggtcacatgcacccgcctgtacgcggcagacatagtctttctgctggacggttccagtagtatcgggcgctccaatttccgcgaggtaagatcattccttgagggcctcgtcctccccttttcaggggccgcttccgcgcagggtgtccgattcgcaacagtacagtacagcgatgacccacggactgaattcgggctcgatgcactggggagcgggggtgacgtaataagggccatcagggaactctcttacaagggcggaaatacccggacaggcgcggccatcctccacgtggcagatcatgtcttcctgcctcagttggcacgcccaggcgtgccgaaagtctgtatcctcattacggacggtaagtcacaagatctggttgacaccgccgcccaacgcctgaaggggcaaggggtgaagctctttgccgtcggtattaagaatgccgacccggaggaattgaagcgcgtcgccagccagcctacgtccgactttttcttctttgtaaatgactttagcattctgcggacactcctgcctctggtgtccaggagagtgtgcacaacagccggtggcgtaccagtaactaggcctccagacgactccacatctgcacctcgcgatctggtgttgtccgagccaagttcacaaagcctgcgggtgcagtggactgctgcttctgggcctgtgacgggttataaggtccagtatacgccgttgactggactgggccagcctctgcccagcgagaggcaggaggtgaacgtccctgctggcgaaacatccgtaaggcttaggggcctcaggccactgaccgaatatcaagtcaccgtaatagcactgtatgcaaattccatcggtgaagctgttagcggtaccgctaggaccacagctctcgagggtcccgagctgaccatccagaacacaacagcccactccctgctggtagcgtggcgctcagttccaggcgccaccggatatagagtgacctggagggtgctgtcaggaggaccaacgcagcagcaggagctgggtcccggtcaaggatccgtgctgctcagggatctggaaccagggacggattatgaggttaccgtgagtactctgttcggtcggtctgtggggccagccacgtccttgatggcccggacggacgcaagcgtcgagcagaccctgcggccagtgatactggggcccaccagcatcttgctctcttggaatctcgtgcctgaggctagaggttacaggttggagtggcgcagagagacaggcctggaaccacctcagaaggtcgtgctgccaagcgatgtgacccgatatcagctggatggcctccagcccgggacagagtataggttgactctgtacaccctcctcgagggacacgaagtcgcgacccccgcaacagtggtgcccaccggtcccgaactgcctgtgagtcctgtgaccgatcttcaggccacggaactgccgggccagagggtgagagtcagctggtctcccgtacccggggcaacccagtacagaattatcgtcagatcaactcagggggtcgagcgcaccctcgtacttccaggcagccagacggcattcgaccttgacgacgtgcaggccggactctcatacacggtcagggtgagcgctagggtcggtcctagagaagggagtgcttcagtattgaccgttaggcgggaacctgagacccccctggccgtacccggtctgagagtggtcgtgtctgacgccacgcgggtgagggtggcatggggccccgtccctggtgccagtggcttccggatatcctggtctacagggtccggtccagaatcctcccagacattgccgcctgattccactgcaaccgatatcacgggtttgcagccaggtacgacctaccaggtcgccgtgtccgtgctgcggggacgcgaagagggaccagctgctgtaatagtggctcggacggatcccctgggtcccgtacggacggtgcatgtgacacaagccagcagcagcagtgtcacaatcacatggactagggtcccaggagcaaccgggtatagggtcagctggcacagcgctcacggcccagaaaaatctcagctggtcagtggcgaggccaccgtcgccgagctcgatggactggagcccgacacggagtacactgtccatgtgagagcccatgtcgccggagtggatggaccccccgcgtctgttgttgtgcgcacagcacctgagccggtgggccgggtcagccgcctgcagatcttgaacgcttcaagcgatgtgttgaggatcacatgggttggagttacgggagcaactgcttataggctggcctggggaagaagcgagggagggcccatgcggcatcagattctgcccggtaacacagactctgcagaaattcgcggactggaggggggcgtctcatactcagtgcgagtgactgctcttgtcggggaccgcgagggaacacccgtgagtattgtagtcacgacgcccccagaggctccacccgcgctgggcaccctccacgtcgttcagaggggcgagcattctctccgacttcgatgggagcccgtacctagggctcagggcttcctgttgcattggcaacctgaggggggccaggagcagtcaagagtgctgggacccgagctgagctcatatcatcttgatgggttggagcctgccacccagtacagggtcagactcagcgtgctgggccctgccggcgaagggccctcagccgaggttacagcgcgaaccgagagcccaagagtgccatctatcgagctccgagttgtcgatactagcattgactctgttaccctcgcatggaccccggtgtctagggcttccagctatattctgagttggaggccgctcagggggcctggtcaggaagtcccagggtccccccagactctcccagggattagttccagtcaacgggtcactggtctcgaaccgggggtgtcttacatcttctccctgacccctgtgctggacggcgtgcgaggcccggaggccagcgtcacacagacccccgtctgcccccggggactcgccgacgtggtgtttctgccgcatgccacccaagataacgcgcatagagcagaagcaactaggcgagtcctcgagaggctggtgcttgccctcggcccattgggacctcaggccgtgcaagtcgggttgctttcctactcacacagaccgtcaccactgtttcctctgaatggaagtcatgaccttgggatcatcctgcagcgcatacgagatatgccttacatggacccaagcggaaataatcttggcactgccgtagtcacagcccaccggtatatgcttgcccccgatgcacctggaagacgccagcatgtaccgggggtgatggtgcttctggtggacgaaccactgaggggtgacatattctctcctatcagagaggcccaggcatctgggctgaacgtggtcatgctggggatggctggcgcagatcctgaacagctgagaaggcttgcacccggcatggattccgttcaaacatttttcgccgtggatgatggacctagcctggaccaggcggtgtctgggttggccaccgcactgtgccaggccagtttcaccactcagccgaggccagaaccatgtcctgtgtactgcccaaaaggacagaagggggagccgggggaaatggggctgcggggtcaggtgggtcctcccggagaccccgggctgcccgggcgcaccggagccccgggaccccaagggcctcccggctcagcaacagccaagggggagagagggtttccaggtgccgacgggcgccccgggtcccccggtagagccggtaacccaggcacccctggcgccccaggactgaagggaagtcccggcttgccaggtcctcgcggagaccccggtgaaaggggacctcggggtcctaaaggcgaaccaggcgcccccggccaggtgatcgggggcgagggcccagggctgcccgggagaaaaggcgatccaggaccgtccgggcctcccggacccagaggccctctgggggatccagggccacggggccctccaggtctccctggtacagctatgaagggagataagggggataggggggaaagaggacctcccggacctggtgagggggggattgcgcctggtgaacccgggctgcccggcctgccaggttctcctggcccccaggggcccgttggaccacctgggaaaaaaggtgaaaaaggagattctgaagacggcgccccaggcctccccggacagccaggtagtcccggtgagcagggccctcggggaccacccggtgcaatagggccgaaaggggaccggggctttcccgggcccctcggcgaggcaggagaaaagggagaaagaggcccgccagggccagccggtagccgggggttgcctggtgtggctggaagacctggcgccaaaggacccgaggggcctcccggcccaaccggaaggcagggtgagaaaggagagcccggccggccgggggatccggccgtggtgggcccagcagtggccggcccaaagggcgagaaaggcgatgtcggacctgccggaccgaggggggccacgggtgtacagggcgaaaggggacctccaggtctcgtgctgccaggcgacccaggaccgaaaggcgacccaggagacagggggccaataggactgactggcagagccggaccccccggagattctggtcctcctggggaaaagggggaccctggcagacctggcccacctggcccagtgggtccccgaggtagggacggcgaggttggcgagaagggcgacgaaggcccgccaggagatcctgggctgcctggaaaggcaggcgagcgcgggctcaggggcgctcccggggtacgcgggcctgttggcgaaaagggggatcaaggtgatcctggcgaagacggaagaaatggtagccccgggagctctgggccgaaaggggaccggggtgagcccggccctccaggtcctccaggtcgattggtagacactggccccggtgctcgagaaaaaggagaacctggcgatcgagggcaagagggacctaggggacccaagggagaccctgggcttccaggagctcccggggaaagggggatcgaaggcttccggggcccccctgggccccagggggacccaggagtgcgcggccctgctggtgagaagggcgaccgcggccctcctggcctggatggcaggtctggacttgacggaaagccgggcgccgccggcccctcaggcccgaacggtgccgctggcaaggccggagacccaggccgggatggactcccaggactgaggggtgagcagggcctgcctggcccctctggcccgccaggccttccggggaagcccggggaggacggcaagccgggcctgaacgggaaaaacggtgaacccggggacccaggtgaggatgggaggaagggcgaaaagggagatagcggagcctcaggtagagagggccgggacgggcccaaaggagagaggggagctccaggaatcctggggcctcagggccctccaggccttcccgggccggtagggccaccaggccaggggttccccggggttccggggggaaccggacctaagggcgacagaggcgaaactggttcaaaaggtgaacaaggtcttcccggcgagcggggattgagaggtgaaccgggatccgtgccgaatgtggacagactgctggagaccgccggcatcaaggcaagcgcgcttagagagatcgtggagacctgggacgagtccagcggtagctttctgcctgtgcctgagagaaggagaggtccaaagggggacagtggcgagcaggggccgccagggaaagaaggcccgattggattcccaggggagcgaggcctgaaaggcgaccggggtgacccaggccctcagggcccacccggacttgctcttggggagcgcggacctccagggccttccgggttggccggggaaccaggaaaaccagggatcccaggcctgcccggaagagcaggcggcgttggggaggctggcagacctggtgagcggggtgagaggggtgagaaaggagagcggggagagcaaggcagggatggccctcctgggctgcccggtacccccgggcctcctggtccgcctggacccaaagtgtcagtcgatgaacctggccctggtctgagtggagagcaggggcctccaggcctgaagggggcaaagggtgaacccggttctaacggagaccagggaccaaaaggcgatcgaggcgtccccggtattaaaggagaccggggagagcctggccctcgcggccaggacggaaaccccggtttgcccggagagaggggcatggccgggccagaggggaagccgggattgcaaggacctcggggtccccccgggcccgtcggtggacacggggatcctggccctcctggagccccagggcttgcaggtccggccggaccgcagggcccgtcaggactgaaaggagagccaggagagacaggaccaccaggccgaggtctcacagggcctaccggagctgtagggctccccggcccccctggccccagcggcctggtggggccccaggggtcccctggtctgccgggtcaggtaggagaaacagggaagcctggagcaccagggcgcgatggagcttcaggtaaggacggcgatagggggagccccggagtgcccgggtcccccgggctcccaggacctgtagggcccaaaggagagccgggccccacaggagcccccggtcaagccgtggtaggccttccaggagctaagggcgagaagggtgccccaggggggcttgcaggagacctggttggcgagccaggagccaaaggcgatagaggactgcctgggcccaggggcgaaaaaggtgaggccggacgcgcaggcgagcccggtgatccaggcgaggacgggcagaagggggctcctggaccaaagggttttaagggcgatcccggtgtcggtgtccctgggtccccaggaccaccaggcccacctggcgtgaaaggggacttgggcttgcctggtctgcccggcgctcccggcgttgtcggatttcctggtcaaacgggcccacggggcgaaatgggccagcctgggccgagtggggaacgcggcctcgccgggccacccggaagagagggaatccccggaccactgggtccacctggaccacccggctccgtgggaccacccggggcaagcggcctgaagggtgacaagggagacccaggagtgggcctcccagggccacggggcgaacgcggggagcctggaatcaggggagaggacggtcggccgggacaggagggccctagaggcctcacgggccctcccggatcacggggcgaaagaggggaaaaaggggacgtggggagcgctggcttgaagggagacaagggagactcagccgtcattctgggtcctccaggccctagaggtgctaagggcgacatgggtgagcgggggccaaggggactggatggtgataaggggccgaggggcgacaacggtgatccaggcgacaagggaagtaagggcgaacctggagataaagggagtgccggccttccgggtctgcggggtcttctgggtccccagggacagccaggcgccgccggaattcccggagaccctggatcccccgggaaggatggagttcctggcatccggggagaaaagggcgacgtgggattcatgggacccagaggcctcaaaggagagcgcggagtaaagggtgcctgcgggctcgatggcgagaaaggggataaaggagaagcagggcctccaggccgaccggggcttgcaggacacaagggagagatgggagagcccggcgtgcccgggcagtccggggcacccggaaaggaaggccttatcggtccgaagggagaccgagggttcgacgggcagccaggtcccaaaggagaccagggcgaaaaaggtgaaagagggacccctggcattgggggtttcccaggtccaagtggaaacgacgggtctgccgggcccccaggaccccccggctctgtggggcctagagggcccgaaggcctgcaaggacagaagggcgaacgggggcctcccggagaacgggttgtgggcgctccaggtgttccaggtgcaccaggggaacggggcgagcaaggaaggccggggcctgctggaccgaggggagaaaagggtgaggctgcgctgacagaagatgacatacgaggatttgttcgccaggaaatgtcacagcattgtgcctgccagggacagtttattgcctcagggtctagacccctgccaagctacgcggctgacacagctggcagtcagctgcatgccgtgcctgttctccgcgtgtctcacgctgaagaggaggaacgagtccccccggaagacgatgaatactctgagtacagcgagtatagcgtcgaagagtaccaagaccccgaagcaccctgggactccgacgatccctgtagcctgcctctggacgaagggagttgtacagcttatacactgcggtggtatcaccgcgcagtgaccggtagtaccgaagcgtgtcaccctttcgtgtatggcggctgcggggggaacgcaaacaggtttgggacccgggaggcctgcgaacgaagatgcccgcctcgcgtggtccagtcacaaggcacggggactgcacaagac

SEQ ID NO: 9616 - DNA, 8832 bp, synthetic construct
  misc_feature 1..8832: note = source = /note="Description of Artificial Sequence: Synthetic coding sequence"
  source 1..8832: mol_type = other DNA
atgaccctccggctccttgtggctgctctgtgcgctggaattttggcggaagcgccacgcgtccgcgcccagcaccgcgagcgcgtgacttgcacccggctgtacgccgctgacattgttttcctgctggacgggagcagctcaatcggacgttccaattttcgagaagttagatcattcctcgagggactggtcttgcctttcagcggagccgcgtctgcacagggagtccgcttcgcaaccgtgcaatactcggatgacccacggactgagttcggcctcgatgccctgggatcgggcggagacgtgatccgggctatccgcgaactcagctacaagggaggaaacacccggactggagcggctatcctgcatgtggcggaccatgtgttcctcccgcagctggcgcggcccggagtcccgaaggtctgcatcctgatcaccgacggcaaatcccaggacctggtggatactgctgcacagcgtctgaagggtcaaggtgtcaagttgtttgctgtgggcatcaagaacgctgacccggaagaactcaagcgggtggcctcacagcctacttcagatttctttttcttcgtgaatgatttctccattttgcgcacgctgctgccactcgtctcgaggcgcgtgtgtactaccgcaggaggggttccagtgaccagaccgccagacgatagcacttccgcccctcgggatctcgtgctgtctgagccgtcatcccaatcgctccgcgtgcaatggaccgcagcgtcgggacctgtcaccggctacaaagtccagtacaccccactcactggactcggacaacctctcccatccgaaaggcaggaagtgaacgtcccagccggagaaacctcggtgaggctgcgggggctcagaccccttaccgagtatcaagtgaccgtgatcgccctctacgctaactcaatcggagaggccgtgtcaggaacggctcgcaccaccgcactggagggcccagaattgactattcaaaataccacggctcatagcctcctggtcgcctggcggtccgtcccaggagctactggctaccgagtgacctggcgggtgctgtccggaggcccgacgcagcagcaggaactgggtccgggtcagggctccgtcctgctgcgggacctcgaacctggaactgactacgaagtgactgtgtcaactctgtttggacgctcggtgggaccggcaacgtcactgatggccaggactgacgcgagcgtggagcagactctcagaccagtgatcctgggtccaacgtcaatcctcttgtcgtggaatctggttccggaagctaggggatacagactggagtggaggcgcgagactggcctggaaccgcctcagaaggtggtgctgccgtctgacgtcactcggtaccagctggatggactccagccaggaaccgaataccgtctgacgctgtatactctcctcgaaggccacgaagtcgctaccccggcaaccgtggtgccgaccggcccggaactgcctgtgtccccagtcactgatctgcaagccaccgagctgccgggtcagcgggtcagagtgtcgtggtcgccagtgcctggagccacccagtacagaatcatcgtgcgatccactcagggcgtggagcggaccctggtgctccctggcagccagacggcgtttgacctcgacgatgtgcaagcaggcttgtcgtacacggtgcgcgtctccgccagggtcgggccacgggaaggatcggccagcgtgctgaccgtgagacgggaaccggaaaccccactggccgtgccgggtctgcgggtggtcgtgtcggacgccactcgtgtgcgcgtggcctggggtccggtgccaggcgcgtcgggattccggatatcgtggtcaacgggctcgggacctgagtcaagccagaccctccccccggactccactgcaaccgacatcaccggtctgcaacccggaaccacctaccaggtcgccgtgtccgtccttcgcggtcgggaggaaggcccggctgccgtcatcgttgcccgcaccgatccgctgggcccggtgagaacggtccatgtgactcaggcctccagctcctctgtgaccattacgtggacccgggtgcccggcgccactggataccgcgtctcatggcactcggcgcacggacccgaaaaatcccaactggtgagcggggaagccaccgtggcggaactggacggactggagccggatactgaatacactgtgcacgtgcgcgcacacgtcgcaggggtggatggaccaccggcgtccgttgtggtgaggaccgccccggagcctgttggaagagtgtccagactgcaaatcctcaacgcctcctccgacgtgctcaggatcacctgggtcggggtcaccggggctactgcgtatcggttggcatggggcagatctgaaggagggccaatgaggcaccaaatcctgcctggtaataccgacagcgcagagatcagaggacttgaaggaggagtgagctactccgtgcgcgtgaccgctctggtgggcgatcgggagggtactcctgtgtcaattgtcgtcaccaccccgccggaggctccgcccgcgctcggcactctccatgtggtccagcgaggagagcatagcctccggctgaggtgggaaccggtcccccgggcccaagggttccttctgcattggcaaccggagggaggacaggaacaatcacgcgtgctcgggcccgaactgagcagctaccacctggacggactggagcctgcgactcagtaccgcgttagactgtcggttctcggccccgccggagagggaccgtcggccgaggtgactgcgcggacggaatcccctcgcgtgccgtcgatcgaactccgggtcgtggacacctccatcgattcggtgactctggcatggactccagtgtcccgggcatcatcgtacatcctcagctggcgcccgctgcgcgggccgggtcaagaagtgccaggtagcccgcagaccttgcctggaatctcatcgagccagcgagtcactgggcttgaaccaggtgtgtcctacatcttttcactgactcccgtccttgacggagtgcggggaccagaggcgagcgtcactcagactccggtgtgtcctcggggcctggcagacgtcgtgttcctcccacacgccacccaagataacgcacatagggccgaggcgaccagaagggtcctggaacgattggtgctggccctgggaccgctgggcccgcaagcggtgcaggtgggactgctctcgtacagccatcggccatcaccgctgttcccgctgaacggatctcacgatctgggaatcatcctccagagaatccgagacatgccttacatggacccttctggcaacaacttgggaactgcggtcgtcaccgcccaccgctacatgttggccccggacgccccgggacgccgccaacacgtgccgggggtcatggtgctcctggtcgacgaacctcttagaggagacatcttcagcccaatcagagaagcccaggcctccggactcaacgtggtgatgctcggcatggcgggagccgacccggaacagttgcgccggctcgcccccggaatggattccgtccagaccttcttcgccgtggacgacggtcctagcctggaccaggcagtgtccggacttgcgactgcactgtgtcaggcgtcattcactactcaaccgcggccagagccctgccccgtgtactgccctaaaggacagaagggagaacctggtgagatgggacttcggggccaagttggcccgccgggcgaccccggactgcctgggcggaccggggcgcccggccctcaaggacctccggggtctgcgaccgctaaaggagagcgcggatttcccggcgccgatggtcgcccgggatcgcctggacgggccggaaacccggggactccaggagcgccagggttgaagggatccccgggcctcccgggaccacgcggtgaccccggagaacgaggcccaagaggcccgaagggcgaaccgggagcccctggtcaggttataggaggagaaggacctggactgccgggtagaaagggggatccagggccgagcggtccaccaggccctcgcggcccattgggcgacccgggaccgaggggtccgccgggcttgccgggaactgccatgaaaggggacaagggtgacaggggcgaacggggacctccggggcccggcgaagggggaattgcgccgggagagcccggcttgccgggccttccgggatcgcctggtccccaaggaccggtgggcccgccaggcaagaagggtgaaaagggagacagcgaggacggcgcaccaggtctgccgggacagcccgggtcgccgggtgagcaggggccaagaggaccgcccggtgccatcggacctaagggagatcgcggattcccgggaccgctgggggaggcgggagagaagggagagcgcggaccaccaggaccggcgggatcacgcggactcccgggagtggccggacggcctggggctaagggccccgagggaccccccgggccaactgggcggcagggtgagaagggcgagccggggcgaccgggcgacccggccgtggtgggaccagccgtggccggaccgaagggggaaaagggcgatgtcggaccagccggaccaagaggagcaactggcgtccagggcgagcggggtccgccgggcctggtcctgccgggcgatccgggcccaaaaggcgatcctggcgacagaggcccgatcggcctcacgggaagggcaggaccgccgggggactccgggccgcctggcgagaaaggggatccaggacgccccggccctcctggcccggtgggacctcgcggtcgagacggggaggtgggagaaaaaggcgatgagggaccaccgggtgaccccggactccccggaaaagcaggagaacggggcctccgcggcgcaccgggtgtgagaggtccagtgggtgagaaaggtgaccagggcgatccgggcgaagatggacggaatggcagcccaggttcctcgggaccaaagggagacaggggggagccaggaccaccaggaccaccgggtagactcgtggacacgggacctggcgcacgcgaaaagggagaaccgggggaccgcgggcaggaaggccccagaggacctaagggcgatccagggctgccgggagccccgggagagcgcggcattgaaggcttcaggggccctcccggaccacagggtgaccccggggtgaggggccccgcgggcgaaaagggggaccgcggcccaccgggactggatggacgctcgggacttgacggtaagccgggcgccgccggaccatctggaccgaacggagcggcaggaaaggctggggaccccggccgcgacggacttccggggttgcggggtgaacaaggactcccgggcccttccggacctcctggactcccggggaagccaggggaggacggaaaaccaggtctgaacgggaagaacggagaaccgggagatcccggggaggatggaaggaagggagagaaaggagatagcggtgcctcaggccgggagggccgcgacggtccgaagggagagagaggagctccggggattctgggaccgcaaggcccgccggggcttccgggacctgtcggaccgccaggacaggggttcccgggggtgccagggggcactggacctaaaggagatcggggggagactgggtccaaaggagagcaggggttgccaggcgaacggggactgagaggtgagcccggctcagtgccgaacgtcgaccgacttctggaaaccgctggcattaaggcctcggccctccgggagattgtggaaacctgggacgagagctccggctcgtttctgcccgtcccggaaaggaggaggggaccgaagggcgactcgggagaacaaggacctccggggaaggaaggcccgatcggtttccccggagagagaggcctcaagggcgaccgcggagatcccggaccccagggacccccgggacttgctctgggcgagcgcggccctccgggtccatcgggactggccggagagccaggcaagccgggcatcccgggacttcccggcagggccggaggagtcggtgaggcgggacgtccaggagaaaggggagagcgcggagagaagggcgaaaggggcgaacagggacgggacgggccgccgggtctgccgggcaccccgggacctcccggcccgccaggaccaaaagtgtctgtggacgaaccaggaccgggactgtcgggagagcaggggccaccaggactgaaaggagctaagggcgagccgggatcaaacggcgatcagggaccaaagggagatcgcggggtgccgggcatcaagggagacagaggagagcctggtccgcgaggacaagacggaaatcccggacttccgggagagcggggcatggccggtccagaaggcaaaccagggttgcagggcccacgtggaccgcctggtccagtgggaggccacggcgaccccggcccaccgggagctccaggactggccgggccggctggcccacaaggcccatcgggcctcaagggggaacccggagagactggaccaccgggacgcggactgaccggaccaaccggagcggtgggcctgccggggccccctggcccctccggccttgttggaccccaaggatcccccggtttgccgggacaggtcggggaaactgggaaaccgggggccccgggcagggacggagcatccggtaaggatggcgatcgcggatcgcctggagtgccgggatcgcctggactccctgggcctgttggcccgaagggagaacccgggccgaccggggcgccgggacaagcggtcgtcggactgccgggagcgaagggcgaaaagggtgcaccagggggattggctggtgacctggtgggtgaaccgggagcgaagggtgacagagggctgccggggccgcgcggtgagaagggcgaggcaggcagagcaggagaaccgggtgacccaggagaagatggacaaaagggggcaccggggcctaagggcttcaaaggtgatcccggcgtgggagtgccgggctcccccggtccgccggggccgccgggagtgaagggtgatctgggactccctggtctgccaggggcgcctggagtggtcggctttccgggacaaactggtccgcgaggagagatgggccagccgggaccctcgggcgagagagggcttgccggaccgccaggccgggagggtatcccgggaccgctcggaccgccaggaccgcccggaagcgtcgggccaccaggggcctctggattgaagggtgacaaaggggacccaggcgtgggccttcctggacctcggggagagagaggcgaaccgggtatccgcggagaagatggtcgcccaggtcaggaaggaccgaggggactgacgggccctcctggatcccggggcgagagaggcgaaaagggggatgttggctcagcagggttgaagggtgataagggagacagcgccgtcatactcggccctcccggtccacggggagccaagggcgacatgggagaacgggggccgagaggactggatggagacaagggaccccgcggagataatggtgaccccggggacaaagggtcgaaaggcgaaccgggagacaagggcagcgctgggctgcctggattgagaggactgttgggcccacaaggtcagccgggcgcggctgggatcccaggagatccaggaagcccaggtaaggatggagtcccgggaatccggggagagaaaggagacgtgggattcatggggcctcggggtctgaagggcgagcgtggcgtgaagggagcctgcggcctggatggggaaaaaggagataaaggtgaagcaggcccgccaggacggcctgggttggctggacacaagggcgagatgggagaacctggcgttcctggccagtcgggggccccaggcaaggaaggactgatcgggccgaagggagatagaggttttgacggacagccaggaccaaagggagatcagggcgagaaaggcgagcgcggcacccctggtattgggggattcccgggaccctcgggcaatgatggttcggccggaccgccgggtcctcctggctcagtcggaccgcgcggcccggagggactgcagggacagaagggagaaaggggtccacccggagagcgcgtggtgggtgcgcctggagtgcctggagcccccggcgagcgaggagaacaaggacggcctggaccggctggaccgaggggagaaaaaggagaagcggccctgaccgaagatgacatccgcgggtttgtgagacaggaaatgagccagcactgcgcatgccagggacaattcatagccagcggatcccgccctctgccgtcgtacgcggcggacaccgccggatctcaattgcatgcagttcccgttctgagagtctcgcacgccgaagaagaagaaagggtcccgccggaggacgatgagtactcagagtattcagaatactcagttgaagaataccaggaccccgaagcgccttgggactccgatgacccgtgttcgctgccactcgatgaaggctcttgtaccgcatacactctgcggtggtaccacagagcagtcaccggaagcactgaagcatgccatcccttcgtctacggcggatgcggaggaaatgccaacaggttcggaacgagggaggcatgcgagcgccgttgccctccaagagttgtgcagagccaaggaaccggcacggcgcaggac

SEQ ID NO: 9617 - DNA, 8832 bp, synthetic construct
  misc_feature 1..8832: note = source = /note="Description of Artificial Sequence: Synthetic coding sequence"
  source 1..8832: mol_type = other DNA
atgactctgcggctgctcgtggcagccctttgtgcagggattcttgcagaagcaccccgagttcgagcacaacatagagagcgggtgacctgtactcgactgtacgcggcagatatcgtctttctgttggatggctcctcatccatcggtagatccaactttcgtgaagtcagatcatttctggagggattggtgcttccatttagcggagcggcgtcagcacaaggggtgagatttgcaacggtgcaatacagcgatgaccctcgtaccgagtttggacttgatgcactgggttccggaggggacgtcatcagagcaataagagagttgagctacaaggggggcaatacccgcactggagcggcaattcttcacgtggcagaccatgtgtttctgcctcaacttgctcgcccaggtgtgcctaaggtgtgtattctgatcactgacggaaaaagccaggacctggtggataccgcagcacaaaggcttaaggggcagggagtcaaactcttcgctgtcggaatcaaaaacgcagatcccgaagaacttaagcgggtggcatcgcaacctacttctgatttctttttctttgtgaacgacttttcaattctgcgcacccttctcccacttgtgtcgcggagagtgtgcaccacggccggaggtgtgccagtgactaggcccccggatgattcaacctccgctccgcgtgatcttgtgctctcggaaccctcttcgcagtccctgcgggtccagtggactgcagcatcaggcccagtcactggttacaaggtccaatacactcctcttactggactgggccaaccactcccttccgagagacaagaggtgaacgtgcctgcgggagaaaccagcgtgcggctgcggggacttaggccactgaccgaataccaggtgaccgtgatcgcactttacgccaactcgatcggcgaagctgtgtcggggaccgcacgcaccactgcacttgaagggcctgagcttaccatccaaaacaccacggcacattccctcctggtggcctggcgctccgttcctggagcaaccggttacagagtgacttggcgcgtgctgagcgggggaccaacgcaacagcaagaactcggaccagggcaaggatcggtgcttctgcgagacttggagcctggaactgattacgaagtgaccgtctcaaccctgttcggtcgtagcgttggtcccgcgacctccctgatggctagaaccgatgccagtgtggaacagaccttgaggccggtcatccttggaccgacttctatccttctttcttggaacctggtcccagaagcacgtggataccgattggaatggcgccgcgaaaccggacttgaaccaccacagaaggtggtcctgccctcagacgtgacgagataccagctggacgggctccagcctggaaccgaataccgtctgactctgtacactcttttggaaggccacgaagtggcaaccccagcaacggtggtcccaactggtccagaactgcctgtgtccccagtcaccgacctgcaagcaactgaacttccaggtcaacgtgtcagagtgtcgtggagccccgtcccgggtgcaactcagtacaggattatagtgcgttccactcaaggcgtggagagaaccttggtgttgcccggatcacaaaccgcattcgacctcgatgatgtacaggcagggctttcgtacaccgtgcgtgtgtcggcgagagtcggaccacgtgaagggtccgcgtccgtgctgactgtgcgcagagaacctgaaacgccccttgccgtgcctggtcttagagttgtcgtgtcggatgccacccgagtgagagtcgcatggggccctgtgccaggagcgtccggattccgtataagctggtcgactgggtctgggcccgagtcctcccagactctgcctccagattcgaccgcgaccgacataaccgggctgcagccgggaaccacttaccaggtcgcagtgagcgtgctgcggggaagggaagaaggcccagctgcggtgatcgtggccaggaccgatcctctgggacccgtgcgcaccgtgcatgtgacccaggcctcaagctcctcagttacgattacttggaccagagtccctggcgccacgggatacagggtgtcgtggcatagcgcacacgggcctgaaaagtcgcagctcgttagcggcgaagcaaccgtggccgagcttgatggcctggaacctgatactgaatatacggtccatgtgagagcacatgtcgcaggagtggatggacctccagcttctgtcgttgtaagaaccgctccagagccggtgggtagggtcagcaggctgcagattcttaacgctagctccgacgtcctccggattacctgggtcggggtgactggtgcaaccgcctacagactcgcatggggtcgctcagaaggagggcctatgcgtcatcaaattctccctggtaacactgattcagcagagattcgcggacttgaaggtggggtttcgtactcggtgcgggtgaccgcactggtcggcgatcgcgagggtactcctgtgagcattgtcgtcaccaccccaccagaagcgcctcctgcacttgggactcttcacgtggtgcagcgaggggaacactcactcagacttcgatgggagccagtccccagagcacaggggttcttgcttcattggcagccagagggtggacaagaacagtcgcgagtgcttggccccgaattgtctagctaccacctcgatggactcgagccagccactcaataccgtgtgagactgtcggtcctggggccagcaggagagggaccgtccgcggaagtgaccgcaaggaccgagtcccctcgggtgccatctattgaactgcgggtggtggacacttccattgattcggtgactctggcatggactccggtgtccagggccagcagctacattctttcgtggcggcccctgcggggacctggacaagaggtgccgggtagccctcaaactcttccgggaatctcgtcgtcccaaagagtcaccggcctggagccaggagtgtcatacatctttagccttactcctgttcttgacggcgtccgagggcccgaggcgtccgtcactcagacccccgtctgtcctcggggtcttgcagatgtggtgtttctgccacatgccacccaggataatgcccaccgcgccgaagccactcgcagggtcctggagcggctggtgcttgcactgggtccactcgggccacaggccgtgcaagtgggactgctgtcatattcgcatcgcccttcccctctcttcccacttaacggttcacacgatttggggatcatccttcagcgaattagggatatgccatacatggatccgtcaggtaacaatctgggtacggcagtggtgacggcccataggtacatgctcgcacctgatgccccagggagacgacagcacgtgcccggtgtgatggtcctgctcgtggacgaaccgctccggggagatatctttagtccaattagggaagcccaagcatccggtcttaacgtggtaatgcttggcatggcaggtgcagatcctgagcaactgcggcggctcgcacccggtatggattcggtgcagaccttcttcgcggtcgacgacggtccatcgctcgatcaagcagtgtccgggctcgcgaccgcactttgccaagcatcgtttaccacccaaccaaggcctgaaccttgtccggtttactgccctaagggacaaaagggtgaaccgggagaaatggggcttcggggtcaagtgggcccgccaggtgatcccgggctgccaggtcggaccggtgcaccaggtccccagggaccccccgggtcagcgacggcaaaaggagagagggggtttcctggcgccgacggtaggccaggtagcccggggcgtgcaggtaacccaggaactcccggagcccctggccttaaggggtcgccaggccttccaggtcctcgcggtgatcctggggagcgcggtccgcgcggtcctaagggggagccaggagcaccaggacaggtgattggcggtgaaggccccggacttcccggtcgaaagggcgatccaggccccagcggccctccagggcctagaggtccgctgggtgacccaggccctcgcggccccccgggacttcccggcaccgccatgaagggagataaaggagatcgtggggaacgtggaccaccaggaccgggagagggaggtattgcaccaggggaacctggactgccaggactccctggatcgccagggccccaagggccagtgggtccccctgggaagaagggggaaaagggtgactcagaggatggtgcaccgggactgcctggacaacctggttcgcccggagaacaaggaccgagagggccgcctggcgcgattggccctaagggtgaccgagggtttccaggacctctgggtgaagctggcgagaagggcgaacgaggtcctcctgggcctgcgggcagccgcggtctgcccggtgtcgctggacgccccggtgctaaaggaccagaaggccctccagggccgactgggcggcagggagaaaagggagaacctgggcggccaggggatcctgcagtggtgggaccagcagtcgctggtccaaaaggcgagaaaggcgatgtgggtcctgcaggtcctcggggagcaactggcgtccagggtgaacgcggtcccccgggacttgtgctcccaggtgaccctggacctaagggagatcccggagacagaggccctataggactcactggcagggccggccccccaggagatagtgggccacctggagaaaaaggcgaccctggacggccagggccgccgggccctgtcggacctcgcggacgggatggagaagtcggcgaaaaaggagatgaaggacctcctggcgatccgggcctgccaggtaaggcaggggaacgtgggcttcgcggagcccctggtgtcaggggtcctgtaggcgagaagggggatcaaggggacccgggcgaggacggacggaatggatccccaggttcgtcaggtcccaagggggacaggggggagccgggtccgcctggtccgccaggaagattggtggataccggacctggggcgcgtgagaagggcgagccaggcgacagaggtcaggagggacctcgcggacctaaaggcgacccaggactgcctggagcacccggagaaagaggcatagaaggtttccgaggaccaccgggccctcagggtgatccaggggttcgcggacctgcaggagaaaaaggcgatagaggccctccggggctggacggtcgctccggtctggatggaaagccgggagcagccggcccctccggacccaatggagccgccggcaaggccggagatcctggccgagatggcctcccaggactgcgcggagaacaaggactcccaggaccttccggaccacctgggctccctggcaagcctggagaggacggaaaacctggactgaatgggaagaatggtgagccaggggatccaggagaagatggaagaaagggcgaaaaaggggactctggagcatccggaagggaaggccgcgatggccccaaaggtgaacggggtgcaccaggaattcttggacctcagggtccccccggactgccgggtcctgtaggccctccaggtcagggatttccgggtgtccctggagggaccgggccaaagggcgataggggagaaactggttcaaagggagagcaaggactccctggtgaacgaggattgcgtggcgagccgggatccgtgccaaacgtcgatagactcctggaaacggccggaattaaggcatcggcgcttagggagatcgtggaaacgtgggatgagtcgtccggcagcttcctgccagtgcctgaacgccgacgtggtccaaagggtgactctggggaacaaggtcctcctggaaaagaaggtccaatcggttttcctggagaacggggactgaagggtgatcgcggagatcccggtccccagggacctccaggactggcgctcggagagagaggaccaccaggaccctcgggactggctggggagcccggaaaacctggaattcccggccttccgggacgcgccggaggcgtgggggaagcaggacgaccgggtgaacgcggcgaacggggagaaaagggtgaaaggggggagcaaggaagggatggaccgcctggccttccaggaactccgggccctcctggtcctcctgggcccaaggtgtcagtggatgaacctggccctggtctgagcggagagcagggaccgcccggactgaagggggccaagggtgaaccagggtccaacggcgatcaaggaccgaaaggggatagaggtgtgcccggtattaagggcgatagaggtgagccaggtcccagaggacaagacgggaaccccggtttgcctggagaacgaggaatggcagggcctgagggaaagccaggtttgcaaggtccaagaggtccgcctggtccagtgggcggtcatggcgacccaggtccacctggagcccctggactcgcagggccagccggccctcaagggccctcgggcctgaagggagagccaggcgaaaccggacctccggggagaggtctgactggtcctaccggagccgtcggacttcctgggccccctgggccatcgggattggtcggcccgcaagggagtccagggttgccgggacaagttggggaaaccggcaaaccaggcgcacccggcagagacggtgcctcggggaaggacggagatcgcggtagtccgggcgtgcccggtagtcctgggcttcccggcccagtcggaccaaaaggcgaacccgggcctactggtgcccctgggcaagcagtcgttggacttcccggagccaagggagagaagggagcgcccggcgggctcgctggtgatctggtgggagaacccggcgcgaaaggcgatagaggactgcccggtccacggggtgaaaaaggtgaggcaggacgggcgggagaaccaggtgacccaggtgaagatggacagaagggcgctcctggtcccaaaggctttaagggtgatcccggtgtgggagtcccaggatccccaggcccccctgggcccccaggtgtgaaaggtgatctcggcctccccggacttcctggcgcgcccggtgtggttggatttcctggacagactggaccgcggggcgagatgggacagcccgggccttcaggggagcggggtctggccggtcctccgggacgagagggtattcctggaccccttggtccacctggaccccctggatccgtaggacccccaggggcttcgggtctgaaaggggataagggtgatccgggagttggactcccggggcctaggggcgagcgcggtgagcctggaatcagaggtgaagatgggaggccaggtcaagaaggtccgagaggcttgactggcccgcctggttcacggggcgaacgtggtgagaagggcgacgtcggcagcgctggcttgaagggtgataagggcgactcagcagtgattcttggcccgcctggccctagaggagccaagggagatatgggagagagaggtccacgcggcctcgatggtgacaagggaccaagaggagacaatggggaccctggagacaaaggcagcaagggcgaacccggagataaagggtccgcaggcttgccaggcctgagaggactcctgggccctcagggacagcccggtgcagcaggaataccaggcgatcctggcagccccggtaaagatggggtgcccggaatcagaggggaaaaaggtgatgtgggattcatgggaccacgcggacttaaaggggaaagaggtgtgaagggagcatgtggcctcgacggggagaagggagacaagggcgaggcaggacctccgggtcgccctggactcgcgggtcacaagggtgaaatgggggaaccaggagtccctggacagtccggagccccagggaaggaagggctcattggtcctaagggtgaccggggatttgacggacaacctggacctaagggtgaccagggtgagaagggtgagcggggtactcctgggataggtggatttcctgggccaagcgggaacgacgggtcagcggggccaccaggaccaccggggtcggtgggacccagaggccctgaaggtttgcaaggacaaaagggggaacggggacctcctggcgagcgggtcgtgggggcccccggtgtgcccggtgcgcctggcgaaaggggtgaacaaggacgtcctggaccggccggcccgagaggcgaaaagggggaagccgcactcaccgaagatgacatcagaggatttgtcaggcaagagatgtcccaacattgtgcatgtcaagggcagttcatcgctagcggtagccgccctcttccgtcatatgcagcagacaccgcagggagccagcttcatgcggtgcctgtccttagagtctcgcacgcagaagaagaggaacgtgtgccaccagaggacgacgagtactcggaatactcagagtacagcgtggaagaataccaagatcctgaggctccttgggattcagatgacccctgctcccttcccctggatgaaggatcgtgcactgcatatactctcagatggtaccatagagctgtgaccggatcaactgaagcatgccatccgtttgtgtacggcggatgtggcggaaatgcaaatcgattcggaacgagggaggcttgtgaaaggcgctgtccaccgagagttgtgcaatcgcaaggaaccggtacggcacaggac

SEQ ID NO: 9618 - DNA, 8832 bp, synthetic construct
  misc_feature 1..8832: note = source = /note="Description of Artificial Sequence: Synthetic coding sequence"
  source 1..8832: mol_type = other DNA
atgacactgcgtttgttggtcgccgcactctgtgccggcatcctagcggaggccccacgtgtgcgggcccagcatcgggagcgcgtaacatgtacacggctttacgctgccgacattgtgttccttttggatgggtcgagttctatcggtcggagtaacttccgtgaagtgagatcttttctggaggggctggtgctgcctttttcaggagccgcctctgctcagggagttagatttgccaccgtgcagtactcggatgaccccaggaccgaatttggattggatgctctgggtagcggaggcgacgtgataagggctatacgcgagctgtcctataagggcggcaacactcgtacaggcgcagcgatacttcatgtggcagaccacgtgtttctgccgcaactcgcccgtcccggagtgcccaaagtatgcatcctgataaccgacgggaagtctcaggatctcgtggataccgctgctcagcgtcttaaaggacagggggtcaaacttttcgctgtgggcataaaaaacgccgaccccgaggaactcaaaagagtcgcatcccagcccacctcagacttctttttttttgttaacgatttcagtatcctgaggaccctcttgccactcgtgtctagacgggtgtgcacaacagcaggcggtgtgccagttacccgccctcccgatgactccacctctgccccccgagatctggtactgagcgagccctcttcacaatctctgagagtacagtggactgccgccagtgggcccgtgactgggtataaggtgcagtacactcccctgactggcctcggtcagccactgccttcagagaggcaggaagtcaacgttcctgctggcgagacatcagtgcggctacgtggtctgagaccactgactgaataccaagtcacagtgatagctctgtatgccaacagtatcggggaagccgtttctgggactgcccgaacaacagcactcgaaggacccgagcttacgattcagaacactaccgcgcattctttgttggttgcctggagatctgtgcctggggccacaggctaccgggtaacatggagggtcctctccgggggtccgactcaacagcaggaacttggccccggccaggggtccgttctactccgggacctcgaaccaggtaccgactacgaggttacagtcagcaccctctttgggaggagcgtcggtccggctaccagtctcatggctcgaacagacgcttcagtcgagcagacactgagacccgttatcctaggaccaacttcaatactcctgtcctggaatttggtcccggaggcccggggctaccggctcgagtggcgtagggagacaggactggaacctccccagaaagtcgtgcttccatctgacgtaacccgctatcagctggatggtcttcagcccggcaccgagtatagacttaccttatacactcttctcgagggacatgaggtggcaactcccgccacagttgtgcctactgggcctgagttgcctgtgagtcctgttacggacctccaagccactgagctccctgggcagcgggttcgcgttagttggagccccgtgccgggggctacccagtaccgcatcatcgttaggtcgacccagggggtggaacgcaccttggttttgccaggaagccaaaccgcttttgacctggacgacgttcaagcgggactttcttatactgtgagggtgagcgcgagggttggaccacgggagggctcggcatccgtgcttaccgtccgcagggagcctgaaacccccctggccgttcctggtctccgggtcgtggtgagtgatgcaacacgggttagggtcgcatggggtccagtgcctggcgctagcgggtttcgaatctcttggagcaccggctcaggacctgagagcagccagacattgccacccgacagtactgccacggacatcacagggctgcaaccaggaacaacataccaagtcgctgtgagtgtgcttagggggagggaagaaggacctgccgcagtcatcgttgcccggacagatcctcttggccctgttcgcaccgtccacgtgactcaagcatccagttcttctgtaaccatcacttggacacgtgtgcctggggctacgggttaccgtgtttcctggcactctgcgcatggccccgagaagtcgcaactggtctcaggggaggctacagttgccgaactggatggcctggagccagataccgagtataccgtacatgtgcgtgcacacgtggctggggttgatgggcctcctgcttctgttgtcgtgcgcaccgctcccgaacctgtgggccgggttagccggctccagattctcaatgccagcagtgatgtacttcgaattacttgggtgggcgtcacaggggcaaccgcatacagattagcatggggacggtccgaggggggacccatgaggcaccagatcttgccaggcaacacagacagtgcagaaatccgggggcttgaggggggagtgtcttacagtgtacgagttaccgcactcgtcggagatagggagggcacccctgtttctatcgtggttactacgccgccagaggctcctcctgcacttggaactttgcacgttgtacagcgcggagagcactctttgagactccgttgggagccagttccgcgcgcacagggctttctgctccactggcagcctgagggcggacaggaacaaagccgggtgttgggccccgagctgagttcctaccacttggatgggctggaacctgctacccagtatcgcgtccggctgtcagtattagggcctgcgggcgaaggcccaagcgccgaggtcacagcccgcaccgagtctccccgagtccccagcattgaactgagggtggtcgacacttcgatcgattccgtgactttggcttggactcccgtgagtcgagccagcagttatatattgtcatggcgacccctccggggtcccggccaggaggtgcccgggtctcctcagacactgccaggcatctccagcagccagagagtgacgggcttggagcccggggtgagctacatcttctctctgacccccgtgcttgatggtgtgcgtggaccagaggcctcagtcacccagaccccagtctgccctcgagggctcgcagatgtcgtttttctcccgcacgcgactcaggacaatgctcatcgcgctgaagctaccagacgcgtgttggagaggctggtgctggccctcggcccattggggccccaggcagtccaggtgggactgctgagttattcacaccgcccatctcctttatttccattgaatgggtcccatgatctaggcataatattgcagcggatcagggacatgccctacatggatccatctgggaataacttgggaacagcggtggtgaccgcccatcggtatatgctggcccccgacgccccaggccgacgccagcacgtgcccggggttatggttctcctcgttgacgaaccattacgcggtgatattttctcacccataagagaggcacaagcttccggactcaatgtggtcatgcttggcatggcgggggctgaccccgagcagctgcgacgcctcgcccccggcatggattccgtccagaccttcttcgcggtcgatgacggtcccagcctcgatcaagccgtttcgggcctagcaacagccctttgtcaggcaagcttcactactcagccgcggcctgaaccgtgtccagtctactgtcctaaaggtcagaaaggggaacctggtgagatgggccttagagggcaagttgggccacccggcgatcctgggctgcctggtagaactggtgcccccggcccacagggcccacccggatcagcaaccgctaagggcgaaaggggcttcccgggcgctgacggccgccccggctctcccgggcgagccggcaacccgggcaccccaggtgctccaggcttgaagggcagcccaggcctccctggcccgcggggggatccgggggaaaggggtcctcgggggccaaagggtgaacccggagcgcccggccaggtgattggcggtgaaggtcccgggctccctggccggaagggagatcctgggccaagtggtcccccaggtccacgcggtcctctgggtgaccccggcccacggggacctcccggtctgcctgggaccgccatgaaaggtgacaaaggagaccggggcgagaggggcccgccagggcctggggaaggaggtattgccccaggtgagcctggtctccccggcttgcccggttctcctggccctcagggaccagtgggccctccaggcaagaaaggcgagaaaggcgatagtgaggacggcgcccccggcctccccggacagcctggctctccaggagagcaaggaccacgcggccccccaggtgcaattggacctaaaggggatcggggattcccaggtccattgggagaggccggggagaaaggcgaaagaggtcccccaggccccgccgggtcgagggggctccctggggtcgccgggcggccaggggctaaggggccagaaggaccccctggccccactggccgtcagggtgagaagggggaacctggccgcccaggagaccctgcggtggtgggaccagcagtggccgggcccaaaggcgagaagggagacgtggggcccgcgggccccagaggggcgaccggtgttcagggggagaggggacctcctggcctggtgcttcccggcgaccccgggccgaaaggggatcctggcgatcgtggtcccataggactcacaggacgtgctggaccccccggcgattcagggccccccggggagaagggggatcccggccggcccggcccccctgggccagtgggtccaaggggacgggatggggaggtgggagaaaagggtgacgaaggaccgccgggcgaccctgggcttcctggaaaagcaggtgaacgcgggctgaggggagccccgggtgtgcgcggacctgtaggtgagaagggcgaccagggtgaccctggcgaggatggtaggaacggaagccccggctcttcagggcccaaaggtgaccgaggagaacctgggccccctggaccgccgggtcgtctggtagatacaggacccggtgcacgtgagaagggggaacccggcgacagggggcaggaaggaccgcgcggcccaaagggggacccaggcctgcctggagctcccggggagcggggcatcgagggcttccgtggtccacctggcccacagggtgaccccggcgtccgggggccggcaggtgagaaaggtgaccggggtccacctggactcgacgggcgcagcgggctggacggtaaaccaggggcagccgggccctcaggccctaacggtgccgcaggcaaagccggagatcccggtcgtgatggtctccccgggctgcgaggcgaacagggtttgcccgggccttccgggcctccgggcctgcctgggaagccaggagaggatggaaagcccggcctgaacggcaaaaatggggaacccggggaccctggggaagacggcaggaagggcgaaaaaggcgatagcggagcctcaggccgggaaggcagggatggtcccaagggcgaacgaggagcaccagggatactgggacctcagggaccccccgggcttccagggcctgtggggccccccggtcaggggtttcccggcgtcccggggggaacgggtccaaaaggcgacagaggagaaacagggagtaagggcgaacaggggcttcctggagaacggggcctccggggggagcctgggagcgtcccgaacgtggatcgactcctggaaactgccggaattaaggccagcgccctcagggagatagtggaaacttgggacgagtcctctggctcatttctccccgtgcccgagcgacgaagaggccctaaaggggacagcggagaacagggcccccctggtaaagagggcccaattggatttccgggggagaggggtttgaagggtgatcgaggggatcccggtcctcagggaccacccgggctagcgctgggggaaaggggccctccagggcctagcggactggcaggagagcccggcaagccaggcattcccggcctccccggaagagcgggaggggtgggagaggctgggcgccccggggagcgaggcgaacggggcgaaaaaggcgagcggggcgagcagggccgagatggaccccctggcctgcctggcaccccaggtccccctggtccccccggacccaaagtgtccgtcgatgaaccggggccagggctgtctggggaacaggggccaccaggcttgaagggcgctaaaggcgagccaggaagcaatggcgatcagggccctaagggcgatcgaggcgttccgggaattaagggcgaccggggtgagccaggacctcgaggtcaggatgggaatcccggtctacctggcgaaagaggcatggctgggcccgagggtaagcctggtctgcagggccctagaggaccccccggtcctgttggaggacacggcgatcctggcccacctggggctccaggcctggctggccctgcgggtcctcaagggccatctggcttgaaaggagaacccggcgaaaccggcccgcccgggagaggcctgacagggccaaccggggccgtcggacttcccggtccgcctgggccctccggactcgtggggccccaggggagtcccggactccccggtcaggtgggcgaaacaggtaaaccaggcgcccctggacgggatggcgccagcgggaaggatggggatcgaggctccccgggcgtgcctggctctccgggtttacctggccccgttggtcccaaaggcgagccgggccccaccggagctccggggcaggcagtggtcgggctcccaggcgcaaaaggcgaaaagggggccccaggggggctcgccggagacctggttggggagccgggcgcaaaaggcgacaggggcctgccaggccccaggggtgagaagggggaggctgggagagcaggcgagcccggggaccctggggaggacggacaaaagggtgcccccggacctaaagggttcaaaggcgaccccggtgtgggcgttcccggctccccaggaccacctggaccccctggcgttaagggggacctcggccttccgggactccccggggcaccgggggtggtgggtttcccaggccagactggcccgcgcggagaaatgggccaaccaggcccctctggagaaaggggcctggctggacccccagggagagagggcatccccggtcctctcgggcctcccgggcctcctggctccgtgggccccccaggcgccagtggcctgaaaggagataaaggtgatcctggagtggggctaccaggccccagaggtgagaggggtgagccgggcatccgtggcgaagatggaaggcctggacaagagggccctagaggcctgactgggccccctggctctcgaggggagcgcggggaaaagggcgatgtcggaagcgctggcctgaaaggcgataagggcgattccgctgtgatccttggcccacccggcccacgtggagcgaaaggagacatgggcgaacgaggcccaagagggttagacggtgacaagggcccacggggggacaacggcgatcccggcgacaaaggcagtaagggagaacctggcgacaaaggctcggctgggctacccgggctgcggggactgctgggtcctcaggggcagccaggggcggcaggcatcccaggcgatcctgggtctcctggtaaagacggagttcctggcattcgcggggaaaaaggtgatgtagggtttatgggcccccgggggctcaagggagaaaggggcgttaagggcgcatgcggcctggacggagagaagggtgacaaaggcgaagcaggaccaccaggacggcctgggctggccggtcataagggtgaaatgggggagcctggagttccaggccagtccggcgccccagggaaagaaggtctcatcgggccaaaaggggaccgggggtttgatggccagccaggtcccaaaggcgatcagggcgaaaagggggaaaggggcaccccggggatcggtggatttcccggacctagtggcaacgatgggtccgccgggccccccggcccccccggctctgtgggcccccgcggcccggagggtcttcagggtcagaaaggcgagagaggtcctccgggggaacgagtggtcggagcgcccggcgttcccggcgcaccgggtgaacgcggtgaacagggacggcccgggcccgccgggccccgcggcgagaagggggaggcggcactaactgaggacgacattcggggcttcgtgcgccaggagatgtcccaacattgcgcctgccagggccagttcatcgccagtgggtcgcgacccctgccctcttacgctgcagatacagcagggagtcagctgcacgcggtgccagtgctgagggtgagccatgcagaagaggaggagagagtgccccccgaagacgatgagtactcggagtattccgaatattcagttgaggagtatcaggatcctgaagctccatgggactctgatgacccttgcagtctgcccctggacgagggaagctgtactgcctacacccttaggtggtatcaccgcgccgtgactggatccacagaggcatgtcatccctttgtctatggcggatgcggcggcaatgcaaatcggttcgggacacgagaggcttgcgaacggaggtgtcccccaagagtggtgcagtcacagggaacaggcacagcccaggac

SEQ ID NO: 9619 - DNA, 8832 bp, synthetic construct
  misc_feature 1..8832: note = source = /note="Description of Artificial Sequence: Synthetic coding sequence"
  source 1..8832: mol_type = other DNA
atgactttaagattattagttgccgcactatgtgcaggaattttagctgaagctccaagagttagagcacaacatagagaacgtgttacatgtacaaggctttatgcagctgacattgtttttcttcttgatggatcctcatctattggaagatcaaatttccgtgaagtacgtagttttttagaaggattagttttacctttttcaggtgcagcatctgcacaaggagttcgatttgctacagttcaatatagtgatgatccaagaacagaattcggtcttgatgcattaggatctggaggtgacgttattagagctattagagaacttagttataaaggaggaaatactagaactggagcagctattttacatgttgcagatcatgtatttttgccacaattagcaagaccaggagttccaaaagtttgtattttaattactgacggaaaatcacaagatttggttgatactgcagcacaacgactcaaaggacaaggtgtaaaattatttgcagttggtattaaaaacgctgatccagaagaacttaagcgtgtagcttctcaacctacttcagatttttttttttttgtaaatgatttttcaattttaaggacattacttccattagtatcaagacgagtttgtacaactgctggaggtgttccagtcactagaccaccagatgattcaacatcagctccaagagatttagtattatctgaaccatcatcacaatcattgagagttcaatggacagcagcttcaggaccagtaactggatataaggttcaatatactccacttactggattgggtcaaccattaccatcagagagacaagaagttaatgtaccagctggagaaacatcagttaggttgagaggattaagaccacttactgaatatcaagtaactgttattgcattatatgctaattcaattggagaggcagtcagtggaactgcacgaacaactgcacttgaaggaccagaattaacaatacaaaatactacagcacattctttattagtagcttggagatccgttccaggagcaacaggatatagagttacttggagagttttatcaggaggaccaactcaacaacaagaattaggaccaggacaaggatctgttcttcttcgagatttagaaccaggaactgattatgaagttactgtttctactttatttggaagaagtgttggtccagcaacatctttgatggcaagaaccgatgcttctgttgaacaaacattaagaccagttattttaggacctacatcaattcttttatcatggaatttagttccagaagctagaggttatagattagaatggagacgtgaaacgggattggaaccacctcaaaaagtagttttaccttcggatgttacaagataccaattagatggtttacaaccagggactgaatacagattgactttgtatacgctattagaaggacatgaagttgcaacaccagctactgttgttccaactggacctgaattaccagtaagtccagtaactgatttacaagctactgaattaccaggacaaagagtaagagtttcttggtcaccagttccaggtgcaactcaatatagaattattgttagatcaactcaaggagttgagagaactcttgtattacctggatctcaaactgcttttgatttagatgatgttcaagctggactttcatatacagtacgagtaagtgcacgtgttggaccacgtgagggatctgcttctgtcttaaccgttaggcgtgaacctgagacaccattagcagttccaggattaagagtagtagtaagtgatgctacaagagttagagtagcatggggtccagttccaggagcttcaggatttagaatttcatggtctacaggatcaggtccagaaagttctcaaactttaccaccagattcaacagcaaccgacatcactggacttcaaccaggaacaacatatcaagtagctgtttctgttttaagaggacgagaggaaggtccagctgcagttattgttgcaagaacagatccattaggacctgttagaacagtgcatgttactcaagcatcttcatcaagtgtaactataacatggacaagagttccaggagctacaggataccgagtaagttggcattcagctcatggtcctgaaaaatctcaacttgtttccggagaagctacagttgctgaactagatggtcttgaaccagatacagaatatacagttcatgttcgtgctcatgtagctggagttgatggaccacctgcatctgtagttgttagaacagctccagaaccagttggaagagtttcaagattacaaattttaaatgcttcatcagatgttttacgtattacatgggtaggagtcaccggtgcaactgcatatagattagcttggggtagatctgaaggtggaccaatgagacatcaaattcttccaggaaatacagacagtgctgaaattagaggattagaaggtggagttagttatagtgtaagagttactgctttagttggtgatagagaaggaactccagtttcaatagtagttactacaccaccagaagcacctccagctctagggacattgcatgttgttcaaagaggagaacattcattacgtctaagatgggaaccagttccaagagctcaaggttttttacttcattggcaaccagaaggaggtcaagaacaatcaagagtgcttggaccagaattatcttcttaccacttagatggacttgagccagctacacaatacagagtaagattaagtgttcttggtccagcaggagaaggaccaagtgctgaagttacagctagaactgaatctccaagagtaccatctattgaattgagagttgttgatacatctatagatagtgtaacattagcatggactccagtttcaagagctagttcatatattttaagttggagaccattaagaggaccaggacaggaagtaccaggatctccacaaacattaccaggaatttcaagtagtcaaagagttacaggacttgaacctggagtatcttatatattttcattgactccagttttagatggagtcagaggtccagaagcatcagtaacacaaacgcctgtttgtccaagaggattagctgatgttgtatttttgccacatgcaactcaagataatgctcatagagcagaagctactcgtagagttttagaaagattagttcttgctttaggaccactaggtccacaagcagtacaagtaggtttattatcttattcacatagaccaagtccattatttcctcttaatggatctcatgaccttggaattattttacaacgtataagagatatgccatatatggatccatcaggaaataatcttggaacagcagttgttacagcacatagatatatgcttgctccagatgctccaggaagaaggcaacatgttccaggagttatggttttacttgttgatgaaccattaagaggtgatattttttcaccaatcagagaagcacaagcttctggattaaatgtcgttatgttaggtatggcaggtgctgatccagaacaacttagaagattagctccaggaatggatagtgttcaaacttttttcgctgttgatgatggtccttcacttgatcaggcagttagtggtttagctacagcactttgtcaagcatcttttacaactcaaccacgtccagaaccatgtcctgtttactgtccaaaaggacaaaagggagaacctggagaaatgggactacgaggacaagttggaccaccaggagatcctggtcttccaggaagaactggtgctccaggaccacaaggacctcctggttcagctacagcaaaaggagaaagaggttttccaggagcagatggacgtccaggatctccaggaagagctggaaatccaggaacacctggagctccaggattaaagggatctccaggacttccagggccaagaggagatccaggagaaagagggccacgtggaccaaaaggtgagccaggagcacctgggcaggttataggaggtgaaggacctggacttccaggaagaaaaggggatccaggaccatcaggacctcctggacctagaggtcctcttggagatccaggtcctagaggtccaccaggattaccaggaactgcaatgaagggagataaaggagatagaggagaaagaggaccacctggaccaggagaaggtggaatcgcacctggagaacctggattaccaggacttccaggatcaccaggtccacaaggacctgtaggtccacctggaaaaaaaggagaaaaaggtgattcagaagatggagcacctggtttgccaggtcaaccaggatcaccaggagaacaaggtccacgtggaccaccaggagctattgggcctaaaggtgatcgaggattccctggaccacttggagaagctggggaaaaaggagaacgtggaccaccaggaccagctggttcaagaggacttcctggtgtagctggtagaccaggagcaaaaggaccagaaggacctccaggaccaacaggaagacaaggagaaaagggagaacctggaagaccaggagacccagcagtagttggtccagcagtagctggtccaaaaggtgaaaagggagatgtcggaccagctggaccacgtggagctacaggagttcaaggagaaagaggaccaccaggattggttcttcctggagatcctggtccaaaaggagatcctggagatagaggtcctattggattaactggaagagcaggaccaccaggtgactctggaccaccaggtgaaaaaggagatccaggaagaccaggaccaccaggtccagttggaccaagaggaagggacggagaagttggagaaaaaggtgatgaaggtccacctggagatccaggattaccaggtaaagcaggtgaaagagggttaagaggagcaccaggagttagaggaccagttggagaaaaaggtgatcaaggagatccaggagaagatggaagaaatggatcaccaggaagttcaggaccaaaaggtgatagaggagaaccaggaccaccaggacctccaggaagacttgttgatactggaccaggtgctagagaaaaaggagaaccaggagacagaggacaagagggtccaagaggtccaaaaggagatccaggattaccaggagctccaggagaaagaggtattgaaggatttagaggaccaccaggacctcagggtgacccaggtgtaagaggtccagccggagaaaaaggagatagaggacctccaggattagatggaagaagtggtttagatggaaaacctggtgcagctggaccttcaggaccaaatggagctgctgggaaagcaggggacccagggagagatggattaccaggtttaagaggagaacaaggtcttccaggaccatctggtcctccaggtcttccaggaaagcctggtgaagacggaaaaccaggattaaacggaaaaaatggagaaccaggagatccaggagaagatggtagaaaaggtgaaaaaggtgattcaggagcatcaggtagagaaggaagagacggtcctaagggagaaaggggggcacctggtattttaggaccacaaggaccaccaggacttccaggaccagttggacctccaggacaaggtttcccaggtgtaccaggaggaacaggaccaaaaggagatagaggagaaactggttcaaaaggagaacaaggattaccaggtgagagaggtcttagaggggaaccaggatctgttccaaatgtagatagattattagaaacagcaggaattaaagcaagcgcattgagagaaattgttgaaacatgggatgaaagttcaggaagtttccttccagttccagaaagaagaagaggaccaaaaggagattcaggagaacaagggcctccaggaaaggaaggacctattggttttcctggagaaagaggacttaaaggggatagaggagatccaggtcctcaaggaccaccaggattagcacttggagaaagaggaccaccaggtccatcaggtttagcaggagaaccaggaaaacctggaattccaggattaccaggaagagctggtggtgtaggagaagcaggaagacctggtgaaagaggagaaagaggagaaaaaggagaaagaggagaacaaggaagagatggtccaccaggtttaccaggaactccaggtccaccaggacctccaggaccaaaagtatcagtagatgaaccagggcctggactttcaggtgaacaggggccaccaggattgaaaggagctaagggtgaaccaggatctaatggtgatcaaggaccaaagggtgatagaggagtcccaggtattaaaggagatagaggtgaaccaggtccaagaggacaagatggaaatcctgggcttccaggtgaacgagggatggctggaccagagggtaaaccaggattacaaggaccaagaggtcctccaggaccagttggaggacatggtgacccaggaccaccaggagctcctggtttagcaggaccagcaggtcctcaaggtcctagtggacttaaaggagaaccaggagaaactggaccacctggtagagggttgactggacctactggagcagtgggtcttccaggaccaccaggtccatcaggattagttggaccacaaggttcaccaggtttaccaggacaggtgggagaaacaggaaaaccaggagctccaggtagagatggagcatcaggaaaagatggtgatagaggatctcctggagttccaggttcaccaggacttcctggaccagttgggccaaaaggtgaaccaggacctactggtgctccaggtcaagcagttgttggattaccaggagctaagggagaaaaaggagcaccaggaggacttgcaggagacttagttggagaaccaggtgctaaaggagatagaggtttacctggacctcgtggagaaaaaggagaagctggaagagcaggagaaccaggtgatccaggagaggatggacaaaaaggggcaccaggaccaaaaggttttaaaggagatccaggtgttggtgttcctggatcaccaggaccaccaggaccaccaggagttaaaggagacttaggtcttccaggtttaccaggagcaccaggagttgttggatttccagggcaaacaggaccaagaggtgaaatgggacaaccaggaccttcaggtgaaagaggtcttgcaggaccaccaggaagagaaggtataccaggaccattaggtccaccaggaccaccaggatctgttggtccacctggagcttctggattaaaaggtgataaaggtgatccaggagtgggacttccaggaccaaggggagagagaggagaacctggaataagaggagaagatggaagaccaggtcaagaaggaccaagaggacttacaggaccaccaggaagtagaggtgaaagaggtgaaaaaggtgatgttggttcagcaggtcttaaaggagataaaggagattcagctgttatattaggtccaccaggaccaagaggtgcaaagggtgatatgggtgaaagaggaccaagaggattggatggagataaaggaccaaggggagataatggtgatccaggggataaaggttctaaaggtgagcctggagataaaggatctgctggattacctggtttaagaggtttgttaggaccacaaggacaacctggagcagcaggtataccaggtgatccaggtagtccaggtaaagatggtgttcctggaattagaggagaaaagggtgatgttggttttatgggaccacgaggtttaaagggagaaagaggagtaaaaggagcttgtggattagacggagaaaaaggtgataaaggagaagctggtccaccaggaagaccaggtttagcagggcataaaggagaaatgggagaacctggagttccaggtcaaagtggagcaccaggtaaagaaggattaattgggccaaaaggggatcgtggttttgacggacaaccaggaccaaaaggagatcaaggagaaaaaggtgaaagaggaacaccaggaataggaggattcccaggtccatcaggaaatgatggatcagctggaccacctggtccacctggatctgttggtccaagaggaccagaaggattacaaggacaaaaaggagaacgtggaccaccaggagaaagagttgttggtgctccaggagttccaggtgctccaggtgaaagaggggaacaaggaagaccaggtccagctggacctcgaggagaaaaaggagaagctgctctaacagaagatgatattagagggttcgtgcgtcaagaaatgtcacaacattgtgcttgtcagggacaatttattgcatcaggaagcagaccacttccaagttatgcagcagatactgctggtagtcaacttcatgcagtaccagtacttagagtttcccatgctgaagaagaagagagagttccaccagaagatgatgaatattcagaatatagtgaatattcagtagaagaataccaagatccagaagctccatgggatagtgatgatccatgtagtttaccattagacgaaggatcatgtactgcttatacattaagatggtatcacagagccgttacaggatcaacagaagcatgccatccatttgtatatggaggttgcgggggtaacgctaatagatttggaacacgagaagcttgtgaaagacgttgtccacctcgagtggtacagtctcaaggaacaggaaccgcacaagat

SEQ ID NO: 9620 - DNA, 8832 bp, synthetic construct
  misc_feature 1..8832: note = source = /note="Description of Artificial Sequence: Synthetic coding sequence"
  source 1..8832: mol_type = other DNA
atgaccctgaggttgcttgtggcagccctgtgtgcaggaattctcgcagaggctcctagagtgcgtgcgcagcaccgcgaaagagtgacttgcacccgcctttatgcggcggatatagtgttcctgctggatggaagctcatcgatcggaagatcaaactttagggaggtgaggtcctttctggaaggactggtgctcccattttcgggagcagcatccgcacaaggcgtcagatttgcaacggtacaatactccgatgatccaagaaccgaattcggcctcgatgcactgggttcgggtggggatgtcattagagctatcagagagctgtcctacaaggggggaaacaccagaaccggcgcggccattctgcacgtggccgatcacgtgtttttgccgcaacttgccaggcctggggtccctaaggtgtgtatccttatcacggatgggaagtctcaagacctggtcgatacggcagcacaaaggctcaaaggacagggagtgaagttgtttgcagtgggcattaagaatgcagatcccgaagaacttaaaagagtggcatcacagccaacttcggacttctttttctttgtgaacgactttagcatcctgagaaccctcctgcctctcgtgtcgagaagggtctgtaccaccgcgggaggtgtgccggtcacgaggccccccgatgatagtacgagcgcccccagagatctggtcctctcggaaccaagcagccagtccttgcgggtccagtggactgcagcatcgggaccagtcactggatataaggtccaatacaccccgcttaccggacttggtcaacccctgccctcggagcgccaggaggtgaacgtgcctgcaggggaaacttcggtgagactgaggggactccgacctctgaccgagtaccaagtgaccgtcattgcactgtacgctaactcgataggtgaggcagtcagcggaactgcacggaccaccgctctggagggaccagaactcactatacagaatactactgcacattcactcctggtggcctggagatcagtgccaggcgctactgggtacagagtgacgtggcgagtgctttcgggcggtcctacccagcaacaagagttgggcccaggtcagggctcagtgttgttgcgggatcttgaaccaggcactgactacgaagtgaccgtgagcactctcttcggcagatctgtgggaccagcgacttcactgatggcaagaaccgatgcctcggtcgaacagaccctgcgacccgtgatcctgggaccgaccagcattcttctcagctggaaccttgtgccggaagcacgcgggtaccggttggaatggcgccgtgaaaccgggctcgaaccacctcaaaaggtggtgctcccttccgatgtgactcgttaccaactggatggccttcagcctggtacggagtaccgactcaccctttacactcttctggagggacatgaggtcgccactcctgcaaccgtggtgcctacggggcctgaactccccgtgagtccagtgaccgacctgcaagcaactgaactgcctggacaaagagtcagggtgtcctggtcgcctgtgccaggggcaacccagtaccgcataattgtgagaagcactcaaggcgtggagagaaccctggtgcttcctggatcgcagactgcgttcgatctggacgacgttcaggccggactttcatataccgtgcgcgtgtcagccagggtgggccctcgcgagggcagcgcaagcgtgttgaccgtgaggcgcgaacctgaaaccccactggccgtgcccggtctgcgtgtggtcgtgtccgacgcaactagagtgagagtggcttggggaccagtcccaggggcatcaggattcagaatctcgtggagcaccgggtcaggtcctgaaagctcgcagaccctcccacctgattccaccgccaccgatattactggactgcagccaggaactacctaccaggtcgcagtgagcgtccttaggggccgggaagaaggtcctgcagctgtgattgtcgcccgaaccgatccactcggaccggtgagaaccgtgcacgtgacgcaagcctcgtcatcctccgtcaccattacctggacccgtgtgcctggtgcaacgggttaccgagtctcatggcacagcgcacacggtccggagaagagccagctcgtgagcggtgaggccaccgtggcagaacttgatggtctggaaccagatactgaatacacggtccacgtgcgggcacacgtggccggagtggatggccctcctgcgtccgtggtcgtgagaactgcaccagaacccgttgggcgagtcagcagactccaaatacttaatgcatcgtctgatgtgctgcgcatcacctgggtgggagtgaccggtgcaaccgcgtacagattggcatggggacggtccgaaggcggtcccatgcggcatcaaatactgccaggtaataccgattccgcagagattcgggggcttgagggaggggtgtcgtactccgttagagtgactgcgctggtcggagatcgggagggaactccagtgtccatcgtcgtcaccaccccgcctgaagcgcctccagcacttggaaccctccatgtggtgcaacgtggcgaacacagcctccgcctgcgatgggagcctgtccccagagcacaaggttttctgttgcactggcagccagaggggggacaagaacagtcgcgggtgttgggacccgaactgtccagctatcaccttgatggacttgaaccagcaactcaataccgagtcaggctgagcgtgttgggtccagcaggcgaaggaccttcggcagaggtgactgcacgtactgagtcgcctcgtgttccgtcgatagaacttcgcgtcgtggacacctcaattgattcggtgacccttgcttggactcccgtgtcaagggcctcatcgtacatcctgtcctggcgtccgctcaggggacccggtcaagaagtccctgggtcccctcaaacgcttcctgggattagctcgtcccaaagggtcacgggactggaaccaggtgtgtcgtacattttctcgcttacccctgtcctggacggtgtccgaggaccagaggcaagcgtgacccaaaccccagtgtgtcctcggggacttgcggatgtggtttttcttcctcatgccactcaagataatgcgcatcgcgctgaagctacccggcgagtcttggaaaggctggttcttgctttggggcctttgggtccacaggccgtgcaagtgggcctgttgtcgtactcgcacagaccttcaccactgttcccactgaatggttcccatgacctcggcatcatactgcagcggatccgagacatgccgtacatggatcctagcggcaacaatctgggaaccgcagtggtcaccgcccataggtacatgctggcacctgatgcaccagggcgaaggcagcatgtccccggagtcatggtgctgctggtggacgaaccacttcggggagatatctttagccctatcagggaagcacaagcctccggtctgaacgtggtcatgcttggaatggccggagccgatcccgagcaactgagaagattggctcctggaatggactctgtgcagactttctttgcagtggatgatggtccttcccttgaccaggcggtgtcgggactggcaaccgcactttgtcaagcctccttcaccacgcaaccacggccggagccatgccctgtttactgtccaaagggtcagaaaggcgagcccggagaaatggggctgcgcggccaggttggtccaccgggtgaccctggcctcccgggccgaactggtgcacctggaccccagggtccgccaggctccgcaaccgcaaagggtgaaagaggtttccctggtgcagatggcagaccaggatcacctggaagagcaggcaaccctggcactccgggtgcgcccggtctgaaaggatcccctggactgcctggacctcgaggtgatcccggggagagagggcctcgtgggcccaagggagaacctggtgcgcctggacaagtcatcggtggtgaaggacctggactgcctggaagaaagggcgaccccggcccttccggtcctcccgggccccggggtccacttggtgacccaggaccccggggaccaccaggacttcctggtaccgcgatgaaaggagataagggagatcgcggtgagagagggccacctggcccaggagagggcggtattgcccctggagagccaggcctgccaggactgcctggaagcccaggcccgcaaggacccgtgggccctcctggaaagaaaggtgaaaagggagactccgaagatggtgcaccaggacttccaggtcagcccggctcacctggtgaacagggtcctcgtgggccaccgggcgcaattggcccaaagggtgatcgagggtttccaggacccctgggtgaagccggggagaaaggagaaagagggccacctggccccgccggatcaagaggattgccgggcgtggctggtagacctggggccaaaggtcctgaaggaccacctggacccaccggtagacagggcgaaaaaggtgagccaggacggccaggtgaccctgcagtggtggggccagccgtggcaggtccaaaaggggagaagggagacgtgggacccgcggggcctcgcggcgcaactggagtccaaggagaacgtggtcctccggggttggtgcttccaggcgaccccggtcccaagggtgatccaggcgaccgcggaccaattggactgaccggacgcgccggcccccctggtgattccggtccaccaggtgagaaaggtgacccaggccgcccagggccccctggaccagtgggtcctaggggtagagatggagaggtgggtgagaaaggagatgaaggacctcctggtgatccgggactgcctggaaaggcgggtgaaagaggactgagaggcgcaccaggcgtccgcggacccgtcggagaaaagggagatcagggtgatcctggtgaagatggtagaaatggatcccctggaagctccggcccaaagggtgacagaggagagccaggcccacccggcccacccggtcgacttgtggatactggtcccggagcaagagaaaagggagagccaggcgaccgaggccaggaagggcctcgcggtccgaaaggtgacccaggactgccgggagcccccggtgagagaggaattgaaggattcaggggaccccctggtcctcaaggtgacccaggggtgcggggacctgcaggtgagaagggagatcgggggcccccgggactggatggtcggtccggccttgacggaaagcccggcgcagcaggaccgtctgggccaaatggagctgcaggaaaggccggcgacccaggtcgcgatggacttccagggttgaggggagaacagggacttcccggtccttcgggaccccccggtctgccagggaagcctggggaagatggcaagccaggcctcaatgggaagaacggagaacctggtgaccctggggaagatgggcggaaaggagaaaagggagattcaggagcgtccggacgagagggcagagacggaccgaaaggggaacgcggtgcacctggtattcttgggccacaaggtccccctggcttgcccggaccagtcggcccccctgggcaagggttcccaggtgtgccaggggggacgggccctaagggcgaccgaggagagactggatcaaagggagaacaaggcctgccgggagaacgcggactgagaggtgaaccaggatcagtacctaacgtggatcggcttctggaaactgcgggaatcaaagcatctgctcttcgagaaattgtggagacttgggacgaaagctcgggttcctttcttccagtgccagagaggagacgcggacccaagggcgactcaggcgaacagggaccacctggaaaggaaggtcctattggctttccaggcgagcgggggcttaagggagatcggggcgacccgggacctcaggggccaccaggactggcgctgggtgagcgagggcctccaggaccaagcggcctggcaggcgaacctggaaagcctggcattcccggacttcccggacgcgccggtggggtgggagaggcaggacgcccgggggaaagaggagagcggggagaaaaaggagagcgcggtgaacagggtcgcgatgggccgcctggcttgcctggaactcctgggccgccgggaccgccaggacctaaggtttccgtggatgagcctggtcctggtttgtccggagagcaaggtccacctggacttaagggtgccaagggggaacccgggtccaatggtgatcagggacctaagggggacagaggtgtccctggtattaagggtgatagaggggagcctggaccccgaggccaggatggcaatcccggacttcccggtgaacggggtatggcaggaccagaagggaaacccggacttcagggaccacggggaccacctggcccagtgggcggtcatggcgacccgggtccacccggagcacctgggcttgccggcccagcgggtccccaagggccttcggggctgaagggagaacctggagaaactggacctccaggaagagggctcacgggaccaaccggagccgtcggactgcctggacctcccggcccttccggacttgtcggcccacagggtagtcctgggctccctgggcaagtgggtgagacgggcaagccgggtgcaccaggtagagacggcgcatctggtaaagacggagacagaggatcgcccggtgtccccgggagccctgggctgccaggaccagttggaccaaagggagaaccaggacctaccggtgcacctggtcaggccgtggtcgggcttcccggtgccaaaggagagaaaggtgcgcctggaggacttgcaggggatctggtgggtgaacctggagcaaagggtgatcgaggtctgcctgggccgaggggcgagaagggtgaggcagggcgcgcaggagagcctggggatcccggagaagatggacagaagggagcaccagggcccaaaggtttcaagggagatcctggagtgggggtgccaggatcgcctggcccgcccggcccccctggagttaagggtgatctgggtttgccaggcttgcccggagcgcctggagtcgtcggctttcctggacaaaccgggcctagaggagaaatgggacagccgggaccaagcggcgaacgcggactggcaggccctcctggtcgggagggtatccctgggccacttggaccccccggcccacctggctcggtaggaccgccaggagcttctggactgaagggggataagggcgatccaggagtgggtctgccaggtccccggggtgaaagaggagaaccagggattagaggcgaagatggacggccaggtcaggaagggcctcgcgggctgacgggtcctcctggttcccgaggagagagaggagaaaagggagacgtaggttctgcagggctgaagggagacaagggggattcggcagtgatcttgggcccaccagggccgagaggggccaagggagatatgggcgaacgaggcccacggggtctggatggagataagggacccagaggtgacaatggggatcccggtgacaagggatccaagggggaacccggcgataaagggtctgcgggtctgccaggcctccggggacttctgggaccacaaggccagcctggagcagcaggcattcctggtgaccctgggtcgccaggtaaggacggcgtccccggtataagaggagaaaaaggagatgtggggtttatgggaccccgaggcctcaagggcgaaaggggtgtgaagggggcctgcggccttgatggagaaaagggagataaaggagaagccggcccacctggtagacctggcctcgcaggtcacaagggtgaaatgggtgagccaggagtgcctggacagagcggcgcccctggtaaagaaggacttattggacctaaaggagataggggcttcgacggtcaacctggcccaaaaggcgaccagggtgaaaaaggagaaagagggacccctgggattggaggtttccccggcccttcggggaacgatggttcggcaggccccccaggaccacctgggagcgtcggtccaagaggaccagaaggtctgcagggtcagaagggtgagagaggtcccccaggagaacgcgtggtgggagctcctggagtgcccggagctcccggggaacgcggagaacaaggacgtcccggacctgcgggtcctaggggtgaaaagggggaagcagctcttacggaggatgacatccgcggatttgtccgtcaagaaatgtcgcagcattgtgcatgtcaaggacagtttattgcatccggatcgcgaccactcccttcttacgccgcagatactgcgggttcacaattgcatgcagtccccgtccttcgagtgtcccacgcggaagaagaagagagggtgccccctgaggacgacgaatactccgaatactcggaatacagcgtggaagaataccaagatcccgaggcaccatgggattcagatgacccctgttccctccctctcgatgaaggttcctgcaccgcctacaccctgaggtggtaccaccgtgccgtgaccggatccactgaagcctgtcatcctttcgtgtacggaggatgtggaggtaacgcaaaccgttttggaactcgggaagcatgtgagagaagatgtcctccaagggtggtccagtcacagggaacgggaaccgcgcaagat

SEQ ID NO: 9621 - DNA, 8832 bp, synthetic construct
  misc_feature 1..8832: note = source = /note="Description of Artificial Sequence: Synthetic coding sequence"
  source 1..8832: mol_type = other DNA
atgacgctccgactgctcgtagccgcgctatgcgccggcattctggccgaggctcctagggtgcgcgcacagcaccgagaacgcgtgacctgcacacgcctgtatgccgctgacattgtgttcctgctagacgggtccagctcaattggcagaagcaacttccgggaagtcagatctttcctcgagggcctggttctgccattttctggcgcagcttctgcacagggcgttaggtttgccacagttcagtactcagatgatccaaggactgagttcggcctggatgctctagggtccgggggcgacgtgattagagccattcgggaactgtcctataaaggcgggaacactcgcacaggagccgccattttgcacgtagctgatcacgtattccttcctcagctggcccggcccggcgtcccaaaggtgtgtatactaattacagacgggaaatcccaggacctggtggacactgccgcccagcgcttgaaaggacagggagtgaagttattcgctgtcgggatcaaaaatgctgatcctgaagaactgaaaagagtcgcgtcccaacctacgagtgactttttcttttttgttaacgatttcagcattctcagaacactgcttcccctcgtttcgcgccgggtatgcactacggccggaggcgtacccgtgacacgcccaccagacgactcaacgtctgcacctcgtgatcttgtcctctctgagccatcttcacaatccctgcgggttcagtggacagccgcctccggccccgtaacaggctataaagtgcaatacacacccttaacggggttggggcagccattaccatccgagcggcaggaagtgaatgtgcctgccggagagacgtcagtgaggctgcgcggcctgaggccactgactgaatatcaggtgactgttatagccctctacgccaactctattggcgaagccgtatcgggcaccgcaaggaccaccgccctggaagggccagagctcacaatacagaacacaactgcccactcactgctagtcgcctggaggagtgtgccgggagctacaggctatcgtgtgacctggagggttctgtctggcgggcccacacagcaacaggagctgggcccgggtcaaggtagtgtgttactcagggacctcgaaccagggacggattacgaagtcaccgtctccaccctcttcggtaggtcagttggacccgccacttcactgatggcacgtacagacgcctccgtggagcaaactcttaggccagttatcctgggtccaacttcaatactgctttcttggaacctcgtccctgaagcacgcggatatcgtctggagtggcggagggaaacaggccttgagccaccgcaaaaggtagttctcccatccgacgtgacgaggtaccaactggacggacttcagccagggacggagtatcgcttgacattgtacaccttgctggaagggcacgaggtcgcaacgcctgcaaccgttgtaccgaccggtccagaactgcctgtgtcacccgtgacagacctccaagccaccgagctgcctggtcaaagggtgcgagtgtcctggagcccagtgcctggcgctacacagtatagaatcattgtaaggtccacccaaggtgtggaaaggacactggtgcttccgggttctcagacagcattcgatctcgatgacgtccaggctggcctgagctatactgtccgcgttagtgcccgtgtaggtccccgggagggttcagcgtcggtcctgactgtacgtcgcgaaccagaaacaccactggctgtccccggattaagagtggtggtgtctgacgcaacaagggtccgagtggcttgggggcctgtgcctggcgctagcggcttccgcattagctggtctactgggtcgggaccagaatcttcacagaccctcccacctgactccactgccactgatattacagggctccaacccggaaccacttatcaagtcgccgtgtctgtgctgcggggccgcgaggaagggcccgctgctgttatcgtggcccgcactgacccactagggcctgtgaggaccgtgcacgtgactcaggcttcttcctctagcgtcacaataacttggacgagggtacctggtgccacaggttacagagtgagttggcactctgcacacgggcccgagaaaagtcagctggtgtctggcgaggccactgtagctgagctggatgggttggaaccggacactgagtacacagtgcatgtgcgggcccacgtggctggtgtggatggtccccccgcttccgttgtggtgagaacagcccctgagcctgtgggccgggtttccaggctgcagattctcaatgcaagcagcgatgtgctccgaattacctgggtcggcgtgacaggtgccactgcttataggctggcttggggcagatcagagggaggtccaatgagacatcaaatactcccaggaaataccgattccgctgaaattaggggcctggaggggggcgtcagctactccgttcgggtcactgcattggtgggggaccgagaaggaacccccgtgtctattgttgtgacaactccgcctgaggcccctcccgcacttgggactctgcacgtggtacagcggggggagcatagccttcgcctacgctgggaaccggtaccaagggctcagggctttttactgcactggcagcccgagggggggcaggagcagtctcgggtgctcggacccgaactctccagctaccatttagatgggctggaacctgcaacgcagtaccgagtgcgactgtcagtcttggggccagcaggagaggggccttcagctgaggtcactgctagaactgagtctccaagagttccctctattgaactgagagtagtggacacaagcattgactctgtgacgcttgcttggacccccgttagcagggcaagtagctacatactgagctggagacccttgcgtggccccggtcaagaagtgcctggatctccccagactctccccgggatatcttcatcccagcgggtgaccggcctcgaacccggggtcagttatatcttttccctcacaccggtgctcgatggggtgcgaggccctgaggcttcggttacccagacccctgtatgtcctcgggggctggctgatgtggtcttcctgcctcacgccacccaggacaacgcacaccgcgcagaggccacgcggagagtcttggagcgcctggtgctagctctggggcccctgggaccacaggccgtacaggtagggttgctgtcttactcgcatcgtcctagcccccttttccccctgaacggctcccatgacttgggcatcattttgcagcggatcagggatatgccgtacatggatccaagtggcaacaacttaggcacagcagtggtcaccgctcaccgttacatgctagcgccagatgcccctggtcgcaggcagcatgtcccaggtgttatggtgctcctggttgacgagcctctcaggggcgatatattttctcccattcgggaggcacaggcctctggactgaacgtggtgatgcttgggatggccggcgccgacccagaacagctcaggaggctggcacccggtatggattccgtgcagacatttttcgctgtggacgacgggcctagcctggaccaagcagtatcaggcctggcaacggcactatgccaggcatcatttactacacagccccgacctgagccctgtcccgtctactgtcccaagggccagaagggcgaacccggcgaaatgggtctgagagggcaggtgggacctccgggcgatccgggtttgcccggacgcaccggggcccccggaccccaggggcccccgggaagtgcaacagccaaaggcgaacgaggttttcctggggcagacggacgtccaggcagccccggaagagcaggaaaccccggaacacctggcgcaccaggtctcaaaggctcaccaggcctgccaggacccaggggcgatcccggtgagcgggggcccagaggacccaagggggagcccggagcaccagggcaggtcattggtggtgagggtcccggactcccagggaggaagggggatcctgggcctagtggtccacccggcccgcggggcccactaggcgacccaggtcccaggggcccccccggcctgcctggtacagctatgaagggggataagggagatcgcggcgaacggggtccacccgggcctggagagggcggaattgcccccggagaaccagggctgcctggcctgcccgggagtcccgggccacaggggccggtgggccctccagggaagaagggcgagaaaggcgattcagaggacggggcccccggcctcccaggccaacctggcagtcccggcgaacaagggccaagaggacctcccggagccattggccctaagggcgacagaggctttcccggtccactgggggaggcgggagagaaaggggagcgtggccccccaggacctgcaggctctaggggtctccctggcgtggctgggcggcccggagctaaaggaccagaagggcctcccggtcccaccggtcgccagggggagaaaggcgagcccggccgcccaggcgaccctgctgtcgtggggcctgccgttgccggccctaagggcgaaaagggcgatgtgggcccagccggaccccggggcgcaacaggagtccagggtgaaagaggtccaccaggtttggtactgcctggtgacccaggacccaagggtgaccccggtgatcgaggtcccattggccttaccggcagggccggaccccccggagattcaggaccaccaggcgaaaagggcgaccctgggcgaccaggtcctcccgggccggtcggccctcgcgggcgcgatggcgaggttggggagaagggagacgaaggaccgcctggtgatcccgggcttcccgggaaggcaggggagcgcgggctgaggggagctccgggcgttcggggacccgtgggagaaaagggcgaccagggcgaccctggggaagatggtcgtaacggcagccctggttcatctggcccgaagggtgaccggggcgagcccggtccccccggcccaccaggaaggcttgtggacactggccctggagcgagggagaaaggtgagcctggagataggggccaggaagggcctaggggtccgaaaggagaccctggactgcccggtgcgccgggcgagaggggcatcgaggggtttagagggccccctggccctcagggcgatccaggggtgcggggaccggccggtgagaaaggagataggggacccccgggactcgacgggcgctcaggacttgatggaaagccaggcgccgccgggcccagcgggccaaacggtgccgcgggtaaggcaggagaccctggaagggacggcttgcccggactcagaggggaacaaggcctgcccgggccatccgggccacccgggctgccgggtaagccaggagaagacggaaaacctggactgaacggaaaaaacggggagcccggggaccctggagaggatgggcggaaaggtgaaaaaggcgatagcggtgcatccggtcgggaagggcgtgacggcccaaaaggggaaaggggggccccaggtatcttaggtccacagggcccccccggcttgcctgggccagtcggcccgcctgggcagggttttccaggcgtgcctgggggcaccggacctaagggcgaccggggcgaaaccggctccaaaggggaacaaggactaccaggtgagagaggactcaggggcgagcccggatccgtgcccaacgtcgataggctgctggagactgctggtatcaaagcatccgcacttcgcgaaattgttgagacctgggacgaatcctccgggagttttctgccggtccccgagaggcggcggggacccaaaggagactccggcgagcaggggcccccaggaaaagaaggccccatagggtttcctggggagcgaggcctgaagggtgatcggggagacccagggcctcaggggccacctggactggccctaggcgagagagggcctcccggaccatcaggtctagccggagaacccggaaaacccggcatcccaggcctgcccggcagggctggcggggtgggcgaagccggccgtcctggagagagaggggaacggggagagaagggcgagcgcggcgagcagggcagggacgggccacccggactgcccgggactccaggtcctccaggtccccccggaccaaaagtgtcagttgatgaacccggacccggcctttcaggtgaacaggggcctccagggctgaaaggggcgaaaggggagccagggtccaacggcgaccagggaccgaagggtgaccgcggggttcctggaatcaagggagatcgtggggaacctggccccaggggacaggacggcaatcccggattgccgggcgaaaggggaatggctggaccagagggcaagccaggactacagggccccagggggccccccggcccagtgggcggtcacggggaccccgggcccccaggcgcccctgggctggccggacctgctgggccacaggggccttccggcctgaaaggggaacctggagagactgggccccccggtcgcggcctgacaggccccactggcgcggtcggtcttcccggacctcccggaccgagcggcctggtagggccacagggaagccctggtctgcccggccaggtgggagaaaccggtaagccaggcgcaccgggtcgtgatggggcatctgggaaagatggggatagagggagtcctggcgtcccagggagcccaggactgccaggccccgtgggaccaaagggcgaaccaggcccgaccggtgcccctggtcaggccgtggtgggtctgccgggcgctaaaggcgagaagggagcacctggcgggctggctggagatctagttggagagccgggcgcgaagggagatcgcggcttgccgggtcctagaggagaaaaaggggaagccggaagagccggcgaaccaggggatcccggggaggacggccagaaaggggcccccggacccaagggtttcaaaggcgacccaggcgtgggtgttcctgggagccccggcccccctggcccgccaggagtcaagggggacctcggattacccgggctgccgggcgctcctggcgtcgttggctttcctggacagacgggaccacgcggggagatgggacagcccggaccctccggtgagaggggcttagccgggcccccgggccgggaggggatccccgggccgctggggccacctggtcccccagggtctgtgggccccccaggcgccagcggcctaaaaggtgacaagggcgatccaggggtcggcttgccaggcccacgaggagagcgaggggaaccaggcatcaggggggaggacggtagacctggccaggaagggcccaggggcctaaccggcccaccaggttctcggggcgaacgcggagaaaagggcgatgtcggaagcgccggcttgaagggtgacaaaggcgacagcgccgtcatcctaggacccccaggccctcgcggagccaaaggcgacatgggagagagagggcccagagggctcgatggcgacaagggacctcgcggtgataatggcgatcctggagataaaggcagcaagggtgagcctggagataaaggatccgccggattaccagggctgagagggttactcggaccccagggacagcccggtgctgccgggatcccgggcgaccctgggagccccgggaaggacggcgtgccgggaattagaggggagaaaggcgatgttggtttcatgggccccaggggcctgaaaggcgagcgcggggttaaaggagcgtgtggcctggacggcgagaagggcgacaaaggggaagcaggaccgcctggccgtcctggtttggcggggcacaaaggagagatgggtgaacccggtgtacccggacagtcaggggcaccaggaaaggagggcttgatagggcccaagggcgataggggctttgacggacagccaggtcccaagggtgaccaaggcgagaagggagagaggggaacacctgggatcggcggtttcccagggccctccggaaatgacggaagtgcgggacccccgggacctcctgggtctgtgggtcccaggggccccgagggcctgcagggccagaagggcgagagggggcctcctggcgaacgcgttgtcggcgcccctggggtgcctggcgccccaggcgagagaggcgagcagggccggccgggaccagccggcccaaggggcgagaagggggaagccgcgctaactgaagatgatataaggggcttcgtccgccaggaaatgtcacagcactgcgcatgccagggccagttcatcgccagcggatcgagacctttgcctagctacgctgcagacacggccgggtcacagttacacgctgtgcctgttttacgagtctctcatgccgaggaagaagaacgagtgccccccgaggatgatgaatacagcgaatattccgaatactccgttgaggagtatcaagaccctgaggccccctgggattctgacgacccatgcagcctacccctggatgagggctcctgcacagcctataccttgcgctggtaccatcgggccgtgaccggcagcacagaggcctgccaccccttcgtgtacggcggctgcggcggcaacgcgaacagatttggcacccgtgaggcctgtgagcgtcgatgtccacccagagttgtgcagtctcagggcacgggtactgctcaggac

SEQ ID NO: 9622 - DNA, 8832 bp, synthetic construct
  misc_feature 1..8832: note = source = /note="Description of Artificial Sequence: Synthetic coding sequence"
  source 1..8832: mol_type = other DNA
atgactctgagattgctggtggcagccctgtgcgcaggaatactcgctgaggcaccacgggtgagggcacaacaccgcgaaagggtgacctgtaccaggctgtacgcggctgacatagtgttcctcctcgacggatccagtagcatagggaggagtaactttcgtgaagtgagatctttcctggaggggctggtcctgccattcagcggcgcagctagtgctcagggagtccggtttgctaccgtgcagtacagcgacgatcctcgcactgagttcggactcgatgcactgggctctggaggagatgtgatacgggcaattcgcgagctttcttacaaaggcggcaacaccagaaccggcgctgctatcctgcatgtcgcagaccacgtgttccttccgcaactcgccaggcccggcgttccgaaggtgtgcattctaattactgacggaaagagccaggatctcgtcgacacagcagctcagaggcttaaaggccaaggagtcaagctgttcgcagtcgggattaagaatgcagacccagaagaactgaaacgcgtagcctcacagccaaccagcgacttcttcttttttgtcaacgatttcagcatcttgagaaccctgttgcccttggtaagcaggagggtgtgcaccaccgctgggggagtcccggtcactcggccccctgacgatagcacgtcagccccaagggatctggttctgtcagaacctagcagccagagtcttagggtccagtggaccgctgcctccggtcctgtgacaggatacaaggtgcagtacactcccctaactggcctggggcagcccttgccgtctgaacggcaggaggttaacgtgcctgccggcgaaacctctgtgcggctgagggggcttaggcccctcacagagtaccaggtgaccgttatcgccttgtatgccaatagcatcggcgaagccgtcagcgggacggctaggaccaccgctctcgaagggcccgaattgaccatccagaacacaaccgcccattccctgctggtagcctggagatctgtgcccggagcgaccggataccgtgtaacttggagggtgttgagcggaggaccaactcaacaacaagagctgggcccgggacagggctctgttctgttgagggatcttgaacctggaactgattatgaagtcacagtgtctaccctgttcggacgctctgtgggcccagctacttcgttgatggctcgcaccgatgctagtgtggagcagaccttgcgccccgtgattctgggacccacatctatcctcctcagctggaatctagtgcctgaggcacgtgggtaccggcttgagtggagaagggagacagggctggagccaccacagaaggtggtgcttccaagcgacgtgactcggtaccagctggatggccttcagcccggcaccgagtacaggctgaccctttacactcttctcgaggggcacgaggtcgcaacacccgcgactgtagtccccaccggtccagaacttcctgtgtcccctgtgactgacctgcaagctactgagctgcccggccagagggttcgcgtgtcatggagtcccgttccaggcgctacccagtatcgcatcatcgtcagaagcacgcagggagtcgagcgcactctggtcctccctggaagccagacggcatttgatctggatgatgtgcaggctggcctgagctacaccgttcgtgttagtgctcgggtgggaccccgcgagggaagcgccagcgtgttgaccgttaggagagaacccgaaaccccgctcgcagtcccgggcctgagagtagttgtctccgatgctacccgcgttagggttgcatggggtcccgtgcctggggcatcaggctttcgcatcagctggtcaaccggcagcggacctgaatcttctcagacactccccccagactcaacggctactgacatcacgggtcttcagcctggaaccacataccaagtagcggtgagtgtgctgcgcggccgcgaagaagggccggctgcagtcatcgtggctagaaccgacccactcgggcccgttagaactgtgcacgtgacccaggcatccagctcttctgtcacaatcacttggacccgggtccctggtgcaacaggctacagggtaagctggcactctgctcatggccctgagaagagccagctggttagcggtgaagcaaccgtcgcagagcttgatgggctcgagcctgacaccgaatacacggttcacgtgagggctcacgtggctggcgtggacgggcctcccgcaagcgttgtagtccgcactgctccagagcccgtaggacgcgtttctagactgcagatactaaacgcgagtagcgacgtgcttagaattacttgggtgggagtgacaggggcaacagcctacaggctggcttggggcagatccgaaggaggcccaatgcgtcatcagatcctgccaggcaacaccgattcagctgaaattcgcggacttgagggtggcgtatcatattccgtgagggtgaccgcactcgtgggcgatagagaaggaactcctgtcagcatcgtggtcaccacaccacccgaggcaccgcccgcccttggcacactgcatgtagtgcaaaggggcgagcattcactgcgcttaaggtgggagccagtgccaagagcacagggattcctattgcactggcaacctgagggtggacaagaacagtctcgcgtgcttggacctgagctgagtagttatcatctggatggactcgagcctgctacacagtaccgagtgagacttagtgtccttggacccgctggcgagggcccaagcgctgaggtgacggcccgtaccgagtcacccagggtgccaagcattgaactgcgggtggtcgatacatctatcgattctgtgaccctggcttggactcccgtgagcagggcatccagttacatcctcagttggaggcctttaagggggcctgggcaggaagtcccaggcagccctcagacacttccaggtatctcatcttcccaacgtgtaaccggtctcgagcccggggttagttatatattctctctgaccccagtacttgatggcgtgcggggccccgaggcctcagtgacgcagacgccagtgtgtcctagaggccttgctgatgtcgttttcctaccccacgctacacaagataacgcccaccgcgcagaagccactcgccgtgtgctggagagactggtcctggccctgggcccactgggcccacaggccgttcaggtgggcctcctgtcatattcccacaggccttcacccctcttccccctcaacgggagccatgacctcggcataatcctccagcggatccgcgacatgccttacatggaccccagcggcaacaatctcggaacggctgtcgtgacagctcacagatacatgctggctcccgatgcccctgggcgccgtcagcatgtgccgggggtcatggttttgttggtcgacgagcccctcagaggcgacatttttagtcccatcagggaagcacaagcgagcgggctcaacgtggttatgcttggaatggcgggagcagatccggaacagttacgaaggctggcccctggcatggacagcgtccaaacgttttttgcagtcgatgacggaccctccctggaccaggccgtatctgggctggccacagctctctgtcaggcgtcctttacaacgcagcctagacccgaaccttgccccgtgtactgccccaaaggacagaagggggagcctggcgaaatgggtctccgcggccaagtaggaccccctggtgatccaggacttccaggaaggactggggccccgggcccccagggtcctccgggctcagctaccgcgaagggcgaaagaggatttcccggagcagatggcaggcccggctcacctggacgggccggaaacccaggtactcctggagctccgggcctgaagggctcacccgggctcccaggtcctcggggcgatccaggagagcgcggtccacgcggccccaagggagaaccaggcgcccctggacaggtcataggaggtgagggccccggacttcccgggagaaagggcgatccagggccaagtggaccgccaggcccaaggggacccttaggagaccccggccctagaggaccacccggcttgccaggcaccgcaatgaaaggagacaagggagataggggagaacgggggccgcccggacccggagaaggcggaatcgcgcccggggaaccaggactgcctggattgcccgggagtcccgggccacagggccccgtcggccctcctggtaagaaaggggagaaaggagattcggaagacggagcaccaggcctgcccggtcagccaggttcacctggagagcagggtcccagaggcccgcctggtgccatcggacccaagggtgaccgcgggtttccaggccccttgggcgaagcgggcgagaaaggagaaagaggcccacctggacccgctggctcaagaggactcccaggggtagccggaaggcctggtgccaaagggcccgagggccccccgggaccgactggaaggcagggcgaaaaaggcgaacccggacgacccggggatccagccgtcgtgggaccagctgttgctggcccaaaaggcgaaaaaggagacgtgggacctgccggaccgagaggggctactggagtgcagggcgaacgcgggccgcctgggctcgtgctgccaggcgaccccggccctaaaggcgatcccggcgataggggcccaatcggcctcacaggcagagcagggccacctggcgattcgggccctccaggagagaaaggagatccagggagacctggaccgccaggacctgttggacctagaggtagggacggagaggtgggagaaaaaggagacgaaggacctccgggagaccccgggctgcctggcaaagcaggagaacgaggacttcgaggggctcctggagttagggggccagtgggggagaaaggagaccaaggagatcctggcgaagatggcagaaatggctcaccaggatctagcggtcccaaaggggacagaggcgaacccggaccccctggacctcccgggcgtctcgttgataccggcccaggcgcccgcgagaaaggagagcccggcgaccggggacaggaaggacctagggggcctaaaggagatccagggctcccaggtgctcctggagagaggggcatagaagggtttagagggccgccaggccctcaaggcgacccaggcgtgagaggccctgccggggaaaagggagatcgcggaccccctggattggatggcagaagcggactcgatggcaaacccggagctgctggacctagcggacccaatggagcagctggcaaagccggagatccgggccgagatggcctgccaggactgagaggagagcagggacttccaggaccttcaggtcctcctggcctgccaggcaagcctggagaggatggaaagcccggcctaaatgggaaaaacggcgaacccggcgatcctggcgaagacggaagaaagggagagaaaggagatagtggagcttccgggcgcgaaggaagagatgggccaaagggggaaaggggtgctcccggcattcttggcccgcaagggccaccgggactccctggcccagtgggccctccgggtcaagggttcccaggagtccctgggggcacgggccccaaaggggatcgtggagagaccgggtctaagggtgagcagggacttccaggagagaggggcctccgaggagaacctggctcggtaccaaacgtcgatcgcctgctggagacggccggaatcaaggcttctgccctgagagagattgtggagacctgggatgaaagctctggaagctttctcccagtgccagagcgtaggcgtggacctaaaggggattctggggaacaggggcctcccggtaaggagggacctattggatttccaggggagcgcggtttgaaaggcgatagaggcgatccgggtccacagggaccccccggcctcgcgcttggagagcggggaccccccggcccttccgggcttgcaggcgagcctggaaagcccggcatccccggactgcctggcagggctggcggagttggagaagccggacggcctggagaacgcggagagcgaggcgaaaagggcgagcgtggcgaacaggggcgggacgggccccccggccttccaggcacgcctggcccccctggcccacctggcccgaaggtttcagtcgacgaaccaggtcccggtctgagcggggaacagggaccacccgggctcaagggggcaaaaggcgagcctggctctaacggcgatcaagggccgaagggagaccgcggtgttcccgggatcaaaggcgacagaggcgagccgggaccgaggggccaagacggcaacccgggtttgcccggcgaacgaggtatggctggtcctgagggcaagcccggcctccagggccccagggggccacccggtccagtaggcggccacggagatccgggaccgcctggtgcacctggactggctggtcccgccggcccacagggcccctccggtctgaaaggcgagcccggagaaacagggccccctggaaggggattgacagggcccaccggcgctgtgggacttccaggcccacctggaccttcaggcctggtcggacctcagggaagcccagggctgcccggtcaagtgggcgagaccggcaaacctggggctcccggccgggacggagccagcgggaaggatggagataggggaagcccaggcgtgccgggatcacccggcctgcctggcccagtcggacctaagggcgaacctggccctactggcgcacccggacaggcagttgtcgggctgccgggcgccaaaggcgaaaagggagctccaggcggacttgcaggagacttggtcggagaaccaggagccaagggggatagaggactgccgggccctaggggtgagaagggcgaagcgggaagggcaggcgagccgggagaccccggtgaggatggccaaaagggggccccagggcccaaaggctttaaaggcgacccaggagtcggggtacctggaagccccggtcctcctggacctcccggcgtgaaaggagatctgggcctgcccggactccctggcgctccaggagtggttggattccccggtcagaccggaccacgcggggagatgggccaaccaggtccctcaggtgagaggggccttgccggcccaccggggcgtgaggggatccccggacctcttggacctcctgggccccctggatcagtggggcccccgggcgcatctggacttaagggagacaaaggcgaccctggcgttggcctgcctggccctcgcggagagagaggagagcccggaataaggggagaggatggaaggcccggacaggaaggacccagggggttgactggaccccctgggtcaagaggcgagagaggtgagaaaggtgatgtggggtccgcgggactgaagggagacaagggggactccgcagtgatattgggaccacctggaccacgcggcgcaaaaggcgatatgggagaaagaggcccccgcggcttggatggagacaaaggaccgaggggcgacaatggagatcccggagacaaaggctcaaagggagagccaggagacaaagggtctgccggcctccccggcctgagaggacttctgggcccccaaggccagcccggagcagcaggcatccccggcgaccctggctcgcctggtaaagatggcgtacccgggattaggggcgagaaaggagatgtgggcttcatgggccccagggggctgaaaggcgagaggggtgtcaaaggagcgtgcggcctggatggcgagaagggtgataagggcgaagctggaccaccgggtagacccggactagcaggacacaagggagagatgggtgaaccaggagtgcctggacagtctggcgctcctggtaaagaggggctgatcggccctaagggagatagaggatttgatggacagcctggacccaagggcgatcagggggagaagggggaaaggggcacacctggaatcggcggcttccccggtccgagtggaaatgatgggtctgcaggcccacctggacccccagggagtgtgggcccacgcggccccgagggtcttcaaggccagaaaggcgaaagggggccaccaggagagagggtggtgggcgcacctggcgtcccaggcgcacctggcgagaggggagagcaaggaaggcccggccctgctggccctaggggtgagaagggagaagctgcattaaccgaggacgacatcagaggcttcgttcgccaggagatgagccagcactgtgcatgtcagggccaatttatcgcttccgggtccaggcccctgccctcttacgctgctgacactgcaggttcacaactgcacgctgtccctgtgctgcgcgtgagccacgccgaggaggaggagagagttcctcctgaggacgatgaatattctgaatactccgaatacagtgtggaagaataccaggaccctgaggccccctgggactcagacgacccatgttccctgccattggacgaggggtcctgcacagcatacactctgagatggtaccaccgagcagtaaccggaagcactgaggcttgtcatcctttcgtatacggaggttgcggtggcaatgcaaacagattcggaacacgagaggcatgtgagagacgttgtccacctcgcgtcgtgcaatcacagggcaccggcacggcgcaagac

SEQ ID NO: 9623 - DNA, 8832 bp, synthetic construct
  misc_feature 1..8832: note = source = /note="Description of Artificial Sequence: Synthetic coding sequence"
  source 1..8832: mol_type = other DNA
atgaccctcagactgctggtggcggcgctgtgcgcgggtattctggctgaagcccccagagtccgggcccaacacagagagcgggtaacctgcaccaggctgtatgccgcggacatcgtttttctgctcgacggatctagctccattgggcgcagtaacttccgcgaggtgaggagctttcttgaaggcttggtcctcccttttagcggagcagcatctgcacagggggttaggttcgccacagtgcagtactcagatgacccgcgcaccgagtttgggctggatgcactaggctccgggggtgacgtgatcagagccattagagaactgtcttacaagggcggcaataccaggacaggagcagctattctgcatgtggccgatcatgtctttttgccacagctggcccgaccaggcgttccaaaagtgtgtatacttatcacagacggtaagtcccaagacctcgtggacacagcggcccagcggttaaagggacagggcgtgaaactcttcgccgtgggaattaaaaatgccgatcccgaggagcttaagagggttgcgtctcagccaacatcggatttctttttctttgtgaacgatttctccatactgcggactctgctccccttagtaagccgacgagtttgtactaccgccggaggtgttcctgtgacaaggcccccagacgattcaacaagtgcccccagggaccttgtgctctcagagccttcttcccaaagcctgcgcgttcagtggacagcagcttccgggcctgttacaggatacaaggtacagtatacaccccttaccgggctggggcagccacttccaagcgagcgacaggaagtgaacgtacccgccggcgagacgtccgtgcggctgcgtggactgagaccactgaccgaataccaggtgacagtgatcgctctgtatgccaatagcataggtgaggccgtgagcggtaccgctaggacgactgctctggaagggcctgaactgaccatacagaacacaaccgcccattcgttgttagtggcgtggcgctcagtacctggcgcaacaggatatagagtaacatggcgcgtgctgagtggagggcccacccaacagcaggagctgggtcccggccaaggcagcgtgctgttacgtgatctggaaccagggaccgattatgaagtgactgttagcacactcttcgggcggtctgtggggcctgcaacgagtttgatggcacgcaccgacgctagcgttgagcagacattaagaccagtgattttggggccaacaagtattctgctgagttggaacctggtgccagaggcacgcggatatagattggagtggagaagagagacgggtctggagcctccccagaaggtggtgcttccgagcgatgtcacgaggtatcagctagatggcctgcagcccggaaccgagtatcgcctcactctctacactctgctggaaggccacgaagtcgcgacaccagctaccgtggtgcccactggacccgagctccctgtgtccccagtcaccgatttgcaagctaccgagctccccggtcaacgggtcagggtgtcctggtcccctgtcccaggggccactcagtacaggatcatcgtgcgttctactcagggcgttgagcgtacactggtgttacccggatctcagaccgccttcgaccttgatgatgtgcaggctggcttgtcctataccgtccgcgtctccgcgcgagtggggcccagggaggggagcgccagcgttctaaccgtaaggcgcgagcccgagactcccctggccgtgcctggactacgcgtggtggtgtctgacgccacacgagtgcgggtggcctggggtccggtgccgggtgcctccggctttcgcatttcttggtctactggcagtgggccagagagttcccagaccttacctcctgactctacggccacagacattaccggcctgcagcccggcacgacttatcaggttgccgtgtccgttctgcgaggtagagaagaaggcccagctgccgttatcgtcgccagaacagatccacttggccctgtccgtaccgtgcacgtgactcaggcgagctcctccagcgttaccattacatggaccagagtgccaggagcgaccggctatagggtgagttggcattctgcccatggccctgaaaaatctcagctggtcagtggggaagcaaccgtggcggaacttgatggactggaacccgacaccgagtacaccgtacatgttcgggctcacgttgcgggcgtcgacgggcctcctgcctcggttgtggtgagaactgcgccagagcccgtcggccgcgtctcacggctgcagatcctgaacgcctcttccgatgtcctgcgaatcacctgggtgggcgtgaccggggcgacagcctacaggctcgcctggggccgttcggagggaggccctatgcgccatcagattttaccaggtaatacggattcagctgaaatcaggggtcttgaaggaggagtttcttactcggtaagggtaacggccctggttggcgacagagaggggacaccagtcagtattgtagtgactacgcccccggaggccccacccgcgctgggtacgcttcatgtggtacaaagaggtgagcacagtcttcggttacggtgggaacctgtgccccgcgcccagggctttctcctccattggcagccagagggtggacaggaacagagccgcgtcctcgggccagagttatcgtcctaccacctggacggattggaacctgccacacagtatcgcgttagactttctgtcctgggaccagcaggagaaggacccagcgccgaggttaccgctcgcaccgagagtccacgagttccaagcatagaattaagagtggtcgatacatcgatcgacagcgttaccctagcatggactcctgtgagtcgtgcctccagctacattttatcctggcggccattgaggggcccgggacaggaggtcccaggcagcccacagacactgcccggaattagtagcagccagcgtgtgactggcctcgagcccggagtctcctacatcttttccctgacccccgtactggacggagttcgcggccccgaagcatccgtcactcagacacctgtgtgtcctagggggctggcagatgtggtttttttgcctcacgcgactcaggacaacgcccaccgagccgaggcaacaaggcgagtactggaacggctggtgctcgcactggggccgctggggccccaggctgtgcaggttggactgctgtcctacagccatcgaccttcaccactgtttcctttaaatggttctcacgatttaggtattatcctccagcggatccgagatatgccgtacatggacccctctgggaataacttaggcaccgccgttgtgactgcacatcgatacatgctggcaccggacgctccaggcagaagacaacatgtgcctggtgtgatggtgctcctggtggacgagcctctgcgcggcgatatctttagccctatccgggaagctcaggcgagtggtcttaacgtcgtgatgctgggcatggccggtgcggatcccgagcagctgcggcgcttggcacccggaatggattcggtgcagactttcttcgctgtcgacgatggcccctcgcttgatcaggctgtaagtgggctggctactgctctgtgtcaggcgtccttcactacacagccccgacctgagccttgccccgtttactgtccgaagggacagaagggtgaaccaggcgaaatgggtttgcggggtcaggtcgggccgcccggtgaccccgggcttccagggcgaaccggcgctccagggccgcaagggccgccaggttcagccaccgccaaaggagagcgcgggttcccgggggctgatggcaggcccggctcccctggccgcgctggaaatcctgggaccccaggggcgcctgggttgaagggatcccccggtcttcccggtccccgcggcgaccccggggagcgcgggccccgcggacctaagggagagcctggcgcgcctggccaggttattggaggcgagggtccaggcttgcccggccgcaagggggacccgggaccaagcggccctccggggccacgggggcctctcggcgatcccggccccagggggcctccagggctgcctggcacagctatgaaaggtgataagggcgatcggggagagagaggtcctccaggaccaggggaagggggcatcgcgcctggagagccagggctgcctggacttcctgggagccccggtccccaggggccagtcggaccacccgggaagaaaggggagaaaggagatagcgaagatggcgcccctgggcttccaggtcaacccggatcaccaggtgagcaaggacctcgcggacctcctggcgccattggacctaagggggatagaggcttcccaggcccattgggcgaggccggcgagaagggggagcgagggcctcccggccccgctggcagtaggggcttgcctggagtggcaggccgtccaggagctaaggggcccgaagggccaccaggccccacaggaagacagggagaaaagggcgaaccaggacgaccaggagatcctgctgtagtgggtccagccgttgcaggtcctaagggagaaaagggagacgttggccctgcagggcctcgaggagcgaccggcgtgcagggtgagcgcggccccccagggttggttctgccgggagatcccggaccaaagggtgacccaggcgaccgaggcccaatcggtctgaccggacgcgccggtccaccgggagatagtggtccgcctggcgaaaagggagacccggggaggccggggcccccaggcccggtcggccctcgaggccgcgacggggaggtgggcgaaaaaggggacgagggaccgccaggagacccaggcctccccgggaaggcaggagaaagagggctcagaggcgccccgggcgtgcgtggaccagtgggggaaaagggagatcagggagaccctggagaagatggccgcaatggaagccccggctcatcagggccaaaaggcgataggggcgaacccgggccgcccggtcctcctggacgcttagtagacacagggcccggggcaagagaaaagggcgagcccggcgatagggggcaggagggacccagaggacctaaaggcgatccaggcctccccggcgcccccggcgaacgcggaattgaaggtttcaggggaccacccggcccccagggggatccaggagtgaggggaccggccggggagaaaggagacaggggccccccaggactggatgggagatcagggctggacggcaaacccggcgcagccggaccgtctggcccgaatggagcagccggcaaggcaggagaccccggtcgggacggcctgcctggtttgaggggagagcagggcctgccaggaccgtcggggccgccaggacttcctggcaaacccggggaggacggtaaaccaggactcaatgggaaaaatggggaacctggggaccctggtgaggatggtcgaaagggagaaaagggcgatagcggagcaagcggcagggaaggccgcgatggccccaagggcgagagaggagctccaggaattttaggtcctcagggaccaccgggcctgcctggccccgtgggtcctcctggccaggggttccctggagttcccgggggcacgggccccaagggagacaggggcgaaaccggaagcaaaggagaacagggactgcccggtgagcgcgggctgaggggtgagccaggttcagttcctaatgtggacaggctgcttgagaccgcagggatcaaagctagtgcactgagggagattgtggaaacctgggatgagtccagcggaagcttcctccccgttccggaaaggcggcgtggaccgaagggagattctggggagcagggaccgccaggcaaagaggggcccatcgggtttcccggagaacgtggactgaaaggtgatcggggtgacccaggacctcagggccctcccggtctcgccttaggcgaacgggggcctcccggcccttccgggcttgccggtgagcccggtaaacctgggatcccaggacttccaggacgggctgggggagtgggggaggccggccggcccggcgaaaggggagagaggggagagaaaggcgaacggggggagcagggacgagatggacccccaggactacctgggacacctggtcctccaggccctcccggacctaaagtcagtgtagacgaacctggccccggactcagcggcgagcagggacccccagggctgaaaggggcgaagggagaacctggctcaaacggcgaccaaggaccaaaaggggatcggggggtgccggggatcaaaggagacaggggtgaacccgggccccggggccaggacggtaaccccgggttgccgggagagcgggggatggcagggccggaagggaaacctggattacagggccccaggggtcctccagggcctgtggggggacacggagaccccgggccaccaggtgccccgggactcgccgggccagccggtccccagggcccgagcgggctaaaaggggagccgggcgagaccggccctcctgggagaggcctgacagggccaaccggggccgtgggattgccgggaccccccggacctagcggcctcgtgggcccacagggttctccagggctcccgggccaagtcggcgagactggcaagccgggggccccaggaagggacggagccagcggaaaggatggcgatcgaggctctccaggggtgcccggctctcctggactgcccggacccgtggggccaaagggtgaacccggtcctacaggcgcgccagggcaggcggtggtgggactccctggcgccaagggggaaaagggagccccaggggggttagctggtgatcttgtaggagaacctggggccaagggtgatcgcggacttcctggccctcggggcgagaagggggaagccggccgggctggagaaccgggcgatccaggcgaggatggacagaagggggctccagggcctaagggcttcaagggggaccctggagtaggagtgcctggaagccctggaccccccggacctccaggtgtaaaaggcgacctcggtctgcccggcttgccaggggcccccggcgtggtgggatttcccggccagacaggcccacgaggcgaaatgggacaacccggaccatcaggggaaagagggctagctgggcccccgggccgcgagggcattccagggccactaggacccccggggccgccgggctctgttggaccccctggggcttctggccttaagggagacaaaggcgaccctggtgtaggactccccggaccgagaggcgaaaggggggaacctggaatacggggcgaagatggccgtcctgggcaggagggccccaggggcctgacagggccacccggctcccgaggcgagagaggagaaaaaggcgatgtaggctcagcaggcctgaaaggggacaagggggatagcgcagtgatcttgggtccaccgggccctagaggtgccaaaggggacatgggagagcgcggaccacgtgggctcgacggagacaagggacctcggggggataatggggaccccggagacaagggcagtaaaggtgaacccggagataaagggagcgccggcttgccgggattgagggggctgctgggaccacagggacaacccggggctgcgggcatccccggggaccctgggagtcctggcaaggatggtgtgcccgggatcagaggggagaaaggggatgttggattcatgggtcctcgcggactcaaaggggaacggggggtcaagggtgcttgcggcttggacggcgagaagggcgataaaggggaggctggccctcccggcagacctggtctggccggacacaaaggcgagatgggcgaaccgggcgtgccagggcagagtggcgccccaggaaaagagggactgattggccctaaaggcgacaggggttttgacggtcaaccgggccccaaaggcgaccagggtgagaagggggagcgcgggacaccgggcattggcggcttccccggtccatcgggcaacgacggatcggcaggacctcctggccctccaggatctgtgggccccaggggcccagagggtttgcagggccaaaagggggagaggggaccccctggggaaagagttgtgggtgcaccaggggtacctggagcgccaggagagaggggggagcaggggcgaccaggccctgctggaccgagaggcgagaagggagaagctgccctgacagaggatgatattagaggatttgtacgacaggagatgtctcagcattgcgcctgccagggacagttcattgcaagcggcagcaggcctttacccagctacgccgccgacaccgcgggtagtcagctgcacgctgtgccagtgcttagggtcagccacgccgaggaggaggaaagagtgcctccagaagatgatgaatatagcgaatactctgagtattctgtggaagagtaccaggatccagaggccccctgggattcagacgacccttgctccctgccgcttgacgagggcagctgtactgcgtacaccctacgctggtaccaccgcgccgttacgggatcaacagaagcctgtcacccttttgtgtacggaggctgcggcggaaatgcaaaccggttcgggacgcgcgaagcgtgtgagcggcggtgtccacccagggtcgtgcagtcacaggggactggcaccgcccaggac

SEQ ID NO: 9624 - DNA, 8832 bp, synthetic construct
  misc_feature 1..8832: note = source = /note="Description of Artificial Sequence: Synthetic coding sequence"
  source 1..8832: mol_type = other DNA
atgaccctgaggcttcttgtcgcggcgctgtgtgcaggaattctcgcagaagcgcctcgggtcagggcacaacacagggagcgcgtgacctgcactcggctctacgccgcggatatagtgttcttgctcgacggctcatcctcaataggcagatcaaactttcgcgaggtgcgctcatttctggaaggactggtgcttcccttttcaggtgccgcaagcgcacagggggtccggttcgccactgtccaatatagcgatgacccccgtaccgaatttggtttggacgctctgggatccgggggtgatgtgattagagccattagagagctttcatacaagggagggaatactcgcactggggctgcgattcttcatgtggcagatcatgtgtttctgcctcagcttgcgcgccctggagttcccaaggtctgtatcctcattacggacggtaagtcgcaagatctggtcgacacggcagctcagagactcaaaggacagggggtgaaactttttgcagtaggaattaagaacgctgatccagaggaactcaagagagtagcaagccagcctacttccgactttttcttttttgtgaacgattttagcatcctccgaactctgttgccgcttgtgagcagaagggtgtgtaccactgcaggcggggtgcctgtcactagacctccagatgattcgacgtcagcaccacgcgatctggtgctgagcgaaccaagcagccagtcgcttagagtgcagtggactgcagcctccggccccgtgaccggatacaaggttcaatacactccactgactgggctcggacagccacttccaagcgaacgccaagaagtgaacgtgcctgcaggtgaaactagcgtcagacttagagggctgaggccgctgaccgagtaccaggtgaccgtcattgccctgtacgcaaattccattggagaggcagtttccggaaccgcacggaccaccgccttggaaggtccggaacttactattcaaaataccactgcgcattctttgttggtggcttggcggagcgtcccaggagcaacgggttacagagtgacgtggcgagtcctttcaggaggacctacccaacaacaggaactgggacctggtcaaggctcggtccttcttcgggatctggagcctggaaccgattacgaagtgaccgtgtcaaccctgttcggacgctcagtggggcctgcaacttcgcttatggccagaactgatgcaagcgttgaacagactcttagaccggtcatacttggtcctacttcaatactcctttcgtggaacctcgtccctgaagcaagaggttaccggctcgaatggagacgggaaactgggctggaacctccacagaaggtggtgcttccttccgatgtcaccaggtaccagctggacggattgcaacccgggaccgaataccggctgaccctgtatactcttctcgagggccatgaggtggcaacccctgcaacggtcgtgcctaccggaccagaactccctgtgagccccgtcaccgatctgcaggccaccgagctgcctgggcagagagtcagagtttcgtggagcccggtgcccggcgcaactcaataccgaattatcgtccgctccacccaaggcgtggaacggacgctggtgttgccaggaagccagacggctttcgatctggatgatgtgcaagcaggactctcgtacactgtccgggtgtcagcacgcgtgggaccgcgtgagggtagcgcatccgtcttgactgttagacgagaaccggaaacgccccttgccgtgcccggacttagggtggtcgtaagcgatgccacgcgcgttcgcgtggcgtggggacctgtgcccggagcaagcggcttcagaatttcatggtcgactggatccggtccggagtcctcgcaaactctgcctccagatagcaccgcaactgacatcaccggactgcaaccaggtaccacttaccaagtggcagtgtctgtcctgagaggccgcgaggaaggacctgcagcggtgattgtggcaaggactgacccactgggccctgtccggacggtgcatgtgacccaggcgtcctcgtcctccgtgaccatcacttggactagagtgccgggagcgaccggctaccgcgtgtcctggcattcggctcatggtcctgagaagtcccagctggtgtctggtgaagcaaccgtggccgaacttgacggtctggagcccgataccgaatacactgtccacgtgcgcgcacatgtggcaggagtcgatgggccccctgcatcggtcgtggtgaggaccgcaccagagcccgtcggtagagtttcgcggctgcagatccttaacgcttcgtcggacgtgctgcgtattacgtgggtgggagtaactggtgccaccgcctatcgcctggcatgggggagatccgaaggtgggcctatgcgtcaccaaatacttcccggaaatactgattcggccgagatccgcggattggaaggcggcgtgtcgtactcggtgagagtgaccgccctggtcggagatcgcgagggtacccctgtctccatcgtggtgaccacgccccctgaagcacctccagcacttggaactctgcatgtggtgcaacggggtgaacattcgttgcggcttcgttgggagccagtgcctcgtgcacaagggtttctgcttcattggcaacctgaaggaggacaggaacaatcacgtgtgttgggtcctgagctttcgagctaccacctggacggactggaacctgctactcagtacagggtcaggctttcggtgctcggcccggcaggggagggaccatcagcggaggtgaccgcgcgaaccgaatcacctcgcgtgccgtcgattgagctgcgtgtggtggatacttcaatagattcagtgactctcgcatggactccagtctccagagcatcatcctacattctgtcgtggaggccactgagaggacctggacaagaggtgcctggatcgccacaaactctgccaggtattagcagctcacaaagggtgaccggtctggaacctggagtgtcgtacattttcagtcttacgccagtgctggatggagtgcgcggccccgaggcctccgtgactcaaacccccgtgtgtccaaggggcctggcagacgtggtctttttgcctcacgcaacccaggataacgcacatcgtgcagaagctactcgacgtgtgcttgaaagactcgtgctcgcactgggccctctgggacctcaggcagtgcaggtcggtctgctgtcctacagccacaggccctcaccactttttcctttgaatggatcccacgacttgggcatcatcctccaacgcattcgggacatgccatacatggacccgtcaggcaacaaccttggtactgcagtcgtcactgcccaccggtatatgctggcccccgacgccccgggcaggcgacaacatgtccctggagtgatggtgctgctcgtggacgaaccacttaggggcgacatcttttcacctattagggaagcccaagcgtcgggacttaacgtggtcatgctgggcatggctggtgccgatccagagcagctgcgacgactggcacctggcatggattccgtgcaaacctttttcgcagtggacgatggaccctcgctggatcaagctgtgtcagggttggccaccgctttgtgccaagcatccttcaccacccaacctcgcccagaaccttgtccagtgtactgtcccaaggggcaaaagggagagcctggggaaatgggtctgcgtggccaggtgggtccgccaggtgacccaggccttcctggtcgcaccggagcaccagggcctcaagggcccccagggtcggctaccgcaaagggagaacgcggatttccaggtgcagatggtcggccaggatcacctggtagagccggtaacccaggcactccaggggcacctggattgaaggggtcgcctggactgcctggaccccggggggacccaggcgaacgcggtcccagaggacctaagggagaaccgggtgccccaggacaggtgattggaggtgaaggcccaggtttgccaggaaggaagggcgatccaggcccgtcgggaccaccgggacccaggggtcctctcggggaccccggcccgcggggcccacctggtttgcccggtacggcaatgaagggtgataaaggggatagaggtgagcgtggccctcctggacccggtgaaggaggaattgcccccggagaacctggactgcctgggctccctggatcgcctggtccacaaggacccgtgggcccccctggaaagaagggagaaaaaggtgatagcgaggatggcgcgcctggtctgccaggccaaccgggatcccctggagaacagggacctagagggcctcccggagcaatcggccctaagggagatcgcgggtttcctggtccactcggagaggcaggggaaaagggagaacgcggcccacctggacctgcagggagccgtggactgcccggagtcgccggacgaccgggcgcaaagggacctgagggtcctcccggaccaaccggacgccaaggggagaagggtgaacccggtagacccggcgacccagcagtggtgggaccagcagtggcaggaccaaaaggagaaaagggggatgtcggacctgctgggcctcggggcgctaccggagtccaaggcgaaagaggccctcctggactggtgctgcctggagatcctggccccaaaggagatcccggcgacagaggtcctattggattgactggtcgcgcaggccctcctggagactccggaccacctggtgagaagggggatcctggccgccctggcccacctggaccagtcgggccaaggggaagagatggagaggtcggagaaaagggagatgaaggaccccccggtgatccaggactccccgggaaagcaggtgaaagggggcttaggggcgcacctggagtgagaggtcctgtgggagaaaagggtgaccaaggagatcccggagaggatgggagaaatggttcgcctggttcctcaggtccaaagggagatcgaggagaacccggaccacccggtccccccggccggctggtggacaccggtccgggtgcaagggaaaagggagaacccggagacagagggcaggaaggtccgcggggacccaagggtgaccccggattgcccggcgcccctggcgagcgcggtattgaaggatttagaggtcctcctggtcctcagggagatccaggtgtgcgcgggcccgccggcgagaagggcgataggggaccacccggactggatggacgcagcggcctggacggcaagcccggagccgcaggtccttcaggacctaatggcgcagccggaaaggcgggggatccggggcgtgatgggctgcctggacttagaggcgagcaaggactccccggaccgtccggcccccctggacttccaggcaagcccggcgaggacggtaaacctggtcttaatggaaagaacggtgagcccggggaccctggtgaggacggtaggaagggggaaaaaggtgattcgggagcatccggaagagaaggcagagacggccccaagggagaaaggggcgcccctggaattctggggcctcaaggtcctcctgggctcccaggtcccgtgggtccgccaggacaaggatttcctggcgtcccaggaggtactggacccaagggagatcgtggagaaaccggctcgaagggagaacagggacttcctggcgaacgagggctgcgaggagaacctggctccgtcccgaacgtggaccgtctgctggaaaccgccggtattaaggcgtcagccttgcgagaaattgtggaaacgtgggatgaaagctcgggctctttccttcctgtgcccgaaagacgccgcggaccaaagggagattccggcgagcaaggccctcctggaaaggagggtcctattggattccctggcgagagaggccttaagggcgatagaggtgacccgggtccacaaggacctcccggcctggccctgggggagcgcggacctcctggtccttcgggtctggcgggagagccaggaaagccaggaattcctggcctgccgggtcgagcaggcggggtgggcgaagccggacggcccggcgagaggggggagcggggtgagaagggagaacggggagaacaaggtagagacggacccccaggccttccaggcacccctggaccgccaggtccaccgggccctaaggtttcggtggacgaacctgggccaggtttgtccggtgaacagggacctccagggcttaaaggtgccaaaggggagcctggcagcaatggagatcaaggaccaaagggagatcgaggagtgcctgggattaaaggggaccgaggtgagcctggccctagaggtcaagatggtaaccctggccttccaggagagcgcggtatggcagggcctgaaggaaaacctggtctgcagggacctcgcgggcctcctggcccagtcggaggccatggcgaccctggacccccaggagctcctggcctcgcaggacctgccggccctcaagggccttccggcttgaaaggagagccaggggaaaccggaccacctggacgcggtcttaccggaccgaccggggcggtgggattgccggggcccccaggtccatcagggcttgtgggaccacaagggtcgcccggccttccaggacaggtgggagaaaccggtaaacctggtgcgccgggccgagacggagcatccggtaaagatggcgacagaggtagccctggagttcctggatcccctgggcttcctggaccagtgggtccaaagggagaaccaggacctaccggtgccccgggtcaagccgtcgtgggactgcccggtgcaaaaggagaaaaaggtgcacctgggggactggcaggggatcttgtcggggaaccaggagcaaaaggcgaccgcggtctgccgggtccacgtggagagaagggagaagcgggacgtgcaggagaaccgggcgaccccggagaggatggacagaagggagcaccaggacctaaggggtttaagggcgatccaggcgttggagtccccggatcgccaggtcctccaggccctcccggtgtcaagggagatctggggttgcctggccttcctggagcaccgggtgtggtgggtttccctgggcaaactggccctagaggtgaaatgggtcagccgggaccatcgggtgaacgtggcctggccgggccaccaggtcgggaaggcattcccgggccactcggacctcctggcccgcctggttcggtgggtccccctggtgcaagcggtcttaaaggggacaagggtgacccaggagtgggtctgccaggacctcggggtgaacggggagaacccggcattcggggcgaggacggtagacccggccaagaaggaccacggggcctcactggacctcctggttcgcgcggtgagcgcggagaaaagggagacgtcggatcggccggattgaagggagataagggggattcggccgtgatcctggggcctcctggcccgcggggcgcgaagggcgacatgggagagcgcggtccacggggtcttgatggtgataaagggcctagaggagataacggcgacccaggtgacaagggctccaagggtgaacctggggataagggttccgcaggactgccaggcctccgtgggctcctgggaccgcagggacaacctggagccgcgggaatccctggagatcctggaagcccaggtaaggatggagtgccaggtattcgcggagaaaagggagatgtcgggtttatgggacctcgagggcttaagggggagcgcggggtgaagggagcatgcgggctcgatggggaaaagggcgacaagggggaagccggtccacctggcagacctggactcgcagggcacaagggagagatgggtgaaccgggggtgcctggtcaatccggcgctcctggtaaggagggacttataggacctaaaggagatcgtgggttcgatggacaaccgggacctaagggggatcagggtgagaagggagaacggggtacccctggcatcggggggtttcctggcccaagcggaaatgatggatccgcaggcccgccaggtcctccaggatcagtgggaccacgagggccggaaggactgcagggacaaaagggggaaaggggacctccaggcgaaagagtggttggagcaccaggagtccctggtgctccgggcgaaaggggggagcaaggcagacccggccccgcaggaccaagaggagaaaagggcgaagcagcactgaccgaggatgacattcgtggcttcgtccggcaagaaatgtcgcaacattgtgcttgccagggtcagtttattgcctccggctctcgccctctgccatcctacgcagccgatactgccggtagccaacttcatgccgtgcctgtgctccgggtatcgcatgctgaagaggaggagcgcgtcccacccgaggatgatgaatactcagaatactcggaatactcggtggaagagtaccaggatcctgaagcaccttgggattcggacgacccatgttcgctcccacttgatgaaggttcctgtactgcgtacacccttagatggtaccaccgcgccgtgactggttcaactgaagcctgtcaccctttcgtttacggaggatgtggaggcaacgccaacagatttggcacccgcgaggcatgtgaaagacgctgtccaccccgtgtcgtgcagtcacagggaacgggaactgctcaagat

SEQ ID NO: 9625 - DNA, 8832 bp, synthetic construct
  misc_feature 1..8832: note = source = /note="Description of Artificial Sequence: Synthetic coding sequence"
  source 1..8832: mol_type = other DNA
atgactctcagactcttggtcgcagcgctatgcgctggtatactagccgaagccccacgagtgcgtgcacagcatcgcgaacgtgtaacttgtacccgcctgtatgcagcggacattgtttttctcctggatggcagcagttccatcggcagaagcaacttcagggaagtccggtcatttcttgaaggtctcgtgttgccattctcgggggccgcgtctgcgcagggcgtccggtttgccaccgtgcagtatagtgacgatcccaggaccgagttcggattagatgcactcggctcgggaggagatgtgatcagggcaattagagagctgagctacaagggcggaaacacaaggactggcgcggcaatactccacgttgccgatcacgtgtttttgccccagcttgcacggcctggtgtgcctaaggtttgcatcttgattaccgatggaaagtctcaggaccttgtggataccgccgctcagcgcctgaagggacagggggttaaacttttcgccgttgggataaagaacgctgacccggaggaactgaagagggtggcatcccaacccacatccgacttcttcttcttcgtgaacgatttctcgatactgcgaacattattgcctcttgtcagtcggagggtctgcacaacggcgggcggggtgcctgtcaccagacccccggatgatagcacctctgcaccacgcgacttggtgttgagtgaacccagcagtcagagcctgcgggtgcaatggactgccgcgagcgggcccgtgacaggttacaaagtccagtataccccgctgaccggactaggtcagccactgcccagcgagaggcaggaggttaatgtgcccgccggcgagacgtccgtgcggctcagggggctgcgcccactaacagagtaccaagttacggttatcgccctgtacgctaactccatcggcgaagccgtgtcaggaaccgccaggactaccgcccttgaaggccccgaactgacgattcagaatacaacagcgcactcccttctggtggcttggcgctccgtgccgggagctacaggataccgcgtcacatggcgcgtgttgtctggaggacccactcagcagcaggagctaggcccaggccagggtagtgtgctcctgcgggacttggagccaggaaccgactacgaggtcacagtgtcaacactcttcggaagatcagtcggacccgccacgtcccttatggccaggaccgacgcatctgttgagcagacgttgagaccagtgatccttggtcccacctccatcctgttatcatggaatttggtcccggaggcgagaggctaccgattagaatggagaagggagactggtcttgagcctcctcagaaggtggtgctcccaagcgacgtcacacgttaccaattagacggcctgcaacctgggacggagtatagactgacgctgtataccctgctggagggccatgaagtggccaccccagcaactgtagttcccacgggacccgagctgcctgtttcacccgtgacggacctgcaggcgaccgagcttcctgggcagcgcgtgcgggtgtcctggagtcccgtgcctggggctacgcagtacaggattatcgtgcggagtacccaaggagtggagcgaacactggtgctgccaggttcacagaccgcatttgacctggatgacgtccaggctggtctgtcttataccgtccgagtttccgcccgagttgggccccgggaggggtccgccagtgtcctgacggtcaggagggagccagaaacacctcttgcggtgcccggactgagggtggtcgtgtccgatgccactcgcgtcagagtggcttggggccctgtcccgggggcatcaggatttagaatttcgtggtcaacgggatcagggcccgagagttcgcagacgctgccccccgatagcacagctaccgatattacaggcttgcagcctggcacaacataccaggtggcagtgagcgtcttaagggggcgcgaggagggccccgccgcagtgatcgtagcacgaaccgaccccctggggccagtgcgtaccgtgcacgtgacccaggcctccagcagctccgtgacaatcacttggactagggtccctggtgccacaggataccgtgtctcctggcacagcgctcatggtccggagaagtcgcagctggtcagcggggaggcgaccgtggccgagctcgacggactggagcccgataccgagtataccgttcacgtgagagcgcacgtggcgggcgtggatggcccccccgcctctgtggtggtacggacagcacctgaaccggtgggcagggttagccgattacaaatactgaatgcgtcttctgatgtgctgcgcatcacctgggttggagtgactggcgccaccgcctacaggctggcttggggaaggagtgagggaggcccaatgcgacatcaaattctacccggaaacaccgattccgctgagatccggggcctcgaggggggcgtgtcctatagcgtgcgcgtgacggccctggtcggcgacagggagggcacaccagtgtctatagtcgtgacgacgccgcctgaggcgccccctgctctggggactctgcatgtggtccagcgaggggagcactccctaaggttgcgatgggaacccgtgccaagagcacagggcttcctgttacattggcagcctgaaggcggccaggagcaaagtcgggttcttggacccgaactctcatcttaccatctcgatgggctagaacctgcaacacaatacagggtcaggctgtctgtcttgggtcctgccggagagggtcctagtgccgaggtgacagcacgcacagagtcgccccgcgtcccaagcattgagctgcgagtggtcgatacgagtatcgattccgttactctcgcctggacccctgtgtcgcgagcgagctcctatatactgtcttggcgccctttgcggggccccgggcaagaggtgccaggatctcctcagactctgcccgggatctcctcctcccaacgtgtaaccggtctggagcccggtgtctcttacatattctctcttacgccggtgctcgatggagtgaggggacctgaggcatccgtcacccagacgccggtgtgccctagaggcctcgccgatgtcgtgttccttccccatgccacccaggataatgctcaccgtgcagaggccacacggagggtgctggaacgcttggtactagcactggggccactgggcccacaggcagtccaggtcgggctgctttcctacagccatcgacccagccccctgttccccctcaacggaagtcatgacttggggatcatcctgcagaggatcagggatatgccatatatggacccgagcgggaataatctgggaacagccgtagtgaccgcccacagatacatgttggcccctgatgcccctggacgcagacagcacgtccctggggtaatggtgcttctcgtagacgagccactgcgcggggacatattttcccctatcagagaggcgcaagcctccggtctcaatgtggtgatgctgggtatggcaggagccgatccggagcaacttcggcgactggcaccagggatggattccgtccagacctttttcgcagtggacgatgggcccagtctagaccaagccgtgtccgggcttgcgactgccctgtgccaagcatcctttacaacacaacctagacctgagccttgcccagtgtactgcccaaagggccaaaagggggaacctggcgaaatgggactccgaggacaagtgggccctcctggcgatccagggctaccaggacgcacgggcgcacccggaccacagggaccaccaggtagcgccacggcaaaaggagagcgcggatttccaggtgccgacggtcgtcccgggtccccgggccgggccggcaacccagggaccccaggagccccggggctgaagggctctccaggcctcccaggccctaggggtgacccaggtgaacgagggccccgcggcccaaaaggcgagccgggtgcgccgggccaggtgatcggaggggagggccccggtttgcctggccggaagggcgatccgggcccttctggccctcctggcccacgcgggcccctgggagatcctggaccgcgagggccgccgggccttccaggaaccgctatgaaaggcgataagggagatcgcggcgagagagggccacccggcccaggggaaggcggcatagccccgggagagccagggctgccaggtctgcccgggagccctggcccgcaagggcccgtgggacctcctggcaagaaaggcgagaagggagattcagaggacggtgcccccgggctgccaggccagccgggcagtcctggcgagcaagggccacgcgggcctcctggcgcaatcggccccaaaggagaccggggatttcctggccccctgggcgaggcgggggagaaaggggagaggggacctccgggcccggcagggagccgaggtttacctggagtggccggacgacctggcgccaagggacctgagggtcctcctggtcccacggggaggcagggtgaaaaaggggaaccaggacgtcccggggatcccgcagtggtgggtcccgcagtggctgggcccaagggtgaaaagggggatgttggtccggctgggccaagaggcgcaaccggggtccagggagaaaggggccccccgggcctggtcctgccaggggatccggggccaaaaggggatcctggagatcggggacctataggtctgactgggcgggccggtccacctggcgattcagggccaccaggggaaaagggtgaccctggaaggcctggtcctcccggacctgtcggtcccaggggacgtgacggcgaggtgggggagaagggggacgaaggtcctccgggggatcccggcctccccggcaaagccggcgaaagaggattgcggggggcacctggagtacgagggccggtgggcgaaaagggagaccagggcgaccccggcgaagacgggcgaaacggcagccctggcagtagcggtccaaaaggggatcgaggtgaaccggggccacccggtccgcctggacgcctcgtggatactggacctggggctcgggagaagggagaacccggtgacagagggcaggagggacctaggggacccaagggcgatcctgggctgcccggggcaccaggcgaacgcggtatcgaaggctttcgaggacctcccggcccacaaggggatcctggcgttaggggacctgcaggagaaaagggcgatagaggcccacctggcttggatgggagatcaggattggatggcaaacccggcgcggccggtccatcaggaccaaacggtgctgccgggaaggccggcgacccagggagggacggactgcctggactcaggggcgaacagggtcttccgggaccctctgggcctcctggcctgccaggaaaaccaggggaagacggcaaaccaggactgaacggcaagaatggcgagcccggcgaccctggggaggatggaaggaaaggagaaaagggcgacagcggggcctccggacgcgagggccgagacgggccaaaaggggagcgaggcgctcctggcatactgggcccacaggggcctccaggtctgcccggccctgtgggtcccccggggcaagggttccctggcgtccccgggggcactggcccgaaaggagaccgcggggaaactggctccaagggtgaacagggactcccaggtgaacgggggttgcgaggcgaacctgggtccgtgcccaatgtggacaggctgctggagactgcgggcatcaaggcatccgccttaagagagatcgtcgaaacttgggatgagtcttccggctcatttcttccagtgcccgagaggaggcgtggccctaagggcgacagtggcgagcaaggtccgccgggcaaagaagggccaatcggattcccgggcgagcgtgggctgaaaggtgatcgaggggatcccggaccccagggacccccaggactcgcactgggagaacgggggccccctggaccttcggggctggccggggagcctggcaaacccggaatcccgggcctacctggcagggccggcggagtaggagaagccgggcggcccggcgagcggggggagcgtggggaaaagggcgagcgaggagagcaaggacgggacggccctcccggactgccgggtacaccagggcctccaggtcctcccggacccaaagtgagcgtggacgagcctggccccggcctgagcggagagcagggccctccagggctcaagggcgccaaaggtgagcccggcagtaatggggaccaggggcctaaaggagaccgcggcgtcccaggcatcaagggagatagaggtgagcccggaccacgaggccaggacggcaacccagggctcccaggggaaagaggaatggctggcccagaggggaagcccggcctccaaggcccccggggaccgcccggccccgtgggtggccacggggatccgggtccgccaggcgcacctgggcttgcgggccccgccggccctcaggggccttctgggctgaaaggggagcctggcgaaaccggcccaccagggcgggggctaactgggcccaccggagccgtgggtttgccgggtcccccaggtccctctggacttgtagggccccagggctcacccggcttgccgggacaggtcggcgagaccgggaagcctggggctcccggccgtgatggggcctctggcaaggacggggaccggggctctccgggggttcccggtagtcctggcttgcccggccccgtcggccccaaaggcgagcccggccctactggcgcgcccggacaggccgtggttgggctccccggagcgaagggcgagaaaggagcccctgggggactggcgggtgatctggtaggcgaaccaggcgccaagggagatagggggctccccggaccccgaggggaaaagggcgaggcgggtcgggccggagaaccgggggatcctggcgaggacggtcagaagggtgcgcccggacctaaaggcttcaagggcgatcctggagtgggcgtgccaggtagtcctggaccgccgggcccgccaggcgtgaagggtgacctggggctgcctggtctgccaggtgcaccgggtgtcgtgggattccccggacagacgggcccacggggagagatggggcagcccgggccctccggcgagcggggactggctggcccacctggcagggagggcattccgggtccactcgggccccctgggccgccaggctccgtaggcccacccggcgcatcaggactgaagggggacaagggtgatcctggcgtcgggctaccaggaccaaggggcgagcgcggggagcctggcataaggggtgaagacggtcgccctggccaggaaggaccccgtgggttgaccggccccccaggaagccgcggagagcggggagagaagggggacgtcggttccgcgggactcaagggcgataagggagacagcgcagtgatccttggccctcctggtcccagaggcgccaaaggcgacatgggggagcgcggacctagagggcttgacggcgacaaaggtccacgcggcgacaatggagatcctggcgataaaggctccaagggagagcccggggacaagggtagtgctggactgccagggctccgcggtctgctgggccctcagggccagcccggggccgctgggatcccaggcgatcctggaagccccggaaaggacggagtaccaggcatacgcggcgaaaaaggagacgtcggcttcatggggccccgaggcctgaagggggagaggggagtgaagggcgcctgcggactggatggagaaaagggtgataagggggaagcagggcctcctgggcgaccaggtctggcaggacataaaggtgaaatgggggaacccggcgtccccggtcagagcggggctcctggcaaggaggggcttataggccctaaaggagacaggggattcgatggacagcccgggccaaaaggcgatcaaggcgagaagggcgaaagaggcacgcctggaatcgggggtttccctggaccaagtggaaacgacgggtctgcgggtccgcctggcccccccgggagcgtagggccaagaggacctgaggggctgcaaggccagaaaggcgaacggggccccccaggagaacgggtggtgggagcccccggggtccctggagctcccggagagcgaggagaacagggcaggcccggcccagcggggcctcggggggagaaaggggaagcggcgctgacagaagatgacatacggggttttgtgaggcaggagatgagccagcactgcgcatgtcagggacaattcattgcctccggatcgaggcccctcccttcgtatgccgccgatacagcgggcagccagctccacgccgtccctgtgctgagagtatcacacgcggaggaagaagagcgcgtcccgcccgaggacgacgagtatagtgaatactccgagtatagcgtggaagagtatcaggaccccgaggccccctgggactccgacgacccttgttctcttccactcgatgagggtagctgcacggcttacacattaagatggtaccaccgcgcagtcaccggatctaccgaggcatgccacccgttcgtctacggcggatgtggcggcaacgcaaatcgcttcggcaccagggaggcgtgcgagagaaggtgtcctcctagagtggttcagtctcagggaacagggacagcccaggac
